United States Patent Application Publication US 2011/0321197 A1 - sequence listing, part 2

SEQ ID NO: 3273 - DNA, 864 bp, Wolbachia pipientis wMel
  CDS (1)..(864): transl_table=11
atgcatagcaaacctcaatggctcagagcaaaagctccgaccggtgaagtattcaatgagaccttaaacatcgttaaactgcataacttgcatacagtgtgcgaagaggctgcatgtccaaacattggtgaatgttggaataaacgtcatgctactgtgatgattctcggttctgtttgcactcgtgcttgtgcattttgcaacgttgcaactggcattcctgataaactagatcctcatgaaccagaaaatttagcaaaagcaataaaaaagttaaacttaaaacatgttgtcattacttccgttgatcgtgatgatttgccagatggtggcgcaaatcagtttatacagtgcatagaagaaattagaaagataacttcagaaacaacaatagagattttaactcctgattttttaaataagaaaggagcatttgaagcaatcgctgttgcatcacctgatgtctataaccacaatattgaaacagtgccgagattgtatgcaaaaataagaccacgagctcgctattttcattcactatatttgttgaagatggtaaagcagattaatcctaaagttttcacaaagtcagggcttatggttggtcttggagaaacaaaagaggaaatacttcaggttatggacgatttgcgcagtgctgaggttgattttattacaattggtcaatatctacaaccaactccaaaacatgcaaaacttgataggtatgttaccccagaagagtttgagcattataaatacattgcttactccaaaggtttcttagtggttgcatcaagcccactaactcggtcatcataccacgctgaagaagattttaacaggctcaaggcctgtcgttga

SEQ ID NO: 3274 - protein, 287 aa, Wolbachia pipientis wMel
MHSKPQWLRAKAPTGEVFNETLNIVKLHNLHTVCEEAACPNIGECWNKRHATVMILGSVCTRACAFCNVATGIPDKLDPHEPENLAKAIKKLNLKHVVITSVDRDDLPDGGANQFIQCIEEIRKITSETTIEILTPDFLNKKGAFEAIAVASPDVYNHNIETVPRLYAKIRPRARYFHSLYLLKMVKQINPKVFTKSGLMVGLGETKEEILQVMDDLRSAEVDFITIGQYLQPTPKHAKLDRYVTPEEFEHYKYIAYSKGFLVVASSPLTRSSYHAEEDFNRLKACR

SEQ ID NO: 3275 - DNA, 1014 bp, Xanthomonas axonopodis pv
  CDS (1)..(1014): transl_table=11
atgacccagcctatcgcccgttccattcccttgcaggtcgtctctggcgacaccgccgcgcctgcgccgctgcagactggcgtcaagcagatcggtggcgacaagatcaaccgctcgccggtgcagttcgtggatgcgccggtgctgcggaaaccgtcgtggatccgggtgcggattccgtctggcaatgcggtacagaacctcaaggccaagctgcgcgaaaaccgcctggtcacggtgtgcgaagaagccagctgcccgaacatccacgagtgcttcagccacggcaccgcgaccttcatgattttgggcgaggtgtgcacgcggcgctgctcgttctgcgacgtggcgcatggccggccaaagccgcccgacgcgagcgaacctgccagcctggccgccactgttgccgacatgggcctgaagtacgtggtggtgaccagcgtggatcgtgacgacctgcgcgacggtggcgcgcagcatttcgttgactgcatctcggcgatccggaccagctcgcccaacacgcgtatcgaaatcctgaccccggacttccgcggcaagggccgcatggaccgcgcgctggagatcctggcgctgagcccgccggacgtgttcaaccacaacatcgaaaccgtgccggacctctacccgaatgtgcgccccggcgcggactaccagtggtcgctgacgctgttgcagcgcttcaaggcgcagcatccgtccatcgccaccaagtccggcatcatgctgggcctgggcgagacgatggagcaggtgcaggccacgctgcgcgacctgcgcgcgcacgatgtggacatgatcaccatcggccagtatctgcagccgacgccgcaccatcatccggtgatgcgttactggacgcctgaggaatacaaggcgctggaagactacggcaacgcgctgggcttcagtcatgttgcctccggcccgatggtgcgttcctcgtaccacgccgatcgtcaggccgcaggcgccggcgtcgccgcctga

SEQ ID NO: 3276 - protein, 337 aa, Xanthomonas axonopodis pv
MTQPIARSIPLQVVSGDTAAPAPLQTGVKQIGGDKINRSPVQFVDAPVLRKPSWIRVRIPSGNAVQNLKAKLRENRLVTVCEEASCPNIHECFSHGTATFMILGEVCTRRCSFCDVAHGRPKPPDASEPASLAATVADMGLKYVVVTSVDRDDLRDGGAQHFVDCISAIRTSSPNTRIEILTPDFRGKGRMDRALEILALSPPDVFNHNIETVPDLYPNVRPGADYQWSLTLLQRFKAQHPSIATKSGIMLGLGETMEQVQATLRDLRAHDVDMITIGQYLQPTPHHHPVMRYWTPEEYKALEDYGNALGFSHVASGPMVRSSYHADRQAAGAGVAA

SEQ ID NO: 3277 - DNA, 1122 bp, Xylella fastidiosa
  CDS (1)..(1122): transl_table=11
atgactcaacctattgtccgttctatcccgttgcatgttgtctcaaatgatcatccttcatcttccccattgcagcctggagtaaagcaatcgggtgaagacaagattgggcgttcgcctgtgcagtttgcagatgttccggtgttgcgtaaaccatcatggattcgtgttcgcattccatccggcaatgcggtgcaaagtctcaaagccaagctacgtgagaatcgtttagtcacggtgtgtgaggaggctgcctgccctaatatccatgagtgttttagccatggcacagcgacgttcatgattctgggtgaagtgtgcacgcgtcgttgttcgttttgcgatgtggcacatggccgccccaagccaccggacccggaggagccaatcagtttggcacgcaccgtggctgagatgggtttgaagtacgtggtggtgaccagtgtggatcgcgatgatttgcgtgacggtggtgcccagcattttgttgattgcattgctgcgatccgtcagagtgcgccacagacacggatcgagattctgaccccagatttccgaggaaaggggcgcatggatcgtgcattggatattttggcggcatgtccgccggatgtattcaatcataacgttgagacggtgcccgctttgtatcccaatgtgcggccgggagcggattatcaatggtcattgactctcttaaaacgctttaaggcacagcatccgcaggtgcctacgaagtccgggatcatgctcggtttaggggagactctggatcaggtacaggcgacgttgcgtgacttgcgtgctcatgacgtggatatggtcacgattggtcagtatctgcagccgacgtcgcatcatcacccagtgttacggtattggactccagatgagtacaaggcgttggaggagtacggtatggcgttgggtttcagccacgttgcttcaggtccgatggtgcgttcttcgtatcatgccgaccatcaggcgaaagaggcgggcttgggtttcaatgccaccgtttcgctgggctctccagcggtatcgtcgactgaacatcgggagcgccataccatcgcatcaaaatcagcctctaagactgaatcgatccgtcatagatag

SEQ ID NO: 3278 - protein, 373 aa, Xylella fastidiosa
MTQPIVRSIPLHVVSNDHPSSSPLQPGVKQSGEDKIGRSPVQFADVPVLRKPSWIRVRIPSGNAVQSLKAKLRENRLVTVCEEAACPNIHECFSHGTATFMILGEVCTRRCSFCDVAHGRPKPPDPEEPISLARTVAEMGLKYVVVTSVDRDDLRDGGAQHFVDCIAAIRQSAPQTRIEILTPDFRGKGRMDRALDILAACPPDVFNHNVETVPALYPNVRPGADYQWSLTLLKRFKAQHPQVPTKSGIMLGLGETLDQVQATLRDLRAHDVDMVTIGQYLQPTSHHHPVLRYWTPDEYKALEEYGMALGFSHVASGPMVRSSYHADHQAKEAGLGFNATVSLGSPAVSSTEHRERHTIASKSASKTESIRHR

SEQ ID NO: 3279 - DNA, 972 bp, Zymomonas mobilis
  CDS (1)..(972): transl_table=11
atgagtaaaattcccgcacctgatgaaaaaaccagccgatccgattctggttcctcgattttgcgtaaaccggactggcttcgtgtccgttctcccggtggcgctgcttttaatgaaacccacggcttgatacggaaactgggtctggccacggtgtgcgaagaagcagcctgtcccaatattggagaatgctggacaaaaaaacaggcaaccgtcatgattttgggggaagtctgtacccgtgcctgtgctttttgcaatgtaaagacaggccatcccgacaaggtcaatcctttggaaccggggcatgttgctgatgtcgctgccgaaatgaatttggagcatattgttatcacatcggttgatcgtgatgacctcgaagacggcggcgcttcgcaatttgtcaaagttatcgaagccgtcagggcaagaaccccgaaaacgacgattgagattctgaccccagatttccgtggtaagccggatcatgcattggatatgatcgtcaaagcccgccccgatgtattcaatcacaatcttgaaacggtgccccgtctttacccaacgattcgtccgggagcgcgctatttcacttccttgcgcttgcttgaaaaagtgcgggaacgggacccctctatctttactaaatccggtttaatgctgggtttaggcgaagatcgtttggaagtgcatcaggtcatggacgacatgcggcaagcggatgtcgacttcttaaccttagggcaatatttgcaacctacgccgcgccatgttcgggtagaagagtttgttacacctgacagcttcaaggcctatgcggcgacagctagagccaagggtttttcaatggtggcatcctctcctttaacgcgttccagctattatgccggtgctgattttgcgcgtttaaaagaagcccgccaaaagaagttggaaaaaatagccgccaaaaatagcgggaagggtgcctaa

SEQ ID NO: 3280 - protein, 323 aa, Zymomonas mobilis
MSKIPAPDEKTSRSDSGSSILRKPDWLRVRSPGGAAFNETHGLIRKLGLATVCEEAACPNIGECWTKKQATVMILGEVCTRACAFCNVKTGHPDKVNPLEPGHVADVAAEMNLEHIVITSVDRDDLEDGGASQFVKVIEAVRARTPKTTIEILTPDFRGKPDHALDMIVKARPDVFNHNLETVPRLYPTIRPGARYFTSLRLLEKVRERDPSIFTKSGLMLGLGEDRLEVHQVMDDMRQADVDFLTLGQYLQPTPRHVRVEEFVTPDSFKAYAATARAKGFSMVASSPLTRSSYYAGADFARLKEARQKKLEKIAAKNSGKGA

SEQ ID NO: 3281 - DNA, 1098 bp, Oryza sativa
  CDS (1)..(1098)
atgatgcagagctcgctcgcgcggccgttgccgcggcccccgatccggccggcctgcgggaaccctgtctgccggagccggcccggctcggtctccgtggcccggtgccgcgcggaggctgcgccgccggctccggcgccggcggcgcgtagggcggcggggccgtacaccgggagggacccggaggtgaagaagccggcgtggctgcggcagcgtgcggcgcagggggagaagtacgcgcggctgcgggagtcgatcggcgagctcaagctcaacaccgtctgcgtcgaggcccagtgccccaacatcggcgagtgctggaacggtgggggaggggcgggcggggaaggcgacggcatcgccacggcgaccatcatggtgctcggtgatacctgtacgcgcggctgccgtttctgtgccgtgaagactagcaacaagcctccaccaccggatcccctggagcctctgaacacggccttggcagttgcaagctggggagtggactatgttgtactgaccagtgttgacagagatgacttgcctgatggtggtagcagccattttgcgcagacagagctcaaacctgggatactggtggagtgcttgacctcagattttcgaggtgacctggaggctgtttcagctttggccaactctggtctggatgtatttgcgcacaacatcgagactgtgaggagcctgcaaagaattgttagggatcctcgagcaggatatgatcagagcttagctgttctgaagcatgcaaaaagttgcaaagagggtatgataactaagtcctctatcatgcttggtcttggagagactgacgaggaggtgaaacaagccatgattgacttaagggccattggtgttgatatcttgacactgggccagtatttgcagcccactgaaagacatttgacagtaagggagtatgtaactcctgagaagttccaattttggaaggagtatggagaatcggtgggtttccgctatgttgctagtggacccctggttcggtcttcatatcgtgcaggagagctctttgtccaaaatttggtcaggaataacaaacctaagctacctgcttcatcttag

SEQ ID NO: 3282 - protein, 365 aa, Oryza sativa
MMQSSLARPLPRPPIRPACGNPVCRSRPGSVSVARCRAEAAPPAPAPAARRAAGPYTGRDPEVKKPAWLRQRAAQGEKYARLRESIGELKLNTVCVEAQCPNIGECWNGGGGAGGEGDGIATATIMVLGDTCTRGCRFCAVKTSNKPPPPDPLEPLNTALAVASWGVDYVVLTSVDRDDLPDGGSSHFAQTELKPGILVECLTSDFRGDLEAVSALANSGLDVFAHNIETVRSLQRIVRDPRAGYDQSLAVLKHAKSCKEGMITKSSIMLGLGETDEEVKQAMIDLRAIGVDILTLGQYLQPTERHLTVREYVTPEKFQFWKEYGESVGFRYVASGPLVRSSYRAGELFVQNLVRNNKPKLPASS

SEQ ID NO: 3283 - DNA, 1149 bp, Oryza sativa
  CDS (1)..(1149)
atgcacggccgccgccacctcgccgcctccctggcccgcgccctgacctacgccccctcccgctccatctcctccaccccgtcgctcctccaaaccctcgacccgtccacgccctcccccgcggccgccccgcccaccgcggggcggctcgcggagctccggcagcggctgcaggcggacgcgccgtcgctgggggacttcacgtactcggtggaggtggggacgcggaagaagccgctgcccaagcccaagtggatgaaggagacgataccaggcggcgccaagtacgcggggatcaaggccaagctgcgggagctgaagctgcacaccgtctgcgaggaggcgcgctgccccaacctcggcgagtgctggtccggcggcgagaccggcaccgccaccgccaccatcatgatcctcggggacacctgcacgcgcggctgcaggttttgtaatgtcaagacctcgcgaactcctccgccaccagatcctgatgaaccttctaatgttgctcaagctattgcctcgtggggcctggagtatattgtcatcacaagtgttgaccgcgatgatttacctgatcaagggagtggtcactttgctgaaacagttcaaaagctaaaggtgttgaagccagaaatgcttattgaagcacttgttcctgatttccgtggagacccagcatgtgtagagaaggttgctacttctgggttgcatgttttcgcccacaacattgaaacagttgaagagctgcaaagaaatgtgagagatcatcgtgcgaacttcaagcaatcaatagatgtcctgaaattggcaaaagagtatgctccagctggtaccctcacaaagacatcaatcatgctgggttgtggagaaacgcctgatcaggttatcagcacgacggaaaaggttagggctgctggtgttgatgtaatgacatttggtcagtacatgagaccatctaaacgtcatatgcctgtttccgagtatgttactcccgaagcctttgagaggtatcgatcccttggtgttgacatgggcttccgttatgtggcttcgggcccaatggttcgatcttcctacaaagctggtgagttctacataaaagccatgattgaagctgacagagcaaaagctacgactgcaatatag

SEQ ID NO: 3284 - protein, 382 aa, Oryza sativa
MHGRRHLAASLARALTYAPSRSISSTPSLLQTLDPSTPSPAAAPPTAGRLAELRQRLQADAPSLGDFTYSVEVGTRKKPLPKPKWMKETIPGGAKYAGIKAKLRELKLHTVCEEARCPNLGECWSGGETGTATATIMILGDTCTRGCRFCNVKTSRTPPPPDPDEPSNVAQAIASWGLEYIVITSVDRDDLPDQGSGHFAETVQKLKVLKPEMLIEALVPDFRGDPACVEKVATSGLHVFAHNIETVEELQRNVRDHRANFKQSIDVLKLAKEYAPAGTLTKTSIMLGCGETPDQVISTTEKVRAAGVDVMTFGQYMRPSKRHMPVSEYVTPEAFERYRSLGVDMGFRYVASGPMVRSSYKAGEFYIKAMIEADRAKATTAI

SEQ ID NO: 3285 - DNA, 1155 bp, Oryza sativa
  CDS (1)..(1155)
atggcggcctactgctctagggtttaccaccaccacccggtctcgccttccacaatgcagggatcgctcgcgaggccttcgatccacgcgggatccgcaagcctgaccttccgtgctcggcccaattccgtgtccatcgtgcgatgcgacgcggactcgccgccggagggaagtgctgtggcgggatgggcgcctccggggccgtacacggggagggacccggcggcgaggaagccggcgtggctgagacagcgtgcggcgcagggggagaagtacgcgaggctgagggagtcgctcggggagctcaagctcaacaccgtctgcgtcgaggcccaatgccccaacatcggtgagtgttgggatggcggcggcggtgcaggtggggacggggacggcattgcgacggcgacgatcatgctcctcggcgacacttgtacccgtggttgtcgattctgtgccgtgaaaaccagtaacaagcctccgccgcccgatgccctggagcctctcaggacagcagtggcagttgcaagttggggcgtagactatgttgtgctgacaagtgttgatagagatgaccttcctgatggtggaagtggccattttgcgcaaacagtgaaggctctaaaggaattgaaacctggtatactggtggagtgtctaacttcagactttcgaggtgacctggaggcagtttcatccttggcaagctctggtttggatgtgtttgcacacaacattgaaactgtgaggagtctgcagagaatagtcagagatccccgagcagcatacgatcagagtttagctgttctgaaacatgcgaaaaattgcaaagatggtatggtaacgaagtcctctatcatgcttggtctaggtgagacagatgaagaggtgaagcaaaccatgtgtgatttgagggccattgacgttgatattctgaccttgggacaatatttacagccaacagaaagacacttgcgggtcagagaatatgtgactcctgagaagtttgatttctggaaggagtatggggaatctctgggttttctttatgttgctagtggacctctggttcggtcttcgtatcgtgcgggagagctctttgtgcaaaatttggtcagacgtaaaaaagccgagcttgcacctactttgcagtaa

SEQ ID NO: 3286 - protein, 384 aa, Oryza sativa
MAAYCSRVYHHHPVSPSTMQGSLARPSIHAGSASLTFRARPNSVSIVRCDADSPPEGSAVAGWAPPGPYTGRDPAARKPAWLRQRAAQGEKYARLRESLGELKLNTVCVEAQCPNIGECWDGGGGAGGDGDGIATATIMLLGDTCTRGCRFCAVKTSNKPPPPDALEPLRTAVAVASWGVDYVVLTSVDRDDLPDGGSGHFAQTVKALKELKPGILVECLTSDFRGDLEAVSSLASSGLDVFAHNIETVRSLQRIVRDPRAAYDQSLAVLKHAKNCKDGMVTKSSIMLGLGETDEEVKQTMCDLRAIDVDILTLGQYLQPTERHLRVREYVTPEKFDFWKEYGESLGFLYVASGPLVRSSYRAGELFVQNLVRRKKAELAPTLQ

SEQ ID NO: 3287 - DNA, 1425 bp, Zea mays
  CDS (50)..(1201)
cccaacgctccgtccccgcggcccaccaaccgccgccgccgccgcagccatgcacggccgccggcacctcgcggcgtcccttacccgggccctgatccaggcgccatcccgctccatctcttccaccccgtctctcctccaaaccctcgacccctcagtgccgtcgcctcccgccgcgggagcagggcggctcgcggagctgcggcggcggctgcaggcggacgcgccgtcgctgggtgacttcacgtactcagtggaggtggggacgcggcagcgcccgctgcccaagcccaagtggatgaaggagaccgtgcctggcggcgccaagtacgcggccatcaaggccaagctgcgggagctgaagctgcacacggtctgcgaggaggcccggtgccccaacctcggcgagtgctggtccggcggcgagactggcaccgccaccgccacaattatgatccttggggacacctgcacgcgcggatgcagattctgtaacgtcaagacatctcgaacaccccctccaccggatcctgatgagccttccaatgttgctcaagctattgcctcatggggccttgaatatatagtaatcacgagtgttgaccgggatgatctacctgatcagggcagtggtcactttgctgaaacagtacagaagctaaaggctttgaagccagaaatgcttattgaagcacttgtacctgatttccgtggagatccgagctgcgtagagaaggttgcgacttctggattgcatgtttttgcgcacaacattgaaactgtggaagagcttcaaaggaatgtcagagactaccgtgcaaatttcaagcaatctatagatgttctggaaatggcgaaagagtatgctcctccgggtacccttacaaagacatcgataatgctgggatgcggggagactccagatcaggttattaggaccatggaaaaagtgagggctgctgatgttgatgtcataacatttggccagtacatgaggccatcaaaacgtcacatgcctgtttctgagtatgttacgcctgaagcttttgagaagtatcgggcccttggtgtcgaaatggggtttcgctacgttgcgtctgggccaatggtccggtcttcgtacaaggcaggtgaattctacatcaaggctatgatcgaagcggagcgagccaagggaaccgctgcagactcaagtgcataaccgagatagcaccttccggccccacccaccccttgacttggttgtgctgcaaataagctcttcactgcttttgtagtcagagagacatgtcgattttttacgtcataattgtaaccacacattcacttctttttttttgtcaattgaacagttccggcgccttcgtgccttgtttcatcctccctctcaagttcaaaaaacaagagggcatttcttgtagcagt

SEQ ID NO: 3288 - protein, 383 aa, Zea mays
MHGRRHLAASLTRALIQAPSRSISSTPSLLQTLDPSVPSPPAAGAGRLAELRRRLQADAPSLGDFTYSVEVGTRQRPLPKPKWMKETVPGGAKYAAIKAKLRELKLHTVCEEARCPNLGECWSGGETGTATATIMILGDTCTRGCRFCNVKTSRTPPPPDPDEPSNVAQAIASWGLEYIVITSVDRDDLPDQGSGHFAETVQKLKALKPEMLIEALVPDFRGDPSCVEKVATSGLHVFAHNIETVEELQRNVRDYRANFKQSIDVLEMAKEYAPPGTLTKTSIMLGCGETPDQVIRTMEKVRAADVDVITFGQYMRPSKRHMPVSEYVTPEAFEKYRALGVEMGFRYVASGPMVRSSYKAGEFYIKAMIEAERAKGTAADSSA

SEQ ID NO: 3289 - DNA, 1125 bp, Brassica napus
  CDS (1)..(1125)
atgcaatcccgttcggccctcctctctcgattccttcgaccggcgtcgtcgagattcttctcctcttcctctccgatcactcccgtctcatccacaacaactcaatcccccaggaccctcgagtctctccgagcgcggctggcggatgagtcgccttccctcaccgatttcatccacggcgatacctactccgtcgaggtcggcaccaagaagaagcccctccccaagcccaaatggatgaaggagtcgatccccggcggcgagaggtacgtccagatcaagaagaagctgagagaccttaaccttcacaccgtctgcgaggaggctaagtgtcccaacctcggcgagtgctggtccggcggcgaaactggaaccgccaccgcaacgattatgatcctcggggatacgtgtacacgtggctgcaggttttgtaatgtgaagacatcgcgtacgcctccacctcctgaccccaacgaacctaacaacgtggctgaagcaatcgcatcgtggggtgttgattacgtcgtcatcaccagtgtagaccgtgacgatctgcctgatcaggggagtggccattttgcacaaactgtgcagagattgaaagctttgaagccggagatgctgatagaagctctagttcctgattttcgcggagatggtggatgtgttgagaaggtggccaagtcagggcttgacgtctttgcccacaacatcgagacggttgaggagcttcagagctttgtgagggatcaccgtgctaactttaagcagtcgatggatgtgctgaggatggctaagcagcatgcgcctgcagggaccttgacgaagacgtcggtgatgctgggatgtggggagactcctgatcaagtggtcaagactatggagaaagtgagagcggcgggggttgatgttatgacgttcggccagtatatgcggccgtctaagcgtcacatgccagtagctgagtacgtgacaccagaggcttttgagagataccgccttcttggcatggaaatgggattcaggtacgtagcatcagggccgatggtgaggtcgtcgtacaaagcaggagagtactacataaagtccatgattgaggctgatcgagtttcttcctccccgtag

SEQ ID NO: 3290 - protein, 374 aa, Brassica napus
MQSRSALLSRFLRPASSRFFSSSSPITPVSSTTTQSPRTLESLRARLADESPSLTDFIHGDTYSVEVGTKKKPLPKPKWMKESIPGGERYVQIKKKLRDLNLHTVCEEAKCPNLGECWSGGETGTATATIMILGDTCTRGCRFCNVKTSRTPPPPDPNEPNNVAEAIASWGVDYVVITSVDRDDLPDQGSGHFAQTVQRLKALKPEMLIEALVPDFRGDGGCVEKVAKSGLDVFAHNIETVEELQSFVRDHRANFKQSMDVLRMAKQHAPAGTLTKTSVMLGCGETPDQVVKTMEKVRAAGVDVMTFGQYMRPSKRHMPVAEYVTPEAFERYRLLGMEMGFRYVASGPMVRSSYKAGEYYIKSMIEADRVSSSP

SEQ ID NO: 3291 - DNA, 1125 bp, Brassica napus
  CDS (1)..(1125)
atgcaatcccgttcggccctcctctctcgattccttcgaccggcgtcgtcgagattcttctcctcttcctctccgatcactcccgtctcatccacaacaactcaatcccccaggaacctcgagtctctccgagcgcggctggcggatgagtcgccttccctcaccgatttcatccacggcgatacctactccgtcgaggtcggcaccaagaagaagcccctccccaagcccaaatggatgaaggagtcgatccccggcggcgagaggtacgtccagatcaagaagaagctgagagaccttaaccttcacaccgtctgcgaggaggctaagtgtcccaacctaggcgagtgctggtccggcggcgaaactgggaccgccaccgcgacgattatgatcctcggggatacgtgtacacgtggctgcaggttttgtaatgtgaagacatcgcgtacgcctccacctcctgaccccaacgaacctaacaacgtggctgaagcaatcgcatcgtggggtgttgattacgtcgtcatcaccagtgtagaccgtgacgatctgcctgatcaggggagtggccattttgcacaaactgtgcagagattgaaagctttgaagccggagatgcttatagaagctctagttcctgattttcgcggagatggtggatgtgttgagaaggtggccaagtcagggcttgacgtctttgcccacaacatcgagacggttgaggagcttcagagctttgtgagggatcaccgtgctaactttaagcagtcgatggatgtgctgaggatggctaagcagcatgcgcctgcagggaccttgacgaagacgtcggtgatgctgggatgtggggagacccctgatcaagtggtcaagactatggagaaagtgagagcagcgggggttgatgttatgacgttcggccagtatatgcgtccatctaagcgtcacatgccagttgctgagtacgtgacaccagaggcttttgagagataccgtcttcttggcatggaaatgggattcaggtacgtagcatcagggccgatggttaggtcgtcgtacaaagcaggagagtactacataaagtccatgattgaggctgatcgagtttcttcctccccgtag

SEQ ID NO: 3292 - protein, 374 aa, Brassica napus
MQSRSALLSRFLRPASSRFFSSSSPITPVSSTTTQSPRNLESLRARLADESPSLTDFIHGDTYSVEVGTKKKPLPKPKWMKESIPGGERYVQIKKKLRDLNLHTVCEEAKCPNLGECWSGGETGTATATIMILGDTCTRGCRFCNVKTSRTPPPPDPNEPNNVAEAIASWGVDYVVITSVDRDDLPDQGSGHFAQTVQRLKALKPEMLIEALVPDFRGDGGCVEKVAKSGLDVFAHNIETVEELQSFVRDHRANFKQSMDVLRMAKQHAPAGTLTKTSVMLGCGETPDQVVKTMEKVRAAGVDVMTFGQYMRPSKRHMPVAEYVTPEAFERYRLLGMEMGFRYVASGPMVRSSYKAGEYYIKSMIEADRVSSSP

SEQ ID NO: 3293 - DNA, 1149 bp, Glycine max
  CDS (1)..(1149)
atggtgatgcattcacggatcagaagcgtcgccggaaacatcaaatgcgcagcgagactcttctgttcatcttcgacgaccacgccgccggcggcgccgttgcagttcccgcagactctggcggggctccgagcccggctggcggaggaatcgccgtcgctgtcggacttcctcgcgcttaaatcggacagcgcgtactcggtggaggtcgggactaagaagaagccgcttccgaagccgaagtggatgaaggaggccgttcccggcggcgagaagtacgtgcagatcaagaagaagctccgtgaattgaagcttcacacggtttgcgaggaggcgcggtgccctaatttgggggagtgctggtccggaggcgagaccggcactgccaccgccactatcatgattctcggcgacacttgtactcgaggttgcagattttgtaatgttaagacgtcaaggactcctccaccacctgaccctgatgagcccaccaatgtggctgaagcaattgcatcttggggtctggattatgtggttataacgagtgttgaccgtgatgatttgcctgatcaagggagtggtcattttaccgaaacagtgcagaagctgaaggcactgaagcctaatatgctgatagaagccttagttccagattttcgaggagatgctgactgtgtagagaaggttgccaaatcaggattagatgtctttgcacacaacattgagacagttgaagagcttcagagtgttgtacgggatcatcgtgctaattttaagcagtcattagatgttctaatgatggccaaggaaaatgctcctgctggaacacttactaagacttcaataatgttaggttgtggggaaacacctgatcaggttgtgaagacaatggagaaggtgagagcagctggtgttgacgtgatgacatttggtcagtatatgagaccttcaaagcgccatatgccggtatctgaatatgttacaccagaggcctttgataagtatcagaaacttggcatggaaatgggctttcgatatgtggcatctgggcccatggtgaggtcatcatacaaggcaggtgaattctatattaaatccatgattgaatcagatcgggctgcttctccctcaaagctgacctcttcttga

SEQ ID NO: 3294 - protein, 382 aa, Glycine max
MVMHSRIRSVAGNIKCAARLFCSSSTTTPPAAPLQFPQTLAGLRARLAEESPSLSDFLALKSDSAYSVEVGTKKKPLPKPKWMKEAVPGGEKYVQIKKKLRELKLHTVCEEARCPNLGECWSGGETGTATATIMILGDTCTRGCRFCNVKTSRTPPPPDPDEPTNVAEAIASWGLDYVVITSVDRDDLPDQGSGHFTETVQKLKALKPNMLIEALVPDFRGDADCVEKVAKSGLDVFAHNIETVEELQSVVRDHRANFKQSLDVLMMAKENAPAGTLTKTSIMLGCGETPDQVVKTMEKVRAAGVDVMTFGQYMRPSKRHMPVSEYVTPEAFDKYQKLGMEMGFRYVASGPMVRSSYKAGEFYIKSMIESDRAASPSKLTSS

SEQ ID NO: 3295 - DNA, 1161 bp, Hordeum vulgare
  CDS (1)..(1161)
atgcgcggccgccgccatctggcggcctccctggcgaggaccctgtcccaggccccctcccgctccatctcctccaccccgtccctcctccaaaccctcgacccgaccccgcagtcccctcccctcgccgcacccgcggcggggcggctcgcggagatgcggaggcggctgcaggcggagacgccgtcgctgggggacttcgcgtactcggtggaggtggggacgcggaagaagcctctgcccaagcccaagtggatgaaggagacgatccccggcggggccaagtacgcggccatcaaggccaagctgcgggagctgaagctgcacaccgtctgcgaggaggcgcgctgccccaacctcggcgagtgctggtcgggcggcgagaccggaacagccactgccaccatcatgatcctcggtgacacctgcacgcgcggatgcagattttgcaatgtcaagacatcacgaacccctcctccaccagatcctaatgagcctgccaatgttgcgcaagctattgcatcgtggggccttgaatatatagtcatcacaagtgtggaccgggatgatttacctgatcaggggagcggccattttgctgaaacagtacagaggttgaagactttaaagccagatatgcttattgaagcgctcgtacccgatttccgaggagatccaagttgcgtagaaaaggtagcaacttctgggttgcatgtttttgcacacaatattgaaacggtggaagagcttcaaagagatgtgcgagaccaccgtgcaaattttaagcaatcaatggatgttctgaaaatggcgaaggagtatgcccctcctggcactctcacaaagacatcagtcatgctgggttgtggggaaaatcccgatcaggttatcagcacaatggaaaaggtgagaactgctggtgttgaagtcattacatttggtcagtacatgaagccgtcaaagcgacatatgccagtgtctgagtatattactcctgaagcctttgagaactaccgagcccttggtgttgaaatgggattccgttatgttgcatctggtccgatggttcggtcctcctacaaagcaggcgagttctacatcaaagccatgatcgaagatgaccgagcaaaatcaggcgttgttgcagaatcaagttcatag

SEQ ID NO: 3296 - protein, 386 aa, Hordeum vulgare
MRGRRHLAASLARTLSQAPSRSISSTPSLLQTLDPTPQSPPLAAPAAGRLAEMRRRLQAETPSLGDFAYSVEVGTRKKPLPKPKWMKETIPGGAKYAAIKAKLRELKLHTVCEEARCPNLGECWSGGETGTATATIMILGDTCTRGCRFCNVKTSRTPPPPDPNEPANVAQAIASWGLEYIVITSVDRDDLPDQGSGHFAETVQRLKTLKPDMLIEALVPDFRGDPSCVEKVATSGLHVFAHNIETVEELQRDVRDHRANFKQSMDVLKMAKEYAPPGTLTKTSVMLGCGENPDQVISTMEKVRTAGVEVITFGQYMKPSKRHMPVSEYITPEAFENYRALGVEMGFRYVASGPMVRSSYKAGEFYIKAMIEDDRAKSGVVAESSS

SEQ ID NO: 3297 - DNA, 1155 bp, Oryza sativa
  CDS (1)..(1155)
atgctggcagctagagtcactgttgaagatgccatctgcctacttcttgagagctcgctcgcgcggccgttgccgcggcccccgatccggccggcctgcgggaaccctgtctgccggagccggcccggctcggtctccgtggcccggtgccgcgcggaggctgcgccgccggctccggcgccggcggcgcgtagggcggcggggccgtacaccgggagggacccggaggtgaagaagccggcgtggctgcggcagcgtgcggcgcagggggagaagtacgcgcggctgcgggagtcgatcggcgagctcaagctcaacaccgtctgcgtcgaggcccagtgccccaacatcggcgagtgctggaacggtgggggaggggcgggcggggaaggcgacggcatcgccacggcgaccatcatggtgctcggtgatacctgtacgcgcggctgccgtttctgtgccgtgaagactagcaacaagcctccaccaccggatcccctggagcctctgaacacggccttggcagttgcaagctggggagtggactatgttgtactgaccagtgttgacagagatgacttgcctgatggtggtagcagccattttgcgcagacagtgagagctttaaaggagctcaaacctgggatactggtggagtgcttgacctcagattttcgaggtgacctggaggctgtttcagctttggccaactctggtctggatgtatttgcgcacaacatcgagactgtgaggagcctgcaaagaattgttagggatcctcgagcaggatatgatcagagcttagctgttctgaagcatgcaaaaagttgcaaagagggtatgataactaagtcctctatcatgcttggtcttggagagactgacgaggaggtgaaacaagccatgattgacttaagggccattggtgttgatatcttgacactgggccagtatttgcagcccactgaaagacatttgacagtaagggagtatgtaactcctgagaagttccaattttggaaggagtatggagaatcggtgggtttccgctatgttgctagtggacccctggttcggtcttcatatcgtgcaggagagctctttgtccaaaatttggtcaggaataacaaacctaagctacctgcttcatcttag

SEQ ID NO: 3298 - protein, 384 aa, Oryza sativa
MLAARVTVEDAICLLLESSLARPLPRPPIRPACGNPVCRSRPGSVSVARCRAEAAPPAPAPAARRAAGPYTGRDPEVKKPAWLRQRAAQGEKYARLRESIGELKLNTVCVEAQCPNIGECWNGGGGAGGEGDGIATATIMVLGDTCTRGCRFCAVKTSNKPPPPDPLEPLNTALAVASWGVDYVVLTSVDRDDLPDGGSSHFAQTVRALKELKPGILVECLTSDFRGDLEAVSALANSGLDVFAHNIETVRSLQRIVRDPRAGYDQSLAVLKHAKSCKEGMITKSSIMLGLGETDEEVKQAMIDLRAIGVDILTLGQYLQPTERHLTVREYVTPEKFQFWKEYGESVGFRYVASGPLVRSSYRAGELFVQNLVRNNKPKLPASS

SEQ ID NO: 3299 - DNA, 1104 bp, Zea mays
  CDS (1)..(1104)
atgcagagctccctcgcccggccgccggtactggccggatgcggcgagagacggggcctggcagccgtggcacggtgccgcgctgaggcggcggcgcccgtgtggacggcgtccagggcgtctgcggggccgtacaccgggagggacccggaggtgaagaagcccgcgtggctgcggcagcgcgctgcgcagggggagaagtacgctcgcctgcgggagtccatcggcgagctcaagctcaacaccgtctgcgtcgaggcacaatgccccaacatcggcgagtgttggaacggaggtggaggggccggcggcgaaggggacggcatcgcgacggccaccatcatggtgcttggtgacacctgcacgcgcgggtgtcgattctgcgctgtgaagaccagcaacaaaccgccgccgcctgatcccctggagcctctgaacacggctttggctgttgcaagctggggtgtagattatgttgtgctaaccagtgtcgatagagatgacttacctgatggtggaagtagccattttgctcagacagtgaaagctttaaaggagctcaaacctggaatactggtggagtgcttaacctcggattttcgaggtgacctggaggctatctcatctttggcaaactctggcctagatgtttatgcacacaacattgaaactgtgaggagtctacagagggttgtgagggatccccgggcagggtatgatcagagcttagcagttctcaagcatgcaaaaggttccagggaggacatgattacgaagtcttctatcatgcttggtcttggagagactgatgaagaggtgaaacaagccatgatggatctacgggcaattggtgttgacatccttactttgggacagtacttgcagccatcagaaagacatctaacagtaagagagtatgtgactccccaaaagttccaattttggaaggagtatggagaatcggtgggtttccgatatgttgctagcggacccttggttcggtcttcctaccgtgcaggagagctatttgtccaaaatttagtcagaaataacaaaactgagtcgtccatggatccgtacgcagaaataacaaaatctaactaa

SEQ ID NO: 3300 - protein, 367 aa, Zea mays
MQSSLARPPVLAGCGERRGLAAVARCRAEAAAPVWTASRASAGPYTGRDPEVKKPAWLRQRAAQGEKYARLRESIGELKLNTVCVEAQCPNIGECWNGGGGAGGEGDGIATATIMVLGDTCTRGCRFCAVKTSNKPPPPDPLEPLNTALAVASWGVDYVVLTSVDRDDLPDGGSSHFAQTVKALKELKPGILVECLTSDFRGDLEAISSLANSGLDVYAHNIETVRSLQRVVRDPRAGYDQSLAVLKHAKGSREDMITKSSIMLGLGETDEEVKQAMMDLRAIGVDILTLGQYLQPSERHLTVREYVTPQKFQFWKEYGESVGFRYVASGPLVRSSYRAGELFVQNLVRNNKTESSMDPYAEITKSN

SEQ ID NO: 3301 - DNA, 1104 bp, Zea mays
  CDS (1)..(1104)
atgcagagctccctcgcccggccgccggtactggccggatgcggcgagagacggggcctggcagccgtggcacggtgccgcgctgaggcggcggcgcccgtgtggacggcgtccagggcgtctgcggggccgtacaccgggagggacccggaggtgaagaagcccgcgtggctgcggcagcgcgctgcgcagggggagaagtacgctcgcctgcgggagtccatcggcgagctcaagctcaacaccgtctgcgtcgaggcacagtgccccaacatcggcgagtgttggaacggaggtggaggggccggcggcgaaggggacggcatcgcgacggccaccatcatggtgcttggtgacacctgcacgcgcgggtgtcgattctgcgctgtgaagaccagcaacaaaccgccgccgcctgatcccctggagcctctgaacacggctttggctgttgcaagctggggtgtagattatgttgtgctaaccagtgtcgatagagatgacttacctgatggtggaagtagccattttgctcagacagtgaaagctttaaaggagctcaaacctggaatactggtagagtgcttaacctcggattttcgaggtgacctggaggctatctcatctttggcaaactctggcctagatgtttatgcacacaacattgaaactgtgaggagtctacagagggttgtgagggatccccgggcagggtatgatcagagcttagcagttctcaagcatgcaaaaggttccagggaggacatgattacaaagtcttctatcatgcttggtcttggagagactgatgaagaggtgaaacaagccatgatggatctacgggcaattggtgttgacatccttactttgggacagtacttgcagccatcagaaagacatctaacagtaagagagtatgtgactccccaaaagttccaattttggaaggagtatggagaatcggtgggtttccgatatgttgctagcggacccttggttcggtcttcctaccgtgcaggagagctatttatccaaaatttagtcagaaataacaaaactgagtcgtccatggatccgtacgcagaaataacaaaatctaactaa

SEQ ID NO: 3302 - protein, 367 aa, Zea mays
MQSSLARPPVLAGCGERRGLAAVARCRAEAAAPVWTASRASAGPYTGRDPEVKKPAWLRQRAAQGEKYARLRESIGELKLNTVCVEAQCPNIGECWNGGGGAGGEGDGIATATIMVLGDTCTRGCRFCAVKTSNKPPPPDPLEPLNTALAVASWGVDYVVLTSVDRDDLPDGGSSHFAQTVKALKELKPGILVECLTSDFRGDLEAISSLANSGLDVYAHNIETVRSLQRVVRDPRAGYDQSLAVLKHAKGSREDMITKSSIMLGLGETDEEVKQAMMDLRAIGVDILTLGQYLQPSERHLTVREYVTPQKFQFWKEYGESVGFRYVASGPLVRSSYRAGELFIQNLVRNNKTESSMDPYAEITKSN

SEQ ID NO: 3303 - DNA, 25 bp, Artificial sequence
  primer
atgtatagacgatctgttggagtac

SEQ ID NO: 3304 - DNA, 28 bp, Artificial sequence
  primer
ttatttcatgtttcttttcttcaaaacg

SEQ ID NO: 3305 - protein, 322 aa, Artificial sequence
  consensus sequence
  Variant (2)..(2): Xaa in position 2 is any amino acid
  Variant (4)..(16): Xaa in position 4 to 16 is any amino acid
  Variant (17)..(29): Xaa in position 17 to 29 is any or no amino acid
  Variant (31)..(31): Xaa in position 31 is any amino acid
  Variant (38)..(38): Xaa in position 38 is any amino acid
  Variant (42)..(43): Xaa in position 42 to 43 is any amino acid
  Variant (46)..(50): Xaa in position 46 to 50 is any amino acid
  Variant (51)..(62): Xaa in position 51 to 62 is any or no amino acid
  Variant (65)..(68): Xaa in position 65 to 68 is any amino acid
  Variant (70)..(71): Xaa in position 70 to 71 is any amino acid
  Variant (75)..(75): Xaa in position 75 is any amino acid
  Variant (77)..(77): Xaa in position 77 is any amino acid
  Variant (80)..(89): Xaa in position 80 to 89 is any amino acid
  Variant (90)..(93): Xaa in position 90 to 93 is any or no amino acid
  Variant (95)..(96): Xaa in position 95 to 96 is any amino acid
  Variant (99)..(101): Xaa in position 99 to 101 is any amino acid
  Variant (103)..(109): Xaa in position 103 to 109 is any amino acid
  Variant (111)..(112): Xaa in position 111 to 112 is any amino acid
  Variant (113)..(113): Xaa in position 113 is any or no amino acid
  Variant (115)..(115): Xaa in position 115 is any amino acid
  Variant (119)..(119): Xaa in position 119 is any amino acid
  Variant (124)..(124): Xaa in position 124 is any amino acid
  Variant (126)..(126): Xaa in position 126 is any amino acid
  Variant (129)..(137): Xaa in position 129 to 137 is any amino acid
  Variant (138)..(142): Xaa in position 138 to 142 is any or no amino acid
  Variant (144)..(145): Xaa in position 144 to 145 is any amino acid
  Variant (146)..(152): Xaa in position 146 to 152 is any or no amino acid
  Variant (154)..(154): Xaa in position 154 is any amino acid
  Variant (156)..(156): Xaa in position 156 is any amino acid
  Variant (160)..(160): Xaa in position 160 is any amino acid
  Variant (162)..(173): Xaa in position 162 to 173 is any amino acid
  Variant (174)..(190): Xaa in position 174 to 190 is any or no amino acid
  Variant (192)..(195): Xaa in position 192 to 195 is any amino acid
  Variant (198)..(198): Xaa in position 198 is any amino acid
  Variant (202)..(203): Xaa in position 202 to 203 is any amino acid
  Variant (205)..(207): Xaa in position 205 to 207 is any amino acid
  Variant (208)..(208): Xaa in position 208 is any or no amino acid
  Variant (210)..(213): Xaa in position 210 to 213 is any amino acid
  Variant (214)..(214): Xaa in position 214 is any or no amino acid
  Variant (216)..(217): Xaa in position 216 to 217 is any amino acid
  Variant (220)..(221): Xaa in position 220 to 221 is any amino acid
  Variant (223)..(229): Xaa in position 223 to 229 is any amino acid
  Variant (230)..(237): Xaa in position 230 to 237 is any or no amino acid
  Variant (241)..(242): Xaa in position 241 to 242 is any amino acid
  Variant (244)..(244): Xaa in position 244 is any amino acid
  Variant (249)..(251): Xaa in position 249 to 251 is any amino acid
  Variant (253)..(258): Xaa in position 253 to 258 is any amino acid
  Variant (262)..(268): Xaa in position 262 to 268 is any amino acid
  Variant (270)..(270): Xaa in position 270 is any amino acid
  Variant (275)..(275): Xaa in position 275 is any amino acid
  Variant (277)..(279): Xaa in position 277 to 279 is any amino acid
  Variant (280)..(281): Xaa in position 280 to 281 is any or no amino acid
  Variant (283)..(284): Xaa in position 283 to 284 is any amino acid
  Variant (286)..(290): Xaa in position 286 to 290 is any amino acid
  Variant (292)..(293): Xaa in position 292 to 293 is any amino acid
  Variant (295)..(298): Xaa in position 295 to 298 is any amino acid
  Variant (299)..(305): Xaa in position 299 to 305 is any or no amino acid
  Variant (308)..(312): Xaa in position 308 to 312 is any amino acid
  Variant (313)..(313): Xaa in position 313 is any or no amino acid
  Variant (315)..(316): Xaa in position 315 to 316 is any amino acid
  Variant (321)..(321): Xaa in position 321 is any amino acid
PXWXXXXXXXXXXXXXXXXXXXXXXXXXXLXTVCEEAXCPNXXECXXXXXXXXXXXXXXXXXATXXXXGXXCTRXCXFCXXXXXXXXXXXXXXDXXEPXXXAXXXXXXXLXXXVXTSVXRDDLXDXGAXXXXXXXXXXXXXXPXXXXXXXXXEXLXPDFXGXXXXXXXXXXXXXXXXXXXXXXXXXXXXXPXXXXHNXETVXXLXXXXRXXXXXYXXSLXXLXXXXXXXXXXXXXXXTKSXXMXGLGEXXXEXXXXXXDLRXXXXXXXTXGQYLXPXXXXXHXXVXXXXXPXXFXXXXXXXXXXXGFXXXXXXPXXRSSYXA

SEQ ID NO: 3306 - protein, 39 aa, Artificial sequence
  protein pattern
  Variant (2)..(2): Xaa in position 2 is Ser or Thr
  Variant (3)..(3): Xaa in position 3 is Gly or Ser
  Variant (4)..(4): Xaa in position 4 is Ile, Leu or Val
  Variant (6)..(6): Xaa in position 6 is Ile, Leu, Met or Val
  Variant (8)..(8): Xaa in position 8 is any amino acid
  Variant (11)..(14): Xaa in position 11 to 14 is any amino acid
  Variant (15)..(15): Xaa in position 15 is Ile, Leu or Val
  Variant (16)..(29): Xaa in position 16 to 29 is any amino acid
  Variant (30)..(30): Xaa in position 30 is Phe, Ile, Leu, Met or Val
  Variant (32)..(32): Xaa in position 32 is Phe, Ile, Leu, Met or Val
  Variant (36)..(36): Xaa in position 36 is Ile, Leu or Met
  Variant (37)..(37): Xaa in position 37 is any amino acid
  Variant (39)..(39): Xaa in position 39 is Gly, Asn, Ser or Thr
KXXXMXGXGEXXXXXXXXXXXXXXXXXXXXTXGQYXXPX

SEQ ID NO: 3307 - protein, 18 aa, Artificial sequence
  protein pattern
  Variant (2)..(2): Xaa in position 2 is Phe, Ile, Met or Val
  Variant (3)..(3): Xaa in position 3 is Leu or Met
  Variant (4)..(4): Xaa in position 4 is Ile, Leu or Val
  Variant (5)..(5): Xaa in position 5 is any amino acid
  Variant (7)..(8): Xaa in position 7 to 8 is any amino acid
  Variant (12)..(12): Xaa in position 12 is any amino acid
  Variant (14)..(14): Xaa in position 14 is any amino acid
  Variant (17)..(17): Xaa in position 17 is any amino acid
  Variant (18)..(18): Xaa in position 18 is Ile or Val
TXXXXGXXCTRXCXFCXX

SEQ ID NO: 3308 - protein, 18 aa, Artificial sequence
  protein pattern
  Variant (2)..(2): Xaa in position 2 is any amino acid
  Variant (3)..(3): Xaa in position 3 is Ser or Thr
  Variant (6)..(6): Xaa in position 6 is any or no amino acid
  Variant (8)..(9): Xaa in position 8 to 9 is any amino acid
  Variant (10)..(10): Xaa in position 10 is any or no amino acid
  Variant (14)..(15): Xaa in position 14 to 15 is any amino acid
  Variant (16)..(16): Xaa in position 16 is Asp, Glu or His
  Variant (18)..(18): Xaa in position 18 is Phe, Trp or Tyr
LXXVCXEXXXCPNXXXCX

SEQ ID NO: 3309 - protein, 14 aa, Artificial sequence
  protein pattern
  Variant (2)..(5): Xaa in position 2 to 5 is any amino acid
  Variant (6)..(6): Xaa in position 6 is Ala, Cys or Ser
  Variant (7)..(7): Xaa in position 7 is Ala, Gly, Ser or Thr
  Variant (9)..(9): Xaa in position 9 is any amino acid
  Variant (10)..(10): Xaa in position 10 is Ala, Thr or Val
FXXXXXXPXXRSSY

SEQ ID NO: 3310 - DNA, 1854 bp, Saccharomyces cerevisiae
  CDS (1)..(1854)
atggcagacttgccacagaaggtatctaatttaagcatcaacaacaaagagaatggtggtggtggcggcaaatcatcttatgtcccaccgcacttgagaagtagaggaaaaccatcattcgaaagaagtaccccaaaacaggaagataaggttacgggtggtgattttttcagacgtgctggaaggcaaactgggaacaatggcgggttttttggcttttctaaggaaagaaatggagggacgagtgcgaactataaccgcggaggcagctcaaattacaaatcatctggaaatagatgggtaaatggcaagcatataccggggcctaagaacgcgaaattagaagccgaactgtttggtgtacacgacgatcccgattaccattcatctggtataaagtttgataattacgataatattcccgtagatgcatctggaaaagatgttcctgaacctatactagattttagttctccccctctggatgagctgttaatggaaaatatcaaacttgctagtttcaccaaacctactccagtacaaaaatattctattccaatagttaccaaaggtagggatttgatggcatgcgcacaaacgggctcaggtaagacaggtgggtttttgtttccgctcttcacggagctattcaggtctgggccctctccagtacccgagaaagcacagagcttttattctagaaagggatatccatctgctttagtacttgcaccaactagagaattggctacccaaatttttgaagaagcaagaaaatttacgtatagatcttgggttaggccatgcgttgtttatggtggcgcgccaatcggtaaccagatgagggaggttgaccgcggctgtgacttattggtggctacaccagggcggctgaatgacttattagaacgcggaaaagtttctttggctaatatcaaatacctggtattggatgaggctgatagaatgctagatatgggattcgaaccccaaattcgccatatagttgaagaatgtgatatgccctctgtggaaaatagacagaccttgatgttttccgccacattcccagtagatatccagcatttggcacgcgatttcttagataattatatttttttatcagtaggaagagtcggttccacctcagaaaatatcacgcaaagaatattatatgtcgatgacatggacaaaaagtctgcgttgttagatttactgtctgcagagcataagggattgacattgatttttgttgaaacgaaaagaatggcggatcaactcacagattttttgatcatgcaaaatttcaaagctacagccatacatggtgaccgcacacaggctgaacgtgaacgtgccttatctgctttcaaagctaacgtagctgatatcctggtcgcaacagctgtagcagcgagaggtttggatataccgaatgtcacacatgtcattaattatgatttgccctccgacatcgatgactacgttcacagaattggtagaacaggccgtgctggtaacacaggcgtggctacttcattcttcaatagtaataatcagaatattgtgaagggtttgatggaaattttaaatgaagcgaatcaagaagttcccacgtttttaagtgacctgtcaagacagaattcaagaggtggaagaactaggggaggaggaggttttttcaatagtcgtaataacggttcaagagactaccgtaaacatggtggaaatggctcatttgggagcacgaggccaaggaatactggaacatcaaattggggttcgattggaggtgggtttagaaatgataatgagaaaaacggttacggaaatagcaacgcttcatggtggtaa

SEQ ID NO: 3311 - protein, 617 aa, Saccharomyces cerevisiae
MADLPQKVSNLSINNKENGGGGGKSSYVPPHLRSRGKPSFERSTPKQEDKVTGGDFFRRAGRQTGNNGGFFGFSKERNGGTSANYNRGGSSNYKSSGNRWVNGKHIPGPKNAKLEAELFGVHDDPDYHSSGIKFDNYDNIPVDASGKDVPEPILDFSSPPLDELLMENIKLASFTKPTPVQKYSIPIVTKGRDLMACAQTGSGKTGGFLFPLFTELFRSGPSPVPEKAQSFYSRKGYPSALVLAPTRELATQIFEEARKFTYRSWVRPCVVYGGAPIGNQMREVDRGCDLLVATPGRLNDLLERGKVSLANIKYLVLDEADRMLDMGFEPQIRHIVEECDMPSVENRQTLMFSATFPVDIQHLARDFLDNYIFLSVGRVGSTSENITQRILYVDDMDKKSALLDLLSAEHKGLTLIFVETKRMADQLTDFLIMQNFKATAIHGDRTQAERERALSAFKANVADILVATAVAARGLDIPNVTHVINYDLPSDIDDYVHRIGRTGRAGNTGVATSFFNSNNQNIVKGLMEILNEANQEVPTFLSDLSRQNSRGGRTRGGGGFFNSRNNGSRDYRKHGGNGSFGSTRPRNTGTSNWGSIGGGFRNDNEKNGYGNSNASWW

SEQ ID NO: 3312 - DNA, 3534 bp, Oryza sativa
  CDS (524)..(2539)
atccaccttttccatccctcccacaacacgcatccccatcacaacctcttttttcttttctctccccctcccccccggacgagagagagaagttcttcgcaagttgcattctgcgtttggtctcttgtcttcttcctttgaaaacaaaaaacacatctcgttttttctttctttcagaggatcttgaagacttcctagacgtgccattccgagcagctccatcagcgctgcccacgagtcacatcaagtccatccctaatacctacttcgtcctacaccgagtgcaccttcactcgctcactgacgcaaacccgtctttgttctgtggcctttcctcctccccccaccgggatcgtcgcagacgcaaaaccactttttcgtcccacctgtccacagtccctttctccgttggaacgccccctcgtcgttctttctggagatatttaatcggctggccacgacaagtttcctcccaaactacacctttccacacgatcaaccattcccctaaccaacacccaccatggctgatcaactgaacatgggcggcctgagcatgaacgaccagcctcctgctggcgctcgctcgtacatccctcctcacatgcgttctaagatgggcgctggtgctggtcccggtgcacccccccctggtcctgctggtcccgaccctgccatgaacggcggcctcaacaacagtgcttgggctggcaaccaaggctttgatgcccgtcccgctcccggtggctggagtggtgctggtggccctggtggttatcctccccgtggcggcggctacaacaaccgctccggcttcgaccgcaatgcctacggcggtgctggcggcggtgctggcggcggcggcggtggccacgcacgcggctctggtgatggtcagtggcgcgacggcaagcacatcgccggccccgccaaccctcgtgtcgagcgcgaacttttcggcactcccgacgacccttccaagcaacacacgggcatcaacttcgagaagtatgacgacatccccgttgaggcttccggtcacgatgtgcccgagcccgttcgcgaattcaccaaccctcccctggatgatcacttgatccggaacatcgaccttgcccgctacaagatccccacgcccgtccagaagtactcgatccccattgttatgggaggccgtgacctgatggcttgtgcccagactggttccggaaagactggtggcttcttgttccccatcctgtctcaggccttccagaccggtccttcggcgaaccccaccgccggtggcggaggctttggccgtcagcgcaaggcctacccgacttctcttatcctggcccccacccgtgagctggtgtcccagatctacgacgagtcgcgcaagtttgcctacagatcctgggtccgcccttgtgtggtgtatggaggtgccgatattggctcgcagctccgccagatagagcgtggatgcgatctgctggttgccacccccggacgtcttgttgacctcatagagcgaggccgcatctcgctccagaacatcaagtacctggtcctcgatgaggctgatcgtatgctggacatgggtttcgagccccaaattcgacgcatcgttgagggtgaggatatgcccaacgtccaggaccgccagacgctcatgttctcggccacctccccccgcgacattcagatgctggcacgcgacttcctgaaggattacattttcttgtcggttggtcgtgttggttctacctcggagaacatcactcagaaggtcgagtacgtcgaggatgttgacaagcgctccgtgctcctcgatatcctccacacccacggagccggtctcaccctgattttcgtcgagaccaagcgcatggccgactcgctgtccgatttcctgatcaaccagaactttcccgctacctcgattcacggtgaccgcactcagcgcgagcgtgagcgcgcgctggagatgttccgcaacggtcgctgccctattcttgtcgccacggccgtggctgctcgtggtctcgatatcccgaacgtgacccacgtcgtgaactacgatcttcccaccgacattgatgactacgtccaccgaatcggtcgtaccggccgtgctggtaacactggtcactccactgccttctttaaccgtggcaaccggggtgttgttcgcgagcttctcgacctgctgaaggaagccaaccaggaagttcctgctttcctcgagaccattgctcgcgagagctcatttggcggtggtggtcgtggtcgtggtggcggtggtcgcggccgtggccgcggtgcccagaccgatttccgaaagtacggtggcggcggcttcagcagcggcggcggcggaggcggcggcttcaacggccctccttccggcggcttcagcggcggcggctacggtggcccccctagcggtggctacagcggcggcggcggcggctacggcggcggcggcggctacggcggcggtggcggtggctacggcaaccccagcggacccggccaggcttcttggtggtaaactatgccaccggacggcgcccattcgtggtcctcgccccacgcgaggatcttctaccgcggtcgacttgggcattcggcatacctgtgcggcatcaactttcagttatttcgtcacgcgttgcatttcctttctttgtttttccttccattggcatcttctccaaccaaaatctgcgaggcatactcccttctcctggcggacttgattttcagtctcgccgaggattggcagggtcgagttctccggcacaggactctggcacatgatagacggcatttgtctttgtttcggctgcgcagcaattatgatacccaatagaagtccccgtcgcgggcgacttgcgagcagctgcagaggacttttgaaggtcgaaggcgttccttcatcgagactcggatcagtcccacctttgcggcagatgggactgagcgacgagccacacgaacgcatttacgacctttgccttctgaggaggcgtcacaacagagatcgtccttgacattctcacagaatggggttatgctctgctgcttggcagttggttttgcgcgaatggcatcttcatagacaaaagtggatttctcggtttctctggccggcaggctcacacgagcaacgccacggcaggagaagtcggtagagggctcacgtggtaattccggcggtggtcgtgataatggacacttcacccaccaaaacaggcgtctcggttgagcaggaatatggatccagacctcctagattcttttcgcagttgcaaaagatctttggtgattaggcaggtcagggtttggggtcctgctcgttcgatacgagggcatatggaacaggctagggttcccatctgctcaggccggatggcataggcttttgcagatattcaccgagatgtttatcggccctttcggttctcaagctgtggtggaccgggaaaggaatccaccaagggactgactgagaactcctcaataaaaaaaacgattgcttcctgc

SEQ ID NO: 3313 - protein, 671 aa, Oryza sativa
MADQLNMGGLSMNDQPPAGARSYIPPHMRSKMGAGAGPGAPPPGPAGPDPAMNGGLNNSAWAGNQGFDARPAPGGWSGAGGPGGYPPRGGGYNNRSGFDRNAYGGAGGGAGGGGGGHARGSGDGQWRDGKHIAGPANPRVERELFGTPDDPSKQHTGINFEKYDDIPVEASGHDVPEPVREFTNPPLDDHLIRNIDLARYKIPTPVQKYSIPIVMGGRDLMACAQTGSGKTGGFLFPILSQAFQTGPSANPTAGGGGFGRQRKAYPTSLILAPTRELVSQIYDESRKFAYRSWVRPCVVYGGADIGSQLRQIERGCDLLVATPGRLVDLIERGRISLQNIKYLVLDEADRMLDMGFEPQIRRIVEGEDMPNVQDRQTLMFSATSPRDIQMLARDFLKDYIFLSVGRVGSTSENITQKVEYVEDVDKRSVLLDILHTHGAGLTLIFVETKRMADSLSDFLINQNFPATSIHGDRTQRERERALEMFRNGRCPILVATAVAARGLDIPNVTHVVNYDLPTDIDDYVHRIGRTGRAGNTGHSTAFFNRGNRGVVRELLDLLKEANQEVPAFLETIARESSFGGGGRGRGGGGRGRGRGAQTDFRKYGGGGFSSGGGGGGGFNGPPSGGFSGGGYGGPPSGGYSGGGGGYGGGGGYGGGGGGYGNPSGPGQASWW

SEQ ID NO: 3314 - DNA, 2025 bp, Aspergillus fumigatus
  CDS (1)..(2025)
atggccgacagcttgaagatgggaaatctgtcccttaacgaatcccagcacgcgcctgctgctcccccttcaaacggccgcgctgcctacatccctccccatctccgtcagcgcaccatgggcgctaacgtcgacggtgccgctgcttccccccccggtccggctcctggtgctggtgcttggaacggcccaagaaacgctcctcgcggtggcaactgggctaatgccaatgcctctgacttcagccctcgtggtcccaacgtccccaatggtaacatcagctggactcccacggaaactcaacgtcggccctttaacccacatgcttacggacacccaggacacggaggctcctacggcggttctcatggttctgccaaaggctctggagacggccagtggcgcgacggcaagcacatccccggtcccgcaaacgcccgcctagagcgtgagcttttcggtgttcccaacgatcccaccaagcagagcactggtatcaacttcgccaactacgacgatatccccgtcgaagcatccggtcacgacgttcccgagcctgtcaatgccttcacgaaccccccgctggatgaccacttgatttctaacatcaagctcgctcgctatcaaacccctactcccgtccagaagtactccattcccattgtgatgaacggtcgcgatctcatggcgtgtgctcagactggttccggaaagactggtggtttcctgtttcccattctctctcaggccttccagacaggcccttcccctgtgcctgctcaggcctccggccagttcggctatggtcgtcaacgcaaggcgtaccctacttccctgatcctcgcccccactcgtgagctcgtttctcagatctttgacgaagcccgcaagttcgcttaccgctcttgggttcgcccctgtgtcgtctacggtggtgccgatattggctctcagctccgtcagatcgagcgtggctgtgatctcctggtcgctacccctggtcgtctggttgacctgatcgagcgtggccgcatctctctggttaacatcaagtacctggtcctcgacgaggctgatcgtatgttggacatgggtttcgagcctcagattcgccgcatcgtagagggtgaagacatgcctaacgtcaatgagcgccaaactctgatgttctcagccactttccctcgtgatattcagatgcttgcccgggacttcctgaaggattacgtgttcctctccgtcggtcgtgttggctccacctctgagaacattactcagaaggtcgagtatgtcgaggatcacgacaagcgttccgtccttcttgatatcctccacacccatggcacgagcggtcttactctcatcttcgtggagaccaagcgtatggcggatgctctttccgacttcctgcttaaccaacgcttccctgcaactgctattcacggtgatcgcacccagcgtgagcgtgaacgtgctttggagatgttccgctccgggcgttgccctattttggttgctactgctgtcgctgctcgtggtcttgatattccaaacgtcacccatgtcattaactatgatctacccaccgacattgatgactacgttcatcgcattggtcgtaccggtcgtgcgggtaacactggtatcgctactgccttcttcaaccgtggcaaccgtggtgttgtccgtgagctgattgaccttctcaaggaggctcatcaagaagttccttccttcctggagagcattgctcgcgaaggcagcggatatggtggacgcggaggccgtggaggccgcggtcgtggtggcaatgccactcgcgatatgcgtcgtatgggtggtaacgttggcggtggtggtccctcgttcggcggcggctacggtgctcccagtggaagcagctatggcggcggggctggcggctacggtgctcccccagcctacggtggtggctacggcggtggttatggcggcggtagctacggaaacccctcgggcccaactggaccctcttcctggtggtaa

SEQ ID NO: 3315 - protein, 674 aa, Aspergillus fumigatus
MADSLKMGNLSLNESQHAPAAPPSNGRAAYIPPHLRQRTMGANVDGAAASPPGPAPGAGAWNGPRNAPRGGNWANANASDFSPRGPNVPNGNISWTPTETQRRPFNPHAYGHPGHGGSYGGSHGSAKGSGDGQWRDGKHIPGPANARLERELFGVPNDPTKQSTGINFANYDDIPVEASGHDVPEPVNAFTNPPLDDHLISNIKLARYQTPTPVQKYSIPIVMNGRDLMACAQTGSGKTGGFLFPILSQAFQTGPSPVPAQASGQFGYGRQRKAYPTSLILAPTRELVSQIFDEARKFAYRSWVRPCVVYGGADIGSQLRQIERGCDLLVATPGRLVDLIERGRISLVNIKYLVLDEADRMLDMGFEPQIRRIVEGEDMPNVNERQTLMFSATFPRDIQMLARDFLKDYVFLSVGRVGSTSENITQKVEYVEDHDKRSVLLDILHTHGTSGLTLIFVETKRMADALSDFLLNQRFPATAIHGDRTQRERERALEMFRSGRCPILVATAVAARGLDIPNVTHVINYDLPTDIDDYVHRIGRTGRAGNTGIATAFFNRGNRGVVRELIDLLKEAHQEVPSFLESIAREGSGYGGRGGRGGRGRGGNATRDMRRMGGNVGGGGPSFGGGYGAPSGSSYGGGAGGYGAPPAYGGGYGGGYGGGSYGNPSGPTGPSSWW

SEQ ID NO: 3316 - DNA, 1845 bp, Glycine max
  CDS (1)..(1845)
atgcgaacttcatgggctgatttggctgcaaattctgcagctgagaacgcaggtcctggttcttctgctaacaatgtgggaactggtagcaatttagctcctacgcgacctgtttatgtacctccccatctgaggaaccgtcagccagcggcagaatcccctgcccctgctccagcatatagtggcccttcctctggtgctggtaattctggatcccgttatgctgcacccagaaatgattatcgtcctgggtatggtggtggtggtggtggacgcacaggtggatggggaaacaaaagtggtggatgggatcgtggcagggagcgggaagtcaatccctttgaagaagaggataatgctgaagaggcattcagtgagcaggagaatacaggaataaattttgatgcatatgaagacattccagtggagaccagtggtgacaatgtgcccccacctgtgaatacgtttgcagagattgatttgggtgaagcacttaatcagaacataagaaggtgcaaatatgtgaggccaacacctgttcagcggcatgctataccaatatccctagctggacgggatttgatggcttgtgcccagactggttctggaaagacagctgcattctgtttcccgattatcagtggaattatgaggggccaatctgtgcagaggccacctcgtggggtgcgtacagtgtatccgcttgcgcttgttctttctccaacgagggagttatcaatgcaaatacatgaagaggctaggaaattttcataccaaactggggttagggtggttgttgcatatggtggagcaccaataaaccagcagctgcgggatcttgaaagaggggtggacattcttgttgcaactcctggaagactggtagatttgctggagagagctagagtttcactgcagatgattcgatatctggccttagatgaggcagatcggatgctggatatgggttttgagccgcaaataaggaagattgtagagcaaatggacatgcctccaccaggtgccagacagactatgttgttcagtgcaacatttccaaaagagatacagagattggcttctgatttcctttcaaattatattttccttgctgttggaagagtgggttcaagtaccgatttaattgtccaaagagttgagtatgttcaagagtctgacaagagaagtcacctaatggaccttcttcatgcacagagggcaaacggtgtacaaggaaagcaagctttaactttagtttttgtggagacaaagaagggagctgattcgctggaacactggttgtgtcttaatggttttcctgcaactactattcatggtgacaggtcacagcaggaaagagaattagccttgaggtcatttaaaagtggtaacacccccatattggttgccaccgatgttgctgcacgtggtcttgatattccccatgttgctcatgtggtcaactttgacctgccaaatgacattgatgattatgtacaccgaattggaagaacagggcgagctggaaagaaaggtcttgcaactgcattctttaatgacaacaattcatcactagctagagctttatcagaactgatgcaagaagcaaatcaagaagtacctgcttggctctcacggtttgctgctcgatcttcttttggtggaggcaggaaccgccgatcaggcggtcgatttggtggtcgtgacttccgaagagatggctctttcagtagaggttcttcagattactacagtgcaggaaacggcagtggtggtggatatggaggctcgggtgggtatgctggtggagggtatggtcctggggtcacgagtgcttgggattga

SEQ ID NO: 3317 - protein, 614 aa, Glycine max
MRTSWADLAANSAAENAGPGSSANNVGTGSNLAPTRPVYVPPHLRNRQPAAESPAPAPAYSGPSSGAGNSGSRYAAPRNDYRPGYGGGGGGRTGGWGNKSGGWDRGREREVNPFEEEDNAEEAFSEQENTGINFDAYEDIPVETSGDNVPPPVNTFAEIDLGEALNQNIRRCKYVRPTPVQRHAIPISLAGRDLMACAQTGSGKTAAFCFPIISGIMRGQSVQRPPRGVRTVYPLALVLSPTRELSMQIHEEARKFSYQTGVRVVVAYGGAPINQQLRDLERGVDILVATPGRLVDLLERARVSLQMIRYLALDEADRMLDMGFEPQIRKIVEQMDMPPPGARQTMLFSATFPKEIQRLASDFLSNYIFLAVGRVGSSTDLIVQRVEYVQESDKRSHLMDLLHAQRANGVQGKQALTLVFVETKKGADSLEHWLCLNGFPATTIHGDRSQQERELALRSFKSGNTPILVATDVAARGLDIPHVAHVVNFDLPNDIDDYVHRIGRTGRAGKKGLATAFFNDNNSSLARALSELMQEANQEVPAWLSRFAARSSFGGGRNRRSGGRFGGRDFRRDGSFSRGSSDYYSAGNGSGGGYGGSGGYAGGGYGPGVTSAWD

SEQ ID NO: 3318 - DNA, 1860 bp, Glycine max
  CDS (1)..(1860)
atgcgaacttcatgggctgatttggctgcaaattctgcagccgaaaatgcaggtcctggttcttctgctgacaatgtgggaactggtagcactttagctcccacgcgacctgtttatgtacctcctcatctgaggaaccgtcagccagcagcagaatcccctgcccctgctccagcatatagtggcccttcttctggtgctggctctagttctggtgctggtaattctggatcccgttatgctgcacccagaaatgattatcgtcctgggtatggtggtggtggtggacgtacaggtggatggggaaacaaaagtggtggatgggatcgtggcagggagcgggaagtcaatccctttgaagaagaggataacgctgaagaggcattcagtgagcaggagaatacaggaataaattttgatgcatatgaagacattccagtggagaccagtggtgacaatgtgcccccacctgtgaatacgtttgcagagattgatttgggtgaagcacttaatcagaatataagaaggtgcaaatatgtgaagccaacacctgttcagcggcatgccataccgatatctctagctggacgggatttgatggcttgtgcgcagactggttctggaaagacagctgcattctgcttcccgattatcagtggaatcatgaggggccaacctgtgcagaggccacctcgtggggtgcgtacagtgtatccgcttgcgcttgttctttctccaacgagggagttatcaatgcaaatacatgaagaggctaggaagttttcataccaaactggggttagggtagttgttgcatatggtggagcaccaataaaccagcagctgcgggatcttgaaagaggggtggacattcttgttgcaactcctggaagactggtagatttgctggagagagctagagtttcactgcagatgattcgatatctggcattagatgaggcagatcggatgctggatatgggttttgagccacaaataaggaagattgtagagcaaatggacatgcctccaccaggtgccagacagactatgttgttcagtgcaacatttccaaaagagatacagagattggcttctgatttcctttcaaattatattttccttgctgttggaagagtgggttcaagtactgatttaattgtccaaagagttgagtatgttcaagagtctgacaagagaagtcacctaatggaccttcttcatgcacagagggcaaatggtgtacaaggaaagcaagctttaactttagtttttgtggagactaagaagggagctgattcgctggaacattggttgtgtcttaatggttttccagcaactactattcatggtgacaggtcacagcaggaaagagaattagccttgaggtcatttaaaagtggcaacacccccatattggttgccaccgatgttgctgcacgtggtcttgatattccccatgttgctcatgtggtcaactttgacctgccaaatgacattgatgattatgtacaccgaattggaagaacagggcgagctggaaagaaaggtcttgcaactgcattctttaatgataacaattcatcgctagctagagctttatcagaactgatgcaagaagcaaatcaagaagtacctgcttggctctcacggtatgctgctcgatcttcttttggtggaggcaggaaccggcgatcaggcggtcgatttggtagtcgtgactttcgaagagagggctctttcagtagaggttcttctgattactacagtgcgggaaacagcagtggtggtggatatggaggctctggtgggtatgctggtggagggtatggtcctggggtcactagtgcttgggattga

SEQ ID NO: 3319 - protein, 619 aa, Glycine max
MRTSWADLAANSAAENAGPGSSADNVGTGSTLAPTRPVYVPPHLRNRQPAAESPAPAPAYSGPSSGAGSSSGAGNSGSRYAAPRNDYRPGYGGGGGRTGGWGNKSGGWDRGREREVNPFEEEDNAEEAFSEQENTGINFDAYEDIPVETSGDNVPPPVNTFAEIDLGEALNQNIRRCKYVKPTPVQRHAIPISLAGRDLMACAQTGSGKTAAFCFPIISGIMRGQPVQRPPRGVRTVYPLALVLSPTRELSMQIHEEARKFSYQTGVRVVVAYGGAPINQQLRDLERGVDILVATPGRLVDLLERARVSLQMIRYLALDEADRMLDMGFEPQIRKIVEQMDMPPPGARQTMLFSATFPKEIQRLASDFLSNYIFLAVGRVGSSTDLIVQRVEYVQESDKRSHLMDLLHAQRANGVQGKQALTLVFVETKKGADSLEHWLCLNGFPATTIHGDRSQQERELALRSFKSGNTPILVATDVAARGLDIPHVAHVVNFDLPNDIDDYVHRIGRTGRAGKKGLATAFFNDNNSSLARALSELMQEANQEVPAWLSRYAARSSFGGGRNRRSGGRFGSRDFRREGSFSRGSSDYYSAGNSSGGGYGGSGGYAGGGYGPGVTSAWD

SEQ ID NO: 3320 - DNA, 1833 bp, Glycine max
  CDS (1)..(1833)
atgctgtggtcttatgcctcgcactatgtccctccacaacaccgcactaacagcttccaaaccttaaccgatgattcaaccagccgtggtggcgctagaccacgtgacggtggccgcggtggttccggcagccgtgggttttctcgtccccgcattccttctaaccggttacccgtggaggaaccacaagacggcagcgacgctattaacttcgacgcgtacgagtcggtaccggtggaggcgagtgggaaggacgtgccaccgccggtgaacaccttcaatgaagcggacttggacgaaggtttaaagaggaacatcgaccgatgcaagtatgtgaaacccacgccggttcagcgccacgcgattcccatcgcgagtgcgggacgcgacctaatggcgtgcgcacagaccggttcgggcaaaacggcagcgttttgttttcccattatatctgggattttgaagggtcgttctctttctgggttttcatcaatgccggctcgtggtgccgctgttgcataccccactgcacttattctgtctcctaccagggagttatcatgccagatacgcgatgaagcgaataaatatgcgcatcaaactggagtgaaggttgttgttgcctacggtggggctcctattactcagcagctgcgccttatggagaaaggtgttgatatattggttgcaactcctgggcgtttggtggatattattgaaagagaaagggtttcgttgacaaagataaagtatcttgctttggatgaggctgatcgtatgttggacatgggttttgaacaccaaatacgcaagattgtggagcaaatgcagatgccctcgccaggtattaggcaaacattgttgtttagtgccacgtttcctaatgatatacagaagctagcatcggactttttatccaactacatattcctgtctgttggaagggttggatcgagtactgaactgattgtgcagaagattgagcttgtacaggatatggacaaaagggaccatcttattaatcatctgcgacgtcaaaaggtgcatggggcaaatgggaagcatgctttgactcttgtatttgttgaaaccaaaagaggagcggatgttttagaaggttggttgttgagaagtggcttttcagctgttgccatacatggtgacaaagttcaaatggaaagggaacgggctttaagatcattcaaatctggtttgactcccattttggttgcaactgatgttgcttcacggggattggatatcccgcatgtggctcatgttataaactttgacttgcctagagacattgataactacgtacatagaattggaagaacaggccgtgcaggcaaatctgggttagccactgccttcttcagcgacaagaatagccctattgcaaaggctcttattggactcttgcaggaagcaaaccaagaagttccatcttggctcaaccaatatgctactgagggttcatcatctggtgggggtggtcgtggctatgaagctcagcgttaccgcagtggcagttatggtggtcatgatttccggaatgtcactgaacctgaggtgcagaattacaactgctacaataccaatggcaatgcagttcagtttgtagagtcttacactgctgatgatgcctcttacgttgatacctcctatgacatccaaaactccaatatagattgctcttttgaatgtttacatatagcttcttccggcagttataatcacactgattcttgtgagttgaatggaggtggtggtagggttgaagaagatgggccacgcggttatgcatctattgttgccactggatgggattag

SEQ ID NO: 3321 - protein, 610 aa, Glycine max
MLWSYASHYVPPQHRTNSFQTLTDDSTSRGGARPRDGGRGGSGSRGFSRPRIPSNRLPVEEPQDGSDAINFDAYESVPVEASGKDVPPPVNTFNEADLDEGLKRNIDRCKYVKPTPVQRHAIPIASAGRDLMACAQTGSGKTAAFCFPIISGILKGRSLSGFSSMPARGAAVAYPTALILSPTRELSCQIRDEANKYAHQTGVKVVVAYGGAPITQQLRLMEKGVDILVATPGRLVDIIERERVSLTKIKYLALDEADRMLDMGFEHQIRKIVEQMQMPSPGIRQTLLFSATFPNDIQKLASDFLSNYIFLSVGRVGSSTELIVQKIELVQDMDKRDHLINHLRRQKVHGANGKHALTLVFVETKRGADVLEGWLLRSGFSAVAIHGDKVQMERERALRSFKSGLTPILVATDVASRGLDIPHVAHVINFDLPRDIDNYVHRIGRTGRAGKSGLATAFFSDKNSPIAKALIGLLQEANQEVPSWLNQYATEGSSSGGGGRGYEAQRYRSGSYGGHDFRNVTEPEVQNYNCYNTNGNAVQFVESYTADDASYVDTSYDIQNSNIDCSFECLHIASSGSYNHTDSCELNGGGGRVEEDGPRGYASIVATGWD

SEQ ID NO: 3322 - DNA, 1818 bp, Glycine max
  CDS (1)..(1818)
atgaacccctacgacagcagatattctgacgcctcttcttttcgcggccgtcgtagtgatttcgttggacctattccgccgccgtctttcgtcggccgcggcggcgcggtttcctacggcgtccctggacccaacgggttccgatccgcacccgttgctccggtcccaccctttgtgcctccttccggaggctttaatgtaggtcgaggcggtggcagagcgggctatggtcatgtgagtgatagaatgggtcgtagcggtggtggaagaggtcgtggtggtggcggcggcgggggcggtagagccggagctcacggttttaggggctccgggagaggaggcagacacggtggtggttcttctagggatgatttgaacaacattgcacttccaaagcaggattttaagaatttggtcccttttgagaagaacttctatgttgagtgccctgcagtgagggccatgtctgagcaagaagttttgcattaccgtgccagtagagagatcaccgtgcaagggaacgatgtgccgaagcctgtaaggatgtttcatgaggcgaattttcctgattactgccttgaggttattgccaatctgggttttgcggagcccaccccaattcaggctcagggttggcccatggctcttaagggtagagacttaattggcattgctgagactggctcgggtaaaactttgtcgtatctgcttcctgctttagtgcatgtcaatgcacaacctcgattggcacatggggatggtcccattgtcttagttttagcaccaacaagagagttggctgttcaaattcaagaagaggctctgaaatttgggtcccgggcaaataaaagaagtacgtgcatctatggcggcgcaccaaagggcccccaaattcgggagcttaaaagaggcgttgaaatagttattgctacacctggtcgtctaatagatatgttggaagctcagcacacaaacctgaagagagtgacttaccttgtcttggatgaagctgatcgaatgctagacatgggttttgaacctcagatacggaaaattgtagcccagattcgaccagataggcaaacactattatggagtgctacatggccaagggaggttgaaactctggcaaggcagtttctgcgcaacccatacaaggtaattattggctcaccatacctgaaggcaaatcaatccataaatcaagttgttgaagttttaacagacatggagaaatacaatagattaatcaggctgctgaaagaagtgatggacgggagccgaattctaatatttatggagacaaaaaagggatgtgatcaagttaccagacaaatgagagtggatggatggccagcactatccatccatggtgataaaaaccaggctgaaagggattgggtcttggctgaatttaagagtggcagaagtccaataatgactgccactgatgttgctgcacggggtcttgatgtgaaagacataaaatgtgtgatcaattatgattttccatcaagcctggaagattatgtccacagaattggtcgaactggtcgtgcaggggctaaaggaactgcatacaccttttttacacatgccaatgccaagtttgctagggatctgattaagattttacaagatgctggtcaggttgtgagtcctgctttgtctgcattggttcggtcggctggttctggtcaatttggatcagggggaagttttcgctcaagaggacgaggaggctatggaaatcgaggtttaacgtcaggttccaatgccattcctctaggttcgaagaggccctggcagtgtctgtag

SEQ ID NO: 3323 - protein, 605 aa, Glycine max
MNPYDSRYSDASSFRGRRSDFVGPIPPPSFVGRGGAVSYGVPGPNGFRSAPVAPVPPFVPPSGGFNVGRGGGRAGYGHVSDRMGRSGGGRGRGGGGGGGGRAGAHGFRGSGRGGRHGGGSSRDDLNNIALPKQDFKNLVPFEKNFYVECPAVRAMSEQEVLHYRASREITVQGNDVPKPVRMFHEANFPDYCLEVIANLGFAEPTPIQAQGWPMALKGRDLIGIAETGSGKTLSYLLPALVHVNAQPRLAHGDGPIVLVLAPTRELAVQIQEEALKFGSRANKRSTCIYGGAPKGPQIRELKRGVEIVIATPGRLIDMLEAQHTNLKRVTYLVLDEADRMLDMGFEPQIRKIVAQIRPDRQTLLWSATWPREVETLARQFLRNPYKVIIGSPYLKANQSINQVVEVLTDMEKYNRLIRLLKEVMDGSRILIFMETKKGCDQVTRQMRVDGWPALSIHGDKNQAERDWVLAEFKSGRSPIMTATDVAARGLDVKDIKCVINYDFPSSLEDYVHRIGRTGRAGAKGTAYTFFTHANAKFARDLIKILQDAGQVVSPALSALVRSAGSGQFGSGGSFRSRGRGGYGNRGLTSGSNAIPLGSKRPWQCL

SEQ ID NO: 3324 - DNA, 1776 bp, Glycine max
  CDS (1)..(1776)
atgcgaacttcatgggctgatttggctgccaattcggcgtctgaaaatgcgggaacctctaactccacagctccttcgcggccggtttatgtgcctccgcatctgaggaaccgtggaccatcagaatcccttgctccagcacctccatccaataataataataatgtgggatcacggtggggtgctctgccacccagaaacggatgggggaacagaagtggtggttgggatcggcgcgaagtgaatcccttcggaggtcaggaggatgcagcagcagaagaggagttgggaggcgaggagcagcaggagagcacgggaattaactttgatgcgtatgaggacattccggtggagacgagcggtgaaaacgtgcccccggctgtgaatacttttgcggagattgacttaggcaacgcgcttaatcagaacattagacgctgcaaatatgtgaagccaacgccggttcagcggcatgccataccgatatcccttgcggggcgggatttgatggcttgtgcgcagactggttctggaaagactgccgcattctgtttcccaatcatcagtgggattatgagaggccaagcccaagtcctccagaggccgcctcctcgcggtgtccgcacagtctacccacttgcccttgttctctcacctactagggagctatccatgcagatacatgaagaggctaggaaattttcttaccagactggggttagggtcgttgttgcttatggtggagctccgataaaccaacagctccgggaacttgagagaggggtggatatccttgttgcaactccgggaagactggtagatttactggagagagctagagtttcattgcaaatgattaggtatttggccttagacgaggcagatagaatgctggatatgggttttgagccacaaataaggaagattgtagaacaaatggacatgcctccagcagctgccagacagactatgctgttcagtgccacatttccaaaagagatacagagacttgcctccgatttcctttcaaattatatttttctggctgttggaagagtgggctcaagtactgatttaattgtccaaagagttgagtatgttcaagagtctgacaagagaagtcacctcatggatcttcttcatgcacagaaggcaaatggtgtacaaggaaagcaagctttgactttagtttttgtggagacaaagaagggagctgatgctctagagcactggttgtgccgtaataattttccagcaactactattcatggtgacaggacacaacaggaaagagaattggcattaaggtcatttaaaagtggcaacacccccatattggttgcaactgatgtggctgcacgtggtcttgatattcctcatgttgcccatgtggttaactttgaccttcctaatgatattgatgattatgtacaccgaattggaaggacagggcgggcaggaaagaaaggccttgcaactgcgttctttaatgacaacaatgcatccctggcaagggccttagcagatctgatgcaagaagcaaatcaagaagtacctgattggctctcacggtttgctgctcgctcttcctttggtgggggaaggaaccgtcgatcaggaggaggccgttttggtggccgtgactttcgaagagagggttcttttagtaggggtggttctgattactacagtgcaggaaacaacagtagtggatatggcacttctggtgggtatggtggaggatatggtcctggggtaaccagtgcatgggattga

SEQ ID NO: 3325 - protein, 591 aa, Glycine max
MRTSWADLAANSASENAGTSNSTAPSRPVYVPPHLRNRGPSESLAPAPPSNNNNNVGSRWGALPPRNGWGNRSGGWDRREVNPFGGQEDAAAEEELGGEEQQESTGINFDAYEDIPVETSGENVPPAVNTFAEIDLGNALNQNIRRCKYVKPTPVQRHAIPISLAGRDLMACAQTGSGKTAAFCFPIISGIMRGQAQVLQRPPPRGVRTVYPLALVLSPTRELSMQIHEEARKFSYQTGVRVVVAYGGAPINQQLRELERGVDILVATPGRLVDLLERARVSLQMIRYLALDEADRMLDMGFEPQIRKIVEQMDMPPAAARQTMLFSATFPKEIQRLASDFLSNYIFLAVGRVGSSTDLIVQRVEYVQESDKRSHLMDLLHAQKANGVQGKQALTLVFVETKKGADALEHWLCRNNFPATTIHGDRTQQERELALRSFKSGNTPILVATDVAARGLDIPHVAHVVNFDLPNDIDDYVHRIGRTGRAGKKGLATAFFNDNNASLARALADLMQEANQEVPDWLSRFAARSSFGGGRNRRSGGGRFGGRDFRREGSFSRGGSDYYSAGNNSSGYGTSGGYGGGYGPGVTSAWD

SEQ ID NO: 3326 - DNA, 2331 bp, Glycine max
  CDS (1)..(2331)
atggctgccacagcaactgtgtctttgatgggtccgaggtatgcaccaccagacccaacactccctaaaccatggcggggtcttgtggatggcaagactgggtatctttacttttggaatcctgagactaatgtcacccagtatgagaggccatcctcaagctcagcttcccagtcaaagttttcttcagtgcccagctcttctgtccaggttcaacaatcatctcaagggtcgcaacgtggtcgtagtcctgatttcagtgataggtatgatcgaaatggcactggtgggtcaaacgacgctggatcccggaacaatcagagttccaaagggggaagttatacttctcatgatgtttcaaatggaacaaatgttgctggcaatggtaattcttctgtcagaggtcatggggcttcagatgctggagctggactatctgctgagtcttatcgacatcggcatgaaatatctgtgactggagacaatgtgcctccaccgcttgcatcatttgggtcaactggctttccatctgagcttctgagagaggtacaaaatgctgggttctcagccccaactccaattcaggcacagtcatggcccattgctcttcaaggtagagatatagttgccattgctaaaacaggctcagggaaaaccttgggatatttaattccagcatttattcacctcaagcgctctggtaataactccaaaatgggccccactgcattggtactttcaccaacaagggagttggcaacacagatacaagatgaagccatgaagtttgggaaatcatctagaatttcatgtgcatgtttgtatggaggagcaccaaagggtcctcaactgagagacattgatcgtggagcagatattgtggtagccactcctggtcgcttgaatgatattcttgagatgagaagaattagtcttaatcaggtttcttacctggtgctagatgaggcagacaggatgctggatatgggttttgaacctcaaattaggaaaattgtgaatgaggtgcccaatcgcaggcaaactctaatgtttactgcaacatggccaaaggaggttaggaaaattgcagctgatctgctagtcaagcctgtccaggtgaacattgggaatgtagatgagcttgttgctaacaagtctattactcagcatgttgaagtattgccaccaatggagaaacaaagacggctggaacatattttgcggtcacaggatcaaggatcaaagataattattttttgttctaccaagaaaatgtgtgatcaacttgctcgtaatctgacacgtcatttcggagctgctgctattcatggggataaatcccaggctgagagggatcatgtgttgagtcagtttcgaactgggaggtctcctgtgctagtggccacagatgttgctgctcggggactggatatcaaggacattagggtggttgtcaattatgacttccctacaggagtggaagattatgttcataggattggaaggactggaagagctggagccactgggctagcttacactttctttggtgaccaggatgctaaatatgcttcagatctcatcaaagtcttggaaggtgcaaaccagaaggtacctccagaacttcgtgatatgtcatcacggagtggtggtgggatgggtagatccagacgatggggttctgggggacgaggtggacatggtgattctggatatggtggaaggaataatgactctggatatggtggaagaggtaatgatgcaggatatggtggaagaggcagtgattctaattatggagggagggggactgctgcttctggcagaggtggaggccgtgggtttgaccatgactcccagaggaatgataggggtcggagcccagacaagggatctagttggagtgatcgcttcaaaagcgtcaaccgggatcgcagtcgtagtcctgacagggctgcactacctcaacattcccaaggtggcagctttcacaaggcaatgatggaacgtggtggtggtggtggtgatcgcaataagagctttaaccgggaccgaagccgcagtcctagccctcatagacaggagaagtgcccagcggttcgagatcgttccccagtttacagttttcatcaatcaatgatgggacgaggtcagtcatccccttcatctcaacggcagcgtgcacgcagtcctcaccgaaactcacccccctcccagggtgatggaagatatgctggatctcattcatcttacaatggagaagtggaggaagggatgattcccgaggaagaaggaatgattggtcaagatgatcccgtaaatgtcaattag

SEQ ID NO: 3327 - protein, 776 aa, Glycine max
MAATATVSLMGPRYAPPDPTLPKPWRGLVDGKTGYLYFWNPETNVTQYERPSSSSASQSKFSSVPSSSVQVQQSSQGSQRGRSPDFSDRYDRNGTGGSNDAGSRNNQSSKGGSYTSHDVSNGTNVAGNGNSSVRGHGASDAGAGLSAESYRHRHEISVTGDNVPPPLASFGSTGFPSELLREVQNAGFSAPTPIQAQSWPIALQGRDIVAIAKTGSGKTLGYLIPAFIHLKRSGNNSKMGPTALVLSPTRELATQIQDEAMKFGKSSRISCACLYGGAPKGPQLRDIDRGADIVVATPGRLNDILEMRRISLNQVSYLVLDEADRMLDMGFEPQIRKIVNEVPNRRQTLMFTATWPKEVRKIAADLLVKPVQVNIGNVDELVANKSITQHVEVLPPMEKQRRLEHILRSQDQGSKIIIFCSTKKMCDQLARNLTRHFGAAAIHGDKSQAERDHVLSQFRTGRSPVLVATDVAARGLDIKDIRVVVNYDFPTGVEDYVHRIGRTGRAGATGLAYTFFGDQDAKYASDLIKVLEGANQKVPPELRDMSSRSGGGMGRSRRWGSGGRGGHGDSGYGGRNNDSGYGGRGNDAGYGGRGSDSNYGGRGTAASGRGGGRGFDHDSQRNDRGRSPDKGSSWSDRFKSVNRDRSRSPDRAALPQHSQGGSFHKAMMERGGGGGDRNKSFNRDRSRSPSPHRQEKCPAVRDRSPVYSFHQSMMGRGQSSPSSQRQRARSPHRNSPPSQGDGRYAGSHSSYNGEVEEGMIPEEEGMIGQDDPVNVN

SEQ ID NO: 3328 - DNA, 1962 bp, Coprinopsis cinerea okayama7#130
  CDS (1)..(1962)
atgacaaatggtccagtaaacggcaacaccggtatcgagagccagttttcggctcttggtctcggaaagagtgcttatgttcccccgcatttgaggaatcagcagcgggctgcctcttccccatctcccactccttcaaacgggcgaaacggctggtctgatcgcactggaacgcccccacctcgaggtggttttggaggcggcttctctgaccgtggcggccgtggcggctcctttggcagccgcgacagcaggtgggctggccccaatcgtggcagcgactatggcggcggccgtggcgacagccgtggcgacagtggccctcaggcctcctttggctacggtgtctggcgtgacggcaaacacgttgtaggaggccgcaacgcccgccttgaaaaggagcttttcggcacccccgacgatcccagcaagcaacacaccggtattaatttcgaaaagtacgacgatatccccgtcgaagccaccggcgctggcgttcccgagcctgtcaacagcttcaccagcccccctctcgaccccgtcctgttggaaaacattggctttgccatgtacactacccccacccctgtccaaaagtactcgatccctatcgtcgctggcggcagggatttgatggcttgcgctcagaccggttccggtaagacaggtggattcttgttccccattctgtctgcttccttcaccgagggacctcgccctccaccggagactgccgctcccacttatggacgggctcgcaaagcttatccgaccgcgttgatccttgcacctactcgtgaattggtttcccagattcatgaagaagcccgcaagttcgcttaccgttcctgggtccgaccggccgtggtctacggaggcgccgacattaaccagcaactccgccaaatcgaaagaggctgcgatttgctcagcgcaacccctggtcgtcttgtcgatctgattgagcgtggccgcatcagcttggctaacgtcaaatacctcgttctcgacgaagccgatcgcatgttggacatgggtttcgagcctcagattcgccgaattgttcagggtgaagacatgcccggtgtcaatgatcgccagactctcatgttcagcgccaccttccctcgggacatccagatgctcgcacgcgacttcttgaaggattacatcttcctcagtgttggccgtgtcggtagcactagcgagaacatcacccagaagatcgagtacgtcgaggatggcgacaagcgcagcgtcctgctcgatatcctcgccagccagtccaaggaagatatgggcctcaccctcgtcttcgtcgagaccaagcgcatggccgacatgctcagcgatttcttgatcggcaacaacatgcccgccacatccattcacggtgatcgcactcagcgcgagcgtgaaatggccctccaaaccttcagaaccggtcgtacccccatcatggttgccactgctgtcgctgctcgtggtttggatattcccaacgtcactcacgtcgtcaactacgacttgcccagcgacatcgacgactacgtccatcgtatcggtcgtactggtcgtgccggcaatgtcggtgtttccactgccttcttcaaccgaggcaacaagaatattgtccgtgacctcgtcgagcttttgagggaagccaaccaagagatccccagctggctcgagaccgttgctcatgaagctgcctttggcagtggcggctaccgaggtgggcgtggtggacgtggccgtggtggaggacgcggaggcggaaaccgtgattaccgttcgaactacagcagcggaggcggtggaggaggaggcggatatggcggtggcggctacggcggctacggtggaggaggctatggcggcggaggctacggaggaggaccccgtggcggctatggaggatcttcctatggcggcggcggaggtggcaatggctggtggtaa

SEQ ID NO: 3329 - protein, 653 aa, Coprinopsis cinerea okayama7#130
MTNGPVNGNTGIESQFSALGLGKSAYVPPHLRNQQRAASSPSPTPSNGRNGWSDRTGTPPPRGGFGGGFSDRGGRGGSFGSRDSRWAGPNRGSDYGGGRGDSRGDSGPQASFGYGVWRDGKHVVGGRNARLEKELFGTPDDPSKQHTGINFEKYDDIPVEATGAGVPEPVNSFTSPPLDPVLLENIGFAMYTTPTPVQKYSIPIVAGGRDLMACAQTGSGKTGGFLFPILSASFTEGPRPPPETAAPTYGRARKAYPTALILAPTRELVSQIHEEARKFAYRSWVRPAVVYGGADINQQLRQIERGCDLLSATPGRLVDLIERGRISLANVKYLVLDEADRMLDMGFEPQIRRIVQGEDMPGVNDRQTLMFSATFPRDIQMLARDFLKDYIFLSVGRVGSTSENITQKIEYVEDGDKRSVLLDILASQSKEDMGLTLVFVETKRMADMLSDFLIGNNMPATSIHGDRTQREREMALQTFRTGRTPIMVATAVAARGLDIPNVTHVVNYDLPSDIDDYVHRIGRTGRAGNVGVSTAFFNRGNKNIVRDLVELLREANQEIPSWLETVAHEAAFGSGGYRGGRGGRGRGGGRGGGNRDYRSNYSSGGGGGGGGYGGGGYGGYGGGGYGGGGYGGGPRGGYGGSSYGGGGGGNGWW

SEQ ID NO: 3330 - DNA, 2397 bp, Culex pipiens quinquefasciatus
  CDS (1)..(2397)
atggatgaaaatttgggaggatgcaggtttgctggtctggacttgcagcagcagcagcagcagcatcagcagctgagcgcgcaagattctgccaacttgaagaatacgtccggtggccgttacgttccgccccagctgagaagtggccgtggcggcggtggtggtggtcccgagaacgaccaacatcgtggcggcgattactctggtggacattccggcggaggcggcggcggaggacgctactcggaccgtggtggggatcgtggagattactacaataatcggcgcggaggcggcggtggccggttcaacgatcgcaaggataactacaaccgaggaggcggctacaacaatcgcggcggcggcggcggcgggggtggacacccggatcagcagcagcagcagcatctgcaccaggagctgcctccccaggatcaattgcctccccaggagtttgcggaaaatggcgccggccttcccgtcggcgagcctggtgacgatcagtttaacgatggtgttccgcagcagcaccagcagcaaccacgaggtggtggtaactggaacaatggtcctcggggcggtcccagagattttcgtgataaccgtcagccgcagaatgaccgctggcaggagcccccggccaatggaggcggcggcggcggcggtggatacggaggccgaggccgcgacgaccgcggaatgggtggacgctggaacgaccgcggcggacgaggagcggacgttgattttacgcagcttaccgagcgcgacgagcgtctggaaggcgagctgttccaacacggtaataccggtatcaatttcagcaagtacgaagatattcccgtggaggcgacgggcgacaacgttccgccccacatcaacaccttcgatgacattgagctgacagagatcatcgagaacaatataaagctggcgaactacgacgttccgacgccggtccagaagtacgccattccgatcgtcatgagcggacgcgacgtgatggcctgcgcccagacgggttccggcaagacggccgcgttcctggttccgatcttgaatcaaatgtacaagcacggtgtcactccaccgccccagaatcgtccgttcaaccgtcgcaagcagtacccgctgggactggtgttggccccgacccagtcgaagaagttctgctatcgctctcgtatgcgtccgtgcgttctgtacggcggtaacaacacccaggagcagatgcgcgagttggaccgtggttgccacctggttgtggccaccccgggtcgcctggaggacatgattatgcgcggcaaggtgggcctggacaacattcgtttcctcgtgctggacgaggccgatcgtatgctggacatgggattcgagccccagattcgtcgtatcgtcgaggaaagcaagatgccgcagacgggcgagcgccagacgctcatgttctccgctaccttcccgaaggctatccaggagctggcgagtgatttccttcacaattacatcttcttggccgttggtcgcgtcggttccacctccgtcaacattacgcagtcgatcttctgggtcgaggaaaacgacaagcgttcccatctgctggatctgctgtccaacatcaaggaccagaacgatggtgacgagaaggactgtctcacgctgatctttgttgaaactaaaaaatccgccgacgcgctcgaggatttcctgtacaactacaaccatccggtcaccagcatccacggcgaccgtacccagaaggagcgtgaagaggcactcaagtttttccgctcgggacgttgcccggttctggttgcgacggccgtggccgctcgtggcctcgacatcccgaacgtcaaacacgtcatcaactttgatctgccggcggaggtcgaggagtacgtgcaccgtatcggtcgtaccggccgtatgggcaatctcggcacagccacgagcttcttcaacgacaagaaccgtaacgtcgccaccgggctggttcggctgctgacggaaacccaacaggaaattcccggcttcctggaggacatgaccaccgatcggggctggggcagtcgcggacgcggcggcggcggtggacgtaaccagcgttacggcggccaaagctcatccttcggctccagggattaccgtacgcagggcggcaaccgcaacaacaacacccgcgatcaacgctcgggaggcggtggtggcggtggcggcggcgctggccgaagcagctacggaggcggaggcggaagctacggaggaggcggatcccgcgacgacggcggttactaccgtaacggcggtggcagctccggcgggtacggaggcagttacaacaacaacagtggaggcggtggtggcggcggcggcggccacgactggtggaacgagtaa

SEQ ID NO: 3331 - protein, 798 aa, Culex pipiens quinquefasciatus
MDENLGGCRFAGLDLQQQQQQHQQLSAQDSANLKNTSGGRYVPPQLRSGRGGGGGGPENDQHRGGDYSGGHSGGGGGGGRYSDRGGDRGDYYNNRRGGGGGRFNDRKDNYNRGGGYNNRGGGGGGGGHPDQQQQQHLHQELPPQDQLPPQEFAENGAGLPVGEPGDDQFNDGVPQQHQQQPRGGGNWNNGPRGGPRDFRDNRQPQNDRWQEPPANGGGGGGGGYGGRGRDDRGMGGRWNDRGGRGADVDFTQLTERDERLEGELFQHGNTGINFSKYEDIPVEATGDNVPPHINTFDDIELTEIIENNIKLANYDVPTPVQKYAIPIVMSGRDVMACAQTGSGKTAAFLVPILNQMYKHGVTPPPQNRPFNRRKQYPLGLVLAPTQSKKFCYRSRMRPCVLYGGNNTQEQMRELDRGCHLVVATPGRLEDMIMRGKVGLDNIRFLVLDEADRMLDMGFEPQIRRIVEESKMPQTGERQTLMFSATFPKAIQELASDFLHNYIFLAVGRVGSTSVNITQSIFWVEENDKRSHLLDLLSNIKDQNDGDEKDCLTLIFVETKKSADALEDFLYNYNHPVTSIHGDRTQKEREEALKFFRSGRCPVLVATAVAARGLDIPNVKHVINFDLPAEVEEYVHRIGRTGRMGNLGTATSFFNDKNRNVATGLVRLLTETQQEIPGFLEDMTTDRGWGSRGRGGGGGRNQRYGGQSSSFGSRDYRTQGGNRNNNTRDQRSGGGGGGGGGAGRSSYGGGGGSYGGGGSRDDGGYYRNGGGSSGGYGGSYNNNSGGGGGGGGGHDWWNE

SEQ ID NO: 3332 - DNA, 1806 bp, Bombyx mori
  CDS (1)..(1806)
atggatgatgactgggatgattcctgtgaagctgttgtggtgccacctcccccactacagaaccatgattctgtagatgaaggtcacagtctgtccagaggaagaggatttccttccttcaatgaggatgatgaaaaagagaatgggtatggtgagcgacggggtcgaggtggccgaggcggaggacgaggacgcggcggaagaggtggacgtggagggtcacgagaacagcacagcgactatgagactaatggtgaccatgatgataggggtcgtggcgaacgtggccgaggccgcggaaggggaggacgtggtggtggtagaggtggtggtggcggaggaggcgatagaaatgattatgaagataatgaaataggggaaaacggggaaacgaagaagccggtaacctatgtgcctccagaaccaacaaatgatgagacggaaatctttagcagtactataagctctggtattaactttgacaagtttgaccatattgcagtaaaagtcagtggtgagaatcctccaagacctatcgaaagtttcgaaactgcaaatctcagaaagtatgttctagataatgtacttaaggctggttatagaaaacccacacctattcagaaaaatgcaatcccaatcataatgagtggcagagatttgatgggttgtgcccagactggttcgggtaaaacggctgcttttttggtacccataattaatatgttattacaagatccaaaggatctgatctcagaaaatggctgcgcccagccacaggttataatagtatctccaacgcgagaactgactcttcaaatatttaatgaagctaggaaattctcatatggctcagttttgaaggttgcagttgcttatggtggcactgctgtgcgccatcaaggtgataacattgctagaggctgtcacatattggtagcaacaccaggccgtcttcatgattttgtggaaaggaatcgtgtatcatttggcagtgtaagatttgtcgtactggatgaggctgaccgtatgttagatatggggttcatgccaagcattgaaaaaatgatgttacatccaaccatggtggagaccacgaaaaggcaaactttaatgttttcggcaacattccctgaagacatccaacatttggctggtcgtttcctaaataattatctatttgtggcggttggtatcgtcggaggcgctagcactgacgtcgaacaaatcttcattgaagtcactaaatatgaaaaacggaacagtctaaaacaactcattgaggaaaatgatggtaaaagaatcttggtatttgtcgaaacaaaacgtaatgcagacttcatagcagccatgttgtcggaacagcaattgctcacatcttcaattcacggcgatcgcatgcaacgtgagcgcgaggaagcgttacagaattttaagagtgggaaacactgtatcttggttgcaacagctgtagctgcacgtggtttagacattaaaaatgtagacattgtagtgaattatgacctcccaaaaagcattgatgagtatgtgcacagaatagggcgtactggtcgcgtaggaaacagaggaaaagctgtatcgttttatgattctgatcaggatttagccctagtggctgatctttcaaaaatacttcgacaggcagatcaatctgtcccagacttcttaaagggaggtggcactgctacattcaagggcaataaatatggaggcagtgatgtcagaaatttcaacaatgccaacacagctgtagtagatcaagggcaggaacctgaagaagaatggtag

SEQ ID NO: 3333 - protein, 601 aa, Bombyx mori
MDDDWDDSCEAVVVPPPPLQNHDSVDEGHSLSRGRGFPSFNEDDEKENGYGERRGRGGRGGGRGRGGRGGRGGSREQHSDYETNGDHDDRGRGERGRGRGRGGRGGGRGGGGGGGDRNDYEDNEIGENGETKKPVTYVPPEPTNDETEIFSSTISSGINFDKFDHIAVKVSGENPPRPIESFETANLRKYVLDNVLKAGYRKPTPIQKNAIPIIMSGRDLMGCAQTGSGKTAAFLVPIINMLLQDPKDLISENGCAQPQVIIVSPTRELTLQIFNEARKFSYGSVLKVAVAYGGTAVRHQGDNIARGCHILVATPGRLHDFVERNRVSFGSVRFVVLDEADRMLDMGFMPSIEKMMLHPTMVETTKRQTLMFSATFPEDIQHLAGRFLNNYLFVAVGIVGGASTDVEQIFIEVTKYEKRNSLKQLIEENDGKRILVFVETKRNADFIAAMLSEQQLLTSSIHGDRMQREREEALQNFKSGKHCILVATAVAARGLDIKNVDIVVNYDLPKSIDEYVHRIGRTGRVGNRGKAVSFYDSDQDLALVADLSKILRQADQSVPDFLKGGGTATFKGNKYGGSDVRNFNNANTAVVDQGQEPEEEW

SEQ ID NO: 3334 - DNA, 1584 bp, Mesorhizobium loti MAFF303099
  CDS (1)..(1584): transl_table=11
ttgtcctcagacaccacgatcgctccagaagcgttgaccttttcagacctcggcctgtcgccgaaggtcctttccgcagtcaccgatgccggctataccgtgccgacgccgatccaggcgggcgccatcccacacgccttgctcggcaaggatattttgggcatagcccagaccggcaccggcaagacagcctccttcgtgctgccgatgctgacccgactggaaaagggccgcgcccgcgcccgtatgccgcgcaccctgattctcgaaccgacgcgtgagcttgccgcgcaggtcgaggaaaacttcgtcaaatacggcaagaaccacaagctcaacatcgcgctgttaattggcggtgtttccttcgacgagcaggacaagaagctggagcgcggcgccgacgtgctgatcgccacgcctggccgtctgctcgaccatcgcgagcgcggcaagcttttgctcaacggcgttgagatcctcgtcatcgacgaggccgaccggatgctcgacatgggcttcattcccgatatcgagcgcatctgcgagatgatcccgttcacccggcagacgctgttcttctcggcgaccatgccgccggaaatcaccaagctgacggagaagtttctgcacgcgccggtgcgtgtcgaagtttcgaaggccgcgtcggctgccaccaacatcacccaacggctggtcaaatccggctcgaagccctgggacaagcgcgagacgttgcgcaacctcatcaaagctgaagacgcggagttgaagaacgccatcatcttctgcaaccgcaaggtcgaggtgtcggagctgttccgctcgctgctgaaatatgatttcgatgccggcgctctgcatggcgacatggaccagcgcgcccgcatgcagatgctggccaatttccgtgacggcaagcttcgctacctcgtggcttctgacgttgccgcgcgcggcctcgacatccccgatgtcagccacgtcttcaactatgacgtgccgatccatgccgaggactatgtccaccgcatcggccgcaccggccgcgccgggcgctccggcaagtccttcactatcgcgaccaagtccgacaccaaatatatcgacgccatcgaacggctgatcggcaacaagatcgaatggcatgacggtgacctgtcgaccgtggtcgccagcgaaggcgaggacgatgctccgcgccggggcaaaggcgcaccgcgtcgcgccggccgcaaggacgacgatcgcaaggacaggggcgagcgcaagaagggcggcgaacgccgtgccagacacagcgaggaagatgccgcggtcgcacagcaagaacagcccgatgtggctgagacggccgtcgccgatatcagcgagcggcgcgcgcgcaaggaggcgatccgttcggaaaacaccgaacgcaaatcctccgatcgcaacgaaccgcgcgcaccggaacggggtgacacccggccgcagcgcgacaacagccgccctgcccgccatcgccaccaggaagacaacgacaccaccgttggcttcggcgacgacatgccggccttcatgcgcatcgtcgccaaggtctga

SEQ ID NO: 3335 - protein, 527 aa, Mesorhizobium loti MAFF303099
MSSDTTIAPEALTFSDLGLSPKVLSAVTDAGYTVPTPIQAGAIPHALLGKDILGIAQTGTGKTASFVLPMLTRLEKGRARARMPRTLILEPTRELAAQVEENFVKYGKNHKLNIALLIGGVSFDEQDKKLERGADVLIATPGRLLDHRERGKLLLNGVEILVIDEADRMLDMGFIPDIERICEMIPFTRQTLFFSATMPPEITKLTEKFLHAPVRVEVSKAASAATNITQRLVKSGSKPWDKRETLRNLIKAEDAELKNAIIFCNRKVEVSELFRSLLKYDFDAGALHGDMDQRARMQMLANFRDGKLRYLVASDVAARGLDIPDVSHVFNYDVPIHAEDYVHRIGRTGRAGRSGKSFTIATKSDTKYIDAIERLIGNKIEWHDGDLSTVVASEGEDDAPRRGKGAPRRAGRKDDDRKDRGERKKGGERRARHSEEDAAVAQQEQPDVAETAVADISERRARKEAIRSENTERKSSDRNEPRAPERGDTRPQRDNSRPARHRHQEDNDTTVGFGDDMPAFMRIVAKV

SEQ ID NO: 3336 - DNA, 1509 bp, Agrobacterium tumefaciens str. C58
  CDS (1)..(1509): transl_table=11
atgagtttgttttggcgccccgaaaggcaatatatattgaccagttttaacgaactcggcctctccgaaaagattgtggccagtgttacccagcttggctatacgacccctacccccattcaggcgaaagccattccgctgctgctcgaaggccgtgacctgatcggcctcgcacagaccggcaccggcaagacggccgctttcgggctgccgatcatcgaaatgctgatgaagcaggcggatcgtccggcaaatcgcaccacccgcacgctgatccttgcaccgacccgcgaactggtgaaccagatcggcgacaacctgcgttccttcgtgaagaagacgccgttgcgcatcaaccaggttgttggcggcgcgtcgatcaacaagcagcagcttcagctcgaaaagggcactgacatcctcgtggcgacccccggccgcctgctggacctcatcgcccgcaacgccatctcgctctcgaaggtgacgtatctcgttctcgacgaagccgaccagatgctcgatctcggcttcatccatgatctgcgcaagatttcccgcatggttccgcccaagcgccagacgctgctgttttcggccaccatgccgaaggccatttccgagcttgccagcaacttcctgaccgacccgatcaaggtcgaggtgacacctccgggcaaggctgccgacaaggtcgagcagtacgtgcatttcgtcgccggcaagaacgacaagaccgatcttttgaagaagtcgctcaacgagaacccggatggccgctccatcgtgttcctgcgcaccaagcacggcgcggagaagctttacaagcatctcgaacatatcggcttcaaggtcgcctccattcacggcaacaagagccagggccagcgcgagcgggcactgaagggcttcaaggacggtgagatcaaggttctggtcgcgaccgacgtcgctgcccgcggcatcgatatcccggccgtaacgcacgtcttcaattacgacctcccggaagtgccggatgcttacgttcaccgcatcggccgtaccgcccgcgccggccgcgacggcatcgccatcgctttctgcgcaccggacgaaacccgcctgctgcacgacatcgaaaagctgatgaagatcgatatcccggttgcgtctggcgaacgtccggctggtcttgcaagccccacacgccccaataacaaccgtggcggtcgcaacaacaatggcggccagccgcgcggcccgcgtgaaggtggacgtcacaacggcgaatcccgcccgtcccgcaaccacgcgccgcgtgatgcggacaacgatctggaagtaacctccgacttcaagcgcgttaagcaggctgaaggcgacgcaggccgcccggccggcccgcgcaagcagcgccgccccgcccgcaagcccggcggcagcggcgccaaccgccacgcacctgctggcggcaacggccaggaaaagcgtgcttccggcaacggcaatcgcggccgtaaccgctaa

SEQ ID NO: 3337 - protein, 502 aa, Agrobacterium tumefaciens str. C58
MSLFWRPERQYILTSFNELGLSEKIVASVTQLGYTTPTPIQAKAIPLLLEGRDLIGLAQTGTGKTAAFGLPIIEMLMKQADRPANRTTRTLILAPTRELVNQIGDNLRSFVKKTPLRINQVVGGASINKQQLQLEKGTDILVATPGRLLDLIARNAISLSKVTYLVLDEADQMLDLGFIHDLRKISRMVPPKRQTLLFSATMPKAISELASNFLTDPIKVEVTPPGKAADKVEQYVHFVAGKNDKTDLLKKSLNENPDGRSIVFLRTKHGAEKLYKHLEHIGFKVASIHGNKSQGQRERALKGFKDGEIKVLVATDVAARGIDIPAVTHVFNYDLPEVPDAYVHRIGRTARAGRDGIAIAFCAPDETRLLHDIEKLMKIDIPVASGERPAGLASPTRPNNNRGGRNNNGGQPRGPREGGRHNGESRPSRNHAPRDADNDLEVTSDFKRVKQAEGDAGRPAGPRKQRRPARKPGGSGANRHAPAGGNGQEKRASGNGNRGRNR

SEQ ID NO: 3338 - DNA, 1245 bp, Rickettsia conorii str. Malish 7
  CDS (1)..(1245): transl_table=11
ttggattatataatgaaaaattttaatttatctgaagaattaattattgctctcgagacaatgaatataactgagccgactgaaatacaaaagcaatcgattccggttgcaatggcgggatcggacatactcgcttctagccaaacaggttcaggcaaaactcttgcttatttattgccgttaattgattcatttattaaaaataaaactactgctttaattcttgttccgactagagaattagcaacgcaaatacacagtactttaaataaagtaactacatcgtataaaattaatagtgcagttttgataggcggtgaaccgatgcctaaacaatttatacaattaaaaaagaatccaaaagtgattatcggtacgccggggcgtattatcgatcacttaaataggggaagtctaaaaattgatcgtataggcataaccgtacttgacgaaatggatagaatgcttgatatggggatgaaagaacaattagaagaaatcaataaatttttaccggaaaaaagacaagttttaatgttttccgctactatgccaaaacatattattgctgtttctcaaaaatatctaaacaatccggtacgtattacggtaggtgctactaataaagcagctgcagaaataaaacaggaatcgatgcatgtttctgataaagaaaaatttagtgcattaactaaacaacttggtaatagggaaggatcggtcattatttttgtgaagactaaacgctctgccgatcaattagctaaaatgttgaaatatgaaaatcatacagcagaagctatacacggtgatttaagtcagcgtcaacgtgaaagagtaattttatcatttcgtaagtcaaaccatagaataatggtagcaactgatgtagcggctcgtgggcttgatattcctcatacacagcatgttattaattatgatttacctatgtgtcctgaagattatttacataggataggtagaacgggtagagcaggggctaccggacatgcgttgtcttttatttctcctgatgatgttattagatggcgtgcaatcgatcgtttagtaaataaaggagaatctacgccacgtagtgagtttagaagtgataaaaataatcgtaaaagatcattcggtaaaagagccggcggtgacggtaaaaagtttaatgcttttgatagtagccgtaaaagaacctttgatggtaacagctacggtaataaaagaaagaaagtatcgtag

SEQ ID NO: 3339 - protein, 414 aa, Rickettsia conorii str. Malish 7
MDYIMKNFNLSEELIIALETMNITEPTEIQKQSIPVAMAGSDILASSQTGSGKTLAYLLPLIDSFIKNKTTALILVPTRELATQIHSTLNKVTTSYKINSAVLIGGEPMPKQFIQLKKNPKVIIGTPGRIIDHLNRGSLKIDRIGITVLDEMDRMLDMGMKEQLEEINKFLPEKRQVLMFSATMPKHIIAVSQKYLNNPVRITVGATNKAAAEIKQESMHVSDKEKFSALTKQLGNREGSVIIFVKTKRSADQLAKMLKYENHTAEAIHGDLSQRQRERVILSFRKSNHRIMVATDVAARGLDIPHTQHVINYDLPMCPEDYLHRIGRTGRAGATGHALSFISPDDVIRWRAIDRLVNKGESTPRSEFRSDKNNRKRSFGKRAGGDGKKFNAFDSSRKRTFDGNSYGNKRKKVS

SEQ ID NO: 3340 - DNA, 1857 bp, Arabidopsis thaliana
  CDS (1)..(1857)
atggctgctaccgctgctgcttctgttgtccgttacgcacctgaggatcatactcttcccaagccctggaaaggccttatcgatgatagaactggttacttgtacttttggaatcctgagaccaatgttactcagtacgagaaaccaaccccctctctacctcctaagttttctcccgccgtttctgttagctcttccgttcaggttcaacaaactgatgcctatgctcctcccaaggatgacgataagtactccagaggctctgaacgtgtgtccaggttttctgagggtggcaggagtggaccgccttattcgaacggtgctgctaatggagttggggattctgcttatggtgcagcatctaccagagttcctcttccttcatcagctccagcaagtgaactatcccctgaggcctattcccgccgtcatgaaattactgtcagtgggggccaagtaccaccacctctaatgtcctttgaagctactggttttccacctgagcttctgcgggaggtactcagtgcaggtttctctgctccaactccaattcaagctcagtcatggcccattgctatgcaaggtagggacatagtagccattgctaaaactggctcgggaaaaactttgggttacttgattcctggatttttgcatcttcaacgtatccgaaatgattcgcgaatgggcccaacaatcttggtattgtctccaacgagagagctggccacacaaatccaagaagaagctgttaaatttgggaggtcatcaagaatttcgtgtacgtgtttgtatggtggtgcaccaaagggccctcagttgagggatttagaaagaggagcagatatcgtggttgcaactcctgggagattgaatgatatccttgaaatgaggaggattagtctgcgtcagatatcttatcttgtgctagatgaggcagatagaatgttggacatgggttttgaacctcagataaggaagattgtgaaagaaattcccactaagcgtcaaacccttatgtacacagctacatggccaaagggagttaggaaaattgcagctgacttgcttgttaaccctgctcaagtcaacattggcaatgttgacgagcttgtggctaacaagtcaatcacacagcatattgaagtggtagcaccaatggagaaacagaggaggttagagcagatcttgcggtctcaggaaccaggctcaaaggtgataatattctgctcaaccaaaaggatgtgtgatcaactaacacgcaatctaacccgccaatttggagctgctgctatacatggagacaagtcccagcctgagagagacaatgttcttaatcaattccgcagtggcagaactccggttcttgtagcaaccgatgttgctgctcgtggtctggacgttaaggacatcagggcggtcgtaaactatgatttccccaatggagtggaagactatgttcatagaatcggaagaacaggaagagctggagcgactggtcaggcattcacattctttggtgatcaagattcgaaacatgcttcggatctgatcaagattttggaaggagcaaaccagcgagttcctcctcagatccgcgaaatggctacacgtggtggtgggggaatgaacaaattcagtcgttggggacctccttccggcggccgtggtcgtggtggcgactctggttatggtggcagaggtagctttgcttcccgtgacagaagcagcaatggatggggaagagagcgagaaaggagccgtagccctgagagattcaacagagctccaccaccgtcttccaccggatctcctcctcgcagcttccacgagacgatgatgatgaaacacagatga

SEQ ID NO: 3341 - protein, 618 aa, Arabidopsis thaliana
MAATAAASVVRYAPEDHTLPKPWKGLIDDRTGYLYFWNPETNVTQYEKPTPSLPPKFSPAVSVSSSVQVQQTDAYAPPKDDDKYSRGSERVSRFSEGGRSGPPYSNGAANGVGDSAYGAASTRVPLPSSAPASELSPEAYSRRHEITVSGGQVPPPLMSFEATGFPPELLREVLSAGFSAPTPIQAQSWPIAMQGRDIVAIAKTGSGKTLGYLIPGFLHLQRIRNDSRMGPTILVLSPTRELATQIQEEAVKFGRSSRISCTCLYGGAPKGPQLRDLERGADIVVATPGRLNDILEMRRISLRQISYLVLDEADRMLDMGFEPQIRKIVKEIPTKRQTLMYTATWPKGVRKIAADLLVNPAQVNIGNVDELVANKSITQHIEVVAPMEKQRRLEQILRSQEPGSKVIIFCSTKRMCDQLTRNLTRQFGAAAIHGDKSQPERDNVLNQFRSGRTPVLVATDVAARGLDVKDIRAVVNYDFPNGVEDYVHRIGRTGRAGATGQAFTFFGDQDSKHASDLIKILEGANQRVPPQIREMATRGGGGMNKFSRWGPPSGGRGRGGDSGYGGRGSFASRDRSSNGWGRERERSRSPERFNRAPPPSSTGSPPRSFHETMMMKHR

SEQ ID NO: 3342 - DNA, 1383 bp, Xanthomonas axonopodis pv. citri str. 306
  CDS (1)..(1383): transl_table=11
atgtcttttgaatccctgggccttgcgcccttcctgttgcgcgcgctggccgagcagggctacgaaacccccaccccgatccagcagcaggcgatcccgctggtcctggccggtcacgacctgctggccggcgcgcagaccggcaccggcaagaccgctgccttcggcctgccgctgttgcagcacctgggcaccgcgccgcagaccgtcaacggcccgcgcaagccgcgcgcgctgatcctgacccccacccgcgaactggccacccaggtgcacgacagcctgcgcggctacagcaagtacctgcgcatccccagcgcggtgatctatggcggcgtgggcatgggcaaccagctcgatgcgctgcgtcgtggcgtggacctgctgatcgcctgcccgggccgcctgatcgaccatatcgaacgtcgcagcgtggacctgtccggcatcgaagtgctgatcctggacgaagccgaccgcatgctcgacatgggcttcttgccctccatcaagcgcatcctgactaagttgccgcgccaggatcgtcaaacgctgctgttctcggcgaccttcgaagagaacatcaagcagctggcgctggagttcatgcgcaacccggtgcagatccaggtcaccccgagcaataccgtggccgagagcatcacccaccgcgtgcacccggtcgacggcgcgcgcaagcgcgatctgctgctgcatctgctggcgcaggacagccgcgagcagaccctggtcttcgcccgtaccaagcacggcagcgacaagctggcgctgttcctggagaagtccggcatcaagaccgcggcgatccacggcaacaaaagccaggggcagcgcatgcgtgcgctgagcgacttcaaggccggccgcgtgaccgtgctggtggccaccgatatcgccgcgcgcgggatcgatatcgatcaactgccgaaggtcatcaactacgatctgccgatggtggccgaggactacgtgcaccgcatcggccgcaccggccgtaatggctcaaccggcgaggcgatttcgctggtggcgcaggacgaagccaagctgctgcgccagatcgtgcgcatgctgggccgcgatgtggaaatccgcgacgtgccgggctacgagccgcagaccccgatccgctggggcaacagcgcgccgggtcgtgccgagcagccgggtggcgatcgcgcgccgcgcaagagccatgcccgtcgtccgcacggcgatgcaccacgtcaggcgcacgcgcatgccggcccgaagaagccgggtggccagcgcagcaacgggccgcgtcaggccaacactggcgcgggtgcaggccggcgcgatggtggtcgtggtggtcagcgtccgagcggtacgcgctga

SEQ ID NO: 3343 - protein, 460 aa, Xanthomonas axonopodis pv. citri str. 306
MSFESLGLAPFLLRALAEQGYETPTPIQQQAIPLVLAGHDLLAGAQTGTGKTAAFGLPLLQHLGTAPQTVNGPRKPRALILTPTRELATQVHDSLRGYSKYLRIPSAVIYGGVGMGNQLDALRRGVDLLIACPGRLIDHIERRSVDLSGIEVLILDEADRMLDMGFLPSIKRILTKLPRQDRQTLLFSATFEENIKQLALEFMRNPVQIQVTPSNTVAESITHRVHPVDGARKRDLLLHLLAQDSREQTLVFARTKHGSDKLALFLEKSGIKTAAIHGNKSQGQRMRALSDFKAGRVTVLVATDIAARGIDIDQLPKVINYDLPMVAEDYVHRIGRTGRNGSTGEAISLVAQDEAKLLRQIVRMLGRDVEIRDVPGYEPQTPIRWGNSAPGRAEQPGGDRAPRKSHARRPHGDAPRQAHAHAGPKKPGGQRSNGPRQANTGAGAGRRDGGRGGQRPSGTR

SEQ ID NO: 3344 - DNA, 1608 bp, Shewanella oneidensis MR-1
  CDS (1)..(1608): transl_table=11
atgagtttttccgccttaggtttatccgcaccacttcaaaaagctgtgtccgaacagggctatgacacgccatctccaatccaagctcaggctattccagctgtgctaacgggcaaagacgtcatggcagcggcccaaactgggacaggaaaaactgcaggttttacgctgccattactggaattactcgctaaaggccacaaagccaagtcaggacaaacccgcgccttagtcttaacacctacgagggaactggcggcacaagttggcgaaagtgttgaaacctatggtaaatatctaccgctgcgttccgctgtagtatttggtggtgtacccatcaacccacaaatcaataaattacgccatggtgttgatgtgctagttgccacacctgggcgactattagatcttgtgcagcaaaatgcggtgaagtttaatcaactcgaaatcttagtgctcgacgaagcggaccgtatgttggatatgggctttatccgcgatatcaaaaagatccttgcactcttgcccgcaaagcgacaaaacctgatgttttctgccaccttctccgatgagatccgtgagcttgcaaaaggattagttaatcatccggttgagatttccgtcacgccgcgcaatgcagctgcaaccacggttaagcaatggatttgtcccgtcgataaaacgcaaaaatcagccttgctgatccaactcatcaagcaggaaaactggcagcaagtgttagtgttttcacgcaccaaacatggcgcgaatcggctcgctaagagccttatccaagccgagatcagtgctgctgcaatccacggtaataaaagccaaggtgcccgtactaaagccctcgccgactttaaaagcggtgaagttcgcgtattggttgcgaccgatattgccgctcgcggtttagatatcgatcaattaccacaggtcgtaaacttcgatttacctaacgtgcctgaagattatgtgcatcgcattggccgtacagggcgtgctggcgccacaggccaagccgtttccttagtcagcagcgaagaaattaaactgcttaaagatattgagcgattaattaatcgcgtgctcgagcgccaagaagttgaaggttttagccctgtacatgcattgccagagacaacactcaatccccaaggcaaagataccaaagttaaagccgtggcaaatcatcgtaagcaccgcagcgcaggaaaacctgcaccacggtctggttctggccgtgatacgcaaggcaatcgagaaaacagccagaggcagaacagcgcatcatctcgcaacagcaatgaacataataataccgaggcagcagttgcgcgctcgccaaaaccaaaaagtaagcatcctcagcgcgatggcggcaccgctaacagtgcaacggcggggaacaatgctaaagcgaaaccgcattcaggtgcacagcaacgtagccatgcagaacgaagcgaaaaatcaaacaatgatggacgccgccaagagcaacccaaaggccgcaatccgcaaagtgcaaaacctgcttcgaatcagccgaaacagcactcacatcgcgccgataaccgcccgaatagtgtcaagccttaa

SEQ ID NO: 3345 - protein, 535 aa, Shewanella oneidensis MR-1
MSFSALGLSAPLQKAVSEQGYDTPSPIQAQAIPAVLTGKDVMAAAQTGTGKTAGFTLPLLELLAKGHKAKSGQTRALVLTPTRELAAQVGESVETYGKYLPLRSAVVFGGVPINPQINKLRHGVDVLVATPGRLLDLVQQNAVKFNQLEILVLDEADRMLDMGFIRDIKKILALLPAKRQNLMFSATFSDEIRELAKGLVNHPVEISVTPRNAAATTVKQWICPVDKTQKSALLIQLIKQENWQQVLVFSRTKHGANRLAKSLIQAEISAAAIHGNKSQGARTKALADFKSGEVRVLVATDIAARGLDIDQLPQVVNFDLPNVPEDYVHRIGRTGRAGATGQAVSLVSSEEIKLLKDIERLINRVLERQEVEGFSPVHALPETTLNPQGKDTKVKAVANHRKHRSAGKPAPRSGSGRDTQGNRENSQRQNSASSRNSNEHNNTEAAVARSPKPKSKHPQRDGGTANSATAGNNAKAKPHSGAQQRSHAERSEKSNNDGRRQEQPKGRNPQSAKPASNQPKQHSHRADNRPNSVKP

SEQ ID NO: 3346 - DNA, 1737 bp, Drosophila melanogaster
  CDS (1)..(1737)
atgatgatgatggcaccacacgatcgcgactttggtcacagtggacgtggcggtcgcggaggcgatcgaggcggcgatgatcggcgaggaggcggcggcggaggcaatcgcttcggtggcggcggtggcggtggcgattaccacggcataaggaatggacgcgtcgagaagcgacgcgatgaccgcggaggcggcaaccgatttggaggtggtggtggattcggggatcgccgaggaggaggtggcggcggcagccaagacctccccatgcgtccggtcgacttctccaacctggctcccttcaagaagaacttttaccaggagcaccctaacgtagcaaaccgatcgccctacgaagttcagaggtatcgcgaagagcaggagatcaccgtgcgcggacaggtgccgaaccccatccaggacttctccgaggtccatctgcccgactacgtcatgaaggagatccgccgacagggctacaaggcccccaccgctatccaagcgcagggctggcctatcgccatgagtggctcgaacttcgtcggcattgccaagacgggatccggaaagaccctgggctacatcctgcccgctattgtccacatcaacaaccagcagccgctgcagaggggcgacggacctatcgccctcgtgctggcccccactcgggagctggcccaacagatccagcaggtggccaccgaattcggttcctcgtcgtatgttcgcaacacctgcgtcttcggcggcgccccgaagggcggccaaatgcgggatctgcagcgcggctgcgagatcgtcattgccacacccggacgtcttattgatttcctctccgccggctctactaacctgaagcgttgcacctacttggtgctggacgaggccgatcgcatgttagacatgggcttcgagccccagatcagaaagatcgtctcacagatccggcccgaccgacagacgctcatgtggagcgctacctggcccaaggaggtcaagcagcttgccgaggactttttgggcaactacatccagatcaacattggatcgctggagctgtccgccaatcacaacatccgccaggtggtggacgtttgtgacgagttcagcaaggaggagaaattgaagaccctcctgtcagacatctacgacaccagcgagagccccggcaagattatcatattcgtggagacaaagcgacgcgtggacaacctggtgcgcttcatccgcagcttcggagtccgttgtggagctattcacggtgacaagtcgcaatcagaacgagactttgtgctccgtgagttccgctcgggcaagtccaacattctggtggccaccgatgtggcggcccgtggactagacgtggacggcatcaagtatgtcatcaactttgactacccgcaaaacagcgaggactacatccatcgcatcggtcgcacaggacgatccaacacaaagggcacctctttcgccttcttcaccaagaacaatgccaagcaagccaaggcgctggtcgacgtactccgagaagctaatcaggaaatcaatcctgccctggaaaatctggcccgcaactcgcgctacgacggtggcggcggacgctcccgttatggaggcggtggcggcggcggtcgcttcggcggcggcggcttcaagaagggcagcctgagcaacggacgaggcttcggaggaggcggcggcggcggcggcgaaggcagacactcgcgcttcgactag

SEQ ID NO: 3347 - protein, 578 aa, Drosophila melanogaster
MMMMAPHDRDFGHSGRGGRGGDRGGDDRRGGGGGGNRFGGGGGGGDYHGIRNGRVEKRRDDRGGGNRFGGGGGFGDRRGGGGGGSQDLPMRPVDFSNLAPFKKNFYQEHPNVANRSPYEVQRYREEQEITVRGQVPNPIQDFSEVHLPDYVMKEIRRQGYKAPTAIQAQGWPIAMSGSNFVGIAKTGSGKTLGYILPAIVHINNQQPLQRGDGPIALVLAPTRELAQQIQQVATEFGSSSYVRNTCVFGGAPKGGQMRDLQRGCEIVIATPGRLIDFLSAGSTNLKRCTYLVLDEADRMLDMGFEPQIRKIVSQIRPDRQTLMWSATWPKEVKQLAEDFLGNYIQINIGSLELSANHNIRQVVDVCDEFSKEEKLKTLLSDIYDTSESPGKIIIFVETKRRVDNLVRFIRSFGVRCGAIHGDKSQSERDFVLREFRSGKSNILVATDVAARGLDVDGIKYVINFDYPQNSEDYIHRIGRTGRSNTKGTSFAFFTKNNAKQAKALVDVLREANQEINPALENLARNSRYDGGGGRSRYGGGGGGGRFGGGGFKKGSLSNGRGFGGGGGGGGEGRHSRFD

SEQ ID NO: 3348 - DNA, 1593 bp, Bradyrhizobium japonicum USDA 110
  CDS (1)..(1593): transl_table=11
atgcgccgggcgcccgcttttgacatggaaagaacccatcttttgacttcgtttcaggacttcggcctcgccgaaccgatcgctcgtgctctctccgaagagaattacgtcacccccacccccatccaggcccagaccattcccacggcgttgaccggccgcgacgtcgtcggcatcgcccagaccggcaccggcaagaccgcgtccttcgcactgccgatcctgcatcgcctgctcgagcaccgcatcaagccgcagccgaagacgacccgcgtcctggttctgtcgcccacccgcgagctgtccggccagatcctcgacagcttcaacgcctatggccgccacatccgcctgtcctcgacgctcgccatcggcggcgtgccgatgggccgccaggtccgctcgctgatgcagggcgtcgaagtgctggtcgccacccccggccgcctgctcgacctcgtgcagagcaacgggctgaagcttggcagcgtcgaattcctcgtgctcgacgaggccgaccgcatgctcgacatgggcttcatcaacgacatccggaagatcgtcgccaaactgccgatcaagcggcagacgctgttcttctcggccaccatgcccaaggacattgccgagctcgccgactccatgctgcgtgatccggcccgtgtcgcggtgaccccggtctcctcgaccgccgagcgcatcaaccagcgtatcctccaggtcgacttctcggccaagcccgccttcctgaccaagctcctgaaggacgagccgatcaaccgcgcactggtcttcacccgtaccaagcacggcgccgacaaggtcgtgaagacgctcgagaaggccggcattgccgccagcgccatccacggcaacaagtcgcagaaccatcgcgagcgcacgctcgcccagttccgctccggcgacatccgcacgctggtcgccaccgacatcgccgcccgtggcatcgatgtcgacggcatcacccacgtcatcaatttcgacctgcccaacgtgcccgagacttacgtccaccgcatcggccgcaccgcgcgcgccggcgctgagggcaccgcgatctcgctggtcgcaggcggcgaggagctcagctatctccgcgacatcgagcggctgatcaaggtggcgctgccgcgcgaagacctccgcaccgatgccggccgccgcgatgcgggtccgcccccgtcgcagcaacgacagggccggccgggccgcccgggccagcgtccgcaaggcgcaaggcatggtgagcgccacggtgacggacggcgtaccgacgaaaggcacggcgacggacgccaccacagcgccggcaagcagggtgatggacggcccggtgaaggccggcatggcgacgcgcgccacgtcgacggaaggcccggcagcggcccgaaggcctcaaaggggtctcgtcgccgccgctccggcggcaagatgcactcttcgcaaaccgaccgccctgaacagcgttccgcgcatagcgctgggacgcctgatgggatacaaggcgttgcctttttgcgccgggacagtcggccgatgggccaaccaactcgcaaaccctattcgcactag

SEQ ID NO: 3349 - protein, 530 aa, Bradyrhizobium japonicum USDA 110
MRRAPAFDMERTHLLTSFQDFGLAEPIARALSEENYVTPTPIQAQTIPTALTGRDVVGIAQTGTGKTASFALPILHRLLEHRIKPQPKTTRVLVLSPTRELSGQILDSFNAYGRHIRLSSTLAIGGVPMGRQVRSLMQGVEVLVATPGRLLDLVQSNGLKLGSVEFLVLDEADRMLDMGFINDIRKIVAKLPIKRQTLFFSATMPKDIAELADSMLRDPARVAVTPVSSTAERINQRILQVDFSAKPAFLTKLLKDEPINRALVFTRTKHGADKVVKTLEKAGIAASAIHGNKSQNHRERTLAQFRSGDIRTLVATDIAARGIDVDGITHVINFDLPNVPETYVHRIGRTARAGAEGTAISLVAGGEELSYLRDIERLIKVALPREDLRTDAGRRDAGPPPSQQRQGRPGRPGQRPQGARHGERHGDGRRTDERHGDGRHHSAGKQGDGRPGEGRHGDARHVDGRPGSGPKASKGSRRRRSGGKMHSSQTDRPEQRSAHSAGTPDGIQGVAFLRRDSRPMGQPTRKPYSH

SEQ ID NO: 3350 - DNA, 1569 bp, Vibrio parahaemolyticus RIMD 2210633
  CDS (1)..(1569): transl_table=11
atgggttttacctcgttaggtctatctgctccaatccttaaagctattcaagagaaaggctacgacaccccttcgccaattcaggcaaaagcaattcctgctattttggaagggaaagacgtaatggcagcagcgcagactggtacaggtaaaactgcaggctttacgctaccgattcttgagcgtttatcgaatggccctcgcgttcgtgctaaccaagttcgtgcacttatcctgacgccaacgcgtgaacttgcggctcaggtgcaagaaaacgtgtttatgtacggccgtcatcttccactaagcagtgcggttgtttttggtggtgtaaagatcaacccgcaaatgctgcgtcttcgcaaaggtgcagatgtgttggttgcgacaccaggccgcctgatggatttgtacaaccaaaatgcggtgaagttcgaccaactagaagttctggtgctggatgaagcagaccgcatgctggatatgggctttatccgtgacattcgtaagatcctagcactactaccaaaacaacgtcagaacctactgttctcggcgactttctcggatgaaatccgcgatcttgcgaaaggcttggtgaacaacccggttgagatttcagtgaacccggcaaactcgacggcgagaacggttgagcaaagcatctacccagcagacgtgaagaagaaagcaccgatgttggttaaattgatcaaagacggcgattggaagcaagtgctggtgtttacgaaaacgaaacacggagcaaaccgtctggcgaagttcttgatcgaacaaaatctacctgctgctgccatccacggtaacaagagccaaggcgcgcgtaccaaagcactggcggattttaaatcgggtgaaattcgtgtgttggtcgcgacggacattgctgcacgcggtatcgatattcctcaattaccgcaagtggtgaactttgagctacctaaagtggcagaagactacgttcaccgtattggtcgtactggccgtgcgggcgaagtaggtaaagcgatttcactggtgtgtgcgctagaagcatctgagttgtttgcgattgaacgtttgattcaagaagtactaccacgcaaagagttggaaggttttgcgccaaccaatgtggtgccagaatctaaactggatactcgcccaatcaaaccgaaaaaacctaagaagccgaaaaaaccaaaagcgccaaatgcttcgagtgaaaacgctccagcaaccgaaaagaaagcaggcaatggtgcaaacaaacctaaacgtcgcttcaacggcggtaacaacggcaacaaaaacagcaccaaccaaggcggtgcgggtaagcctaaaggtaaccgtgaaggccaaggtcgtgcacacagcaaaccagatgaccgtaaacctaacggcaacaagccaaatggcaataaaccgaatggaaataaaccaaacggtaataagagtggcaacgctggtaaaccgtctggtaaccgcaagccaaacaatgctaagcctgcaggaaacaaaccatcaggtcaacgccgtaagcctcgtccgcaagctgcaaactaa

SEQ ID NO: 3351 - protein, 522 aa, Vibrio parahaemolyticus RIMD 2210633
MGFTSLGLSAPILKAIQEKGYDTPSPIQAKAIPAILEGKDVMAAAQTGTGKTAGFTLPILERLSNGPRVRANQVRALILTPTRELAAQVQENVFMYGRHLPLSSAVVFGGVKINPQMLRLRKGADVLVATPGRLMDLYNQNAVKFDQLEVLVLDEADRMLDMGFIRDIRKILALLPKQRQNLLFSATFSDEIRDLAKGLVNNPVEISVNPANSTARTVEQSIYPADVKKKAPMLVKLIKDGDWKQVLVFTKTKHGANRLAKFLIEQNLPAAAIHGNKSQGARTKALADFKSGEIRVLVATDIAARGIDIPQLPQVVNFELPKVAEDYVHRIGRTGRAGEVGKAISLVCALEASELFAIERLIQEVLPRKELEGFAPTNVVPESKLDTRPIKPKKPKKPKKPKAPNASSENAPATEKKAGNGANKPKRRFNGGNNGNKNSTNQGGAGKPKGNREGQGRAHSKPDDRKPNGNKPNGNKPNGNKPNGNKSGNAGKPSGNRKPNNAKPAGNKPSGQRRKPRPQAAN

SEQ ID NO: 3352 - DNA, 1497 bp, Nitrosomonas europaea ATCC 19718
  CDS (1)..(1497): transl_table=11
atgagtaatgatgtgacgtttgcccaactgggcttgtccagtgaaattctccatgcagttaatgatgaagggtatgtgaatcccactccgatccaggcccaggtcattccttcgattctggctggtaaggatgtgatggccagtgcgcaaacaggtaccggtaagacagccggctttacattgccgctgctgtaccgtctgcaagcatacgccaatacgagtgtgtctcctgcccggcatcctgttcgtgccctgatcatggcaccgactcgtgaactggcgatgcagatcgacgaaagtgtcaggaaatatggaaaatatcttgccctgagaacggctgtcgtttttggtggtatcaatatcgagccccaaatcgcagcgctgcaggccggggtggagatactggtggctactcccggtcgcctgttggatctggtcgaacaaaaagcagtcaatttttccaaaaccgaaattctggtactagatgaagctgatcgtatgttggatatgggttttttgccggacatcaagcgggtgatggcgctgttatctccacaacggcaaagcctgatgttttctgcaacattctccggtgaaatcaggaaacttgccgacagcctgctgaagcagccggtccgaatcgaagcagcggtacaaaatacagtgaatgaatctatttcacatgtcattcactgggtaaagccagatagcaaatttgccttgctgctacacctcatccgacagcagaatctgaaacaggcacttattttcgtcaaaacgaaacatggtgcttcccatctggcgcagatgctttcccgccacgaaatctcggcggttgccattcacggcgacagaaatcagcagcagcgtacacaggcgctcgctgaattcaagcatggtgacgtgcaaatactggttgctaccgatgtcgccgcgcgcggtatcgacattgaaaagctgtcacatgtcatcaattatgaattacctggtaacccggaagattatgtccatcggatcggacgtaccggccgggccggtagtaaaggaaaggctatttctctggttagcgaacatgaaaaagaactgctggccaatatcgaaaaactgctgaacgccaaactggaaacagaacagattgccggttttgatgcggaacagtttgctcgcagcctgccagatcggaaaaaccggatgtcggccggtaactcccgctacggcaataagccgatggaaaatgggagtgagaaaagcagaagtgagaaacacaggaaactgccatcatcccagaaatactccggttctcgccgagggggaacgcaaaaatacagcgaccccatctttacccagccttacgtgccacaggctaattcgacacagtcgacaacgcccaagcagccagaaatccaatctctgttcctgacatacaggcaggaaaaaaagaccattccggcgttgtttacggccttgtcgaaaagtaaagctggccaggagaactga

SEQ ID NO: 3353 - protein, 498 aa, Nitrosomonas europaea ATCC 19718
MSNDVTFAQLGLSSEILHAVNDEGYVNPTPIQAQVIPSILAGKDVMASAQTGTGKTAGFTLPLLYRLQAYANTSVSPARHPVRALIMAPTRELAMQIDESVRKYGKYLALRTAVVFGGINIEPQIAALQAGVEILVATPGRLLDLVEQKAVNFSKTEILVLDEADRMLDMGFLPDIKRVMALLSPQRQSLMFSATFSGEIRKLADSLLKQPVRIEAAVQNTVNESISHVIHWVKPDSKFALLLHLIRQQNLKQALIFVKTKHGASHLAQMLSRHEISAVAIHGDRNQQQRTQALAEFKHGDVQILVATDVAARGIDIEKLSHVINYELPGNPEDYVHRIGRTGRAGSKGKAISLVSEHEKELLANIEKLLNAKLETEQIAGFDAEQFARSLPDRKNRMSAGNSRYGNKPMENGSEKSRSEKHRKLPSSQKYSGSRRGGTQKYSDPIFTQPYVPQANSTQSTTPKQPEIQSLFLTYRQEKKTIPALFTALSKSKAGQEN

SEQ ID NO: 3354 - DNA, 1419 bp, Chromobacterium violaceum ATCC 12472
  CDS (1)..(1419): transl_table=11
atgtccgatcttaccttcgccgacctcggcctggccgacccgctgctgcgcgcggtcgccgacaccggttataccacgccgacccctatccaggcccaggccatcccgcaagtgctgcaaggcggcgatctgctggccgccgcccagaccggcaccggcaagaccgccggcttcacgctgcccttgctgcagctgctgatgtgctcgcccagccatcacgccggccgtccgcgcgcgctggtgctgacccccacccgagaactggccgcccaggtggaagagtcggtgcgcacttacagcaaatacctgccgttgaagtcgctggtgatgttcggcggcgtcaacatcaatccccagatcaaggcgctgcgcgcgccggtggatatcctggtggcgacgccgggccgcctgctggaccatgtcggccaaaagaccgtcgacctgtccggcgtggaaatcctggtgctggacgaggccgaccgcatgctggacatgggcttcatccacgacatcaagaaggtgctggccaagctgccggcccagcgtcagaacctgctgttctccgccaccttctccgacgagatcaaggcgttggccgacaagctgctggacaaccccaagctggtggaggtggcgcgccgcaacaccaccaacgaactggtgagccaaaaggtacacctagttgaccgcgacaagaagaccgagctgttgatccatctcatccgcgagcagaattggttccaggtgctggtgttcacccgcaccaagcacggcgccaaccgcctggcggagaagctggacaagatcggcatcccggccgcggccatccacggcaacaagagccagaacgcgcgcacccgcgcgctggccgacttcaagagcggcgaattgcaggtactggtggccaccgacatcgccgcgcgcggcctggacatcgaccagctgccgcacgtggtcaatttcgagctgcccaacgtgccggaagactacgtgcaccgcatcggccgcaccggccgcgccggcagcccgggcgaagcgttgtcgctggtgtgcgtcgacgagttcagcttcctgcgcgacatcgagaagctgatcaagatgtcgatcgagcgcttcaccgtgccgggcttcgaggccgacctcaacgtcaagccggagccgattccgatgggcggcggcgcgcgcggccgcggacaaggccagggacgcggcggccagggacaaggccagcgccacggccaggggcagggccagccgcgcaacgcgccggccaagccgcgccaccagaccgaaagcaagccggccggccatggccgcaacggcggtccgcgccaggggcagggcgccggccagggcggccgcgccgccaagccggcggcggccaagtccgcgctgttcagtccgccgaaaaaccgctga

SEQ ID NO: 3355 - protein, 472 aa, Chromobacterium violaceum ATCC 12472
MSDLTFADLGLADPLLRAVADTGYTTPTPIQAQAIPQVLQGGDLLAAAQTGTGKTAGFTLPLLQLLMCSPSHHAGRPRALVLTPTRELAAQVEESVRTYSKYLPLKSLVMFGGVNINPQIKALRAPVDILVATPGRLLDHVGQKTVDLSGVEILVLDEADRMLDMGFIHDIKKVLAKLPAQRQNLLFSATFSDEIKALADKLLDNPKLVEVARRNTTNELVSQKVHLVDRDKKTELLIHLIREQNWFQVLVFTRTKHGANRLAEKLDKIGIPAAAIHGNKSQNARTRALADFKSGELQVLVATDIAARGLDIDQLPHVVNFELPNVPEDYVHRIGRTGRAGSPGEALSLVCVDEFSFLRDIEKLIKMSIERFTVPGFEADLNVKPEPIPMGGGARGRGQGQGRGGQGQGQRHGQGQGQPRNAPAKPRHQTESKPAGHGRNGGPRQGQGAGQGGRAAKPAAAKSALFSPPKNR

SEQ ID NO: 3356 - DNA, 2307 bp, Strongylocentrotus purpuratus
  CDS (1)..(2307)
atgtcagaagactggggggcctcttcggtgtcgggtggatccagctttggaaagagtagttttggtggatcaagtggtggggtcaaagacgatggatttggcgttggagtcggtcgaggtcgaggaaggggtcgcgggttcagcccctttgcttcaaacggtggtgtcggtggtatgaccaatgggactaccaatggaggaggagagagtagcggcgggtgggatgagagcccatctaagagtggctcaagtagcagtccatggggcggtgatggtgataatgggttcggcaagagtagctttggtagcaaatcgttcggtggaagaggaggaggtggtggtgggggccgaggtgctgaatcaggaggaggacgaggaggaggaggattcggcggcagacgtgagggtggtggtggtggtggtgggggtgcatgttacaagtgccaagaagaagggcacatggccagagattgccccaatggagattcctcaggaggaggacgtggaggtggagatagatcctgttataactgcggtgaaacaggtcacatgtcaagagaatgtcccacaaaggactcgtcaggaggaggacgtggtggtggtggtggcgatagaagttgctacaattgcggcgagaccggacacatgtcacgagaatgtcccacaaaagactcttcgggtggaggaggtggaggtggtggaaagtgctttagatgtcaagaagaaggccactttgccaaggaatgccccaatccagatacaagaaatgaaggcgaaggtggtgaagccaagccgccagcatccacctacgttcctcccgacccatctgaggaagaatcacagatttacataagcactgaacaaggaatcaacttcaacaagtatgatgatatacccgtagaagtcagcggtcgagacaggcccaaaaatatacgagcttttgaggaggccgagctagatgagacagtcttgtccaacgtgcgcaaggctcactatgctaagccaacacctgtgcagaagtatggtatgcccatcatttcttgtggacgtgatctgatggcctgtgctcaaacaggatctggaaagacggcggcattcctcctacccatcatcaccaacatgatcacccacggaggatgcatcagcaccttcaacgtgatccaggaaccactggccctcatcgtctcgccaacccgcgagctggccatccagatctacaacgaggcacgcaagttctgccgcggcaccaccatacgacctgtggtggtgtatggaggcaccagcgtcagtcatcagatgagagagtgtcagaagggatgctccatcctggtagccacccccggacgtatgcatgacttcgtaacccgaggatatatcggcctgggcaagctgaagttcctgatccttgacgaagccgaccgtatgttggacatgggtttcggtcccgacatccagagactgatagagcaccctcacatgcctgccaagggtgatcgtcagaccctgatgttcagtgcgaccttccccaacgaggtccaggagaaggcaggggagtacctcaacgactacctcttcctgacggtagggagggtaggaggagctgcctctgatatcgagcagagggtgttctcggtcgggcagttcgacaagcgggataagctgatggagatcctgagggatcagaaagatgatgaccgtactctggtgtttgtttcgacaaagaggaatgctgatttcttggcctctctactcagtcaatctgaattccccaccaccagcatccatggtgaccgtcagcagcaggagcgtgaagaagccctgcgtgacttcaagaccggcaaggcaccaatcctcgttgccacgtccgttgccgccagaggtctggacatcccaggggtcaagcacgtggtcaactacgaccttccaagcgacatcgatgagtacgtgcatcgcatcgggcgtaccggacgtgtaggaaaccttggacgatcaactagcttctatgatgcagaaaaggatgctaacatcgcgagagctctcataaaaatcttggctgatgtaagtctttttaaagaacaccaatcacctactcaacaagtcgttcttaaggagaagaagtatggacgaggaggggaggagaagaagtatggacgaggagggggaggagaagagttcggtggtcgaggaggaggaaggggaggaggaagtgccgttggtggtggagacgagtggggatctggaggaggaggccctggcggcggcggcggcggcggaggaggagctgctgatgatgaatcatgggattag

SEQ ID NO: 3357 - protein, 768 aa, Strongylocentrotus purpuratus
MSEDWGASSVSGGSSFGKSSFGGSSGGVKDDGFGVGVGRGRGRGRGFSPFASNGGVGGMTNGTTNGGGESSGGWDESPSKSGSSSSPWGGDGDNGFGKSSFGSKSFGGRGGGGGGGRGAESGGGRGGGGFGGRREGGGGGGGGACYKCQEEGHMARDCPNGDSSGGGRGGGDRSCYNCGETGHMSRECPTKDSSGGGRGGGGGDRSCYNCGETGHMSRECPTKDSSGGGGGGGGKCFRCQEEGHFAKECPNPDTRNEGEGGEAKPPASTYVPPDPSEEESQIYISTEQGINFNKYDDIPVEVSGRDRPKNIRAFEEAELDETVLSNVRKAHYAKPTPVQKYGMPIISCGRDLMACAQTGSGKTAAFLLPIITNMITHGGCISTFNVIQEPLALIVSPTRELAIQIYNEARKFCRGTTIRPVVVYGGTSVSHQMRECQKGCSILVATPGRMHDFVTRGYIGLGKLKFLILDEADRMLDMGFGPDIQRLIEHPHMPAKGDRQTLMFSATFPNEVQEKAGEYLNDYLFLTVGRVGGAASDIEQRVFSVGQFDKRDKLMEILRDQKDDDRTLVFVSTKRNADFLASLLSQSEFPTTSIHGDRQQQEREEALRDFKTGKAPILVATSVAARGLDIPGVKHVVNYDLPSDIDEYVHRIGRTGRVGNLGRSTSFYDAEKDANIARALIKILADVSLFKEHQSPTQQVVLKEKKYGRGGEEKKYGRGGGGEEFGGRGGGRGGGSAVGGGDEWGSGGGGPGGGGGGGGGAADDESWD

SEQ ID NO: 3358 - DNA, 2199 bp, Nasonia vitripennis
  CDS (1)..(2199)
atgggcgatgaagattgggatgatggtccatcagcacccaccagtgcaccagtaaatgaacattttggtactggctttggttttggtcgtggcttcaagcctccaagccaacataaatttgatgaccatagtcgcactagcagtggcgttggtactctaaacgacagctgggacgacattaggaaacctggtagtcaagggaggtttggaagtgacaacagttttggaaagagtcgtggctttggggataataacttcaatcaaaagtttggaagttccagaggctctggcaatgatggcggtgattttggagattccagaatctatggagatgatgatcagaatgacaaaggctttggatctcgaggcttcggcgacgacgacgacaatggaaatagtagcggtttcagcggaggaggtgataggcgtggaggtcgaggaggtggtcgcggccgtggtcgcggcagcggtggctacaaccgagaccgtgataacgatgacggaggctatggggaaaggcgtggacgaggtggtagaggaggaggccgaggtcgcggacgaggcggtggcggtggcttcaacagagaccgtgacaatgataatggaggaggcttcagagacgacaatggaggtggcggccgtggaagaggtcgcggtggtggacgcggcggacgaggtggcaatcgcgatagagatgatggtggctatggtgatcgcaacagagacagagacggtgacggtgatggtgatcaaccggaaaaaccacgcgaagtctacattccggcagaacggccaaatgacgatgagtcactatttggaagtggtgtgagggctggaatcaacttcagcaagtacgacagtatagaagtgaagacaagtggcgaggatgtcccgccgcctatcagttctttcgatgaagctaacttacgtgttcttcttaataccaatattaagaagtccggctacactaagccaactcctgtgcagaagtacggtatcccgattcttttaagtggtcgcgacttgatggcctgcgcccagacgggctctggcaagactgctgcattcctcataccgataatccacacattgctggcgaaagatcgagatctttcagatatgtcctcggccaatcaggtcgaaccgagggctcttattatttcgcctacaagagagttgacgatacaaattttcgacgaagcaagaaagttttcgaaagattcagtactcaaatgccacattatttatggaggtacgagcaccagccatcagatgaagcagattttccaaggagtcgacatattagttgcaacgccaggaaggctactggatttagttggaaaggggaaaattacgttcgacgctatcgagttcgtcgtgcttgacgaagctgacaggatgctcgatatgggtttccttccagatgttgagaaggtactacgccacgatacaatgaaaccacccggagaacgtcaaaccttaatgttttcggccacgtttccccaagaaattcaacaactagctgcaaagtttttgaacaactatgtctttgtaaccgttggaatagtaggcagcgcctgcacagacatcgagcaaagtttcttcgaggtgaaaaaatcggataaacgcacgaaactcaaggaacttctgaatgaagagatcgaacagaacatgcttaatggtattctcgttttcgtatccgaaaagaaaacggctgatttcatcgctgcattgctatcggaggacaattttccgacaacgagcattcacggcgacaggttgcagagagagcgtgaggaggctctctacgattttaagactggtaagatggccattttagtggctacagctgtcgctgctcgaggtttggatatcaaaaatgttcgacacgtaattaactacgatctgccaaaggagatcgatgaatacattcaccggatcggaaggaccggacgcgtaggcaacaagggcaaagctactagcttctttgacccgaggtatgatgagaaactccagggtgatttagtcagggtcctgacccaggctggtcaggaagtaccagactggttagcaagcggtgcaggagaaagcaattatgatggaccgtcagactttggtggacaggatattagaaactttgacaatgcacatacttctggaggtggaacgaaacctgttgaagaagatgatgaatggtaa

SEQ ID NO: 3359 - protein, 732 aa, Nasonia vitripennis
MGDEDWDDGPSAPTSAPVNEHFGTGFGFGRGFKPPSQHKFDDHSRTSSGVGTLNDSWDDIRKPGSQGRFGSDNSFGKSRGFGDNNFNQKFGSSRGSGNDGGDFGDSRIYGDDDQNDKGFGSRGFGDDDDNGNSSGFSGGGDRRGGRGGGRGRGRGSGGYNRDRDNDDGGYGERRGRGGRGGGRGRGRGGGGGFNRDRDNDNGGGFRDDNGGGGRGRGRGGGRGGRGGNRDRDDGGYGDRNRDRDGDGDGDQPEKPREVYIPAERPNDDESLFGSGVRAGINFSKYDSIEVKTSGEDVPPPISSFDEANLRVLLNTNIKKSGYTKPTPVQKYGIPILLSGRDLMACAQTGSGKTAAFLIPIIHTLLAKDRDLSDMSSANQVEPRALIISPTRELTIQIFDEARKFSKDSVLKCHIIYGGTSTSHQMKQIFQGVDILVATPGRLLDLVGKGKITFDAIEFVVLDEADRMLDMGFLPDVEKVLRHDTMKPPGERQTLMFSATFPQEIQQLAAKFLNNYVFVTVGIVGSACTDIEQSFFEVKKSDKRTKLKELLNEEIEQNMLNGILVFVSEKKTADFIAALLSEDNFPTTSIHGDRLQREREEALYDFKTGKMAILVATAVAARGLDIKNVRHVINYDLPKEIDEYIHRIGRTGRVGNKGKATSFFDPRYDEKLQGDLVRVLTQAGQEVPDWLASGAGESNYDGPSDFGGQDIRNFDNAHTSGGGTKPVEEDDEW

SEQ ID NO: 3360 - DNA, 2127 bp, Nasonia vitripennis
  CDS (1)..(2127)
atgagtaatgcagacaaccagaatggatcaggtctagagcagcaattagctggtctggacttgcaggactcccgccaatcgagtgggggtcgctacgttccgccgcaccttcgaaacaagtctgcaacgagtaatcgcgttgtcgacgaaccagactcgttttcagatagtccgcagggcggcgatcgtccacctctctcatcccagggaggccgtttcggggatcggggtggcgatcgtgaccgtggccgcggcttaggaggtggtggtggtggtcctggtggcggcggtggctacggccggcgcaacgacgccgactttggcaacttcggcggacgcaatcggcgccaggagaatggccgtgactatcgctacgagcgcgatgccccgcggtctggcggcaacgacaggtggcaggaacagccgcgcggcaacgaccgctggcaggacaacggcaggaatgaccgcatgggaggtggaggcggtggaagatggaacgacgatgatagaaggggtggcggcggcggcggtaaacagattgactggaccataccgaccgcaagagacgaaagatgtgagcttgagttgttcggcgagagaagcacaggcatcaacttcagcaaatatgaggatatcccagttgaggcatccggtgaagatattccaccgcacatctcatcctttgacgaggttaagctgacggagataatcaagaacagcattaacctggctggctacgacaagcctactcctgtgcagaaatacgctataccgatcatcattggtcgtcgcgacgtgatggcttgcgcccagactggctcgggcaaaacggccgcttttctcgtaccgattttgaatcaaatttacgagagcggaccgccacccttacccccaaatgccagtggtcgtcgcaagcagtatccgctgggtctggtgctggcgcccacccgcgagctcgctacgcaaatctacgatgaggcgcgcaagttcgcctacagatcgcgtatgcgtccggccgtagtctacggaggatccaatatggtcgagcagttgcgtgaactcgatcgtggatgtcatttgttagttgccacgcctggtcgtctcgtagacatgctgggcagaggcaaaattggtctgcacaattgccgttacttagtactagatgaggctgatcggatgcttgacatgggtttcgagcctcaaattcgacgcatcgtcgagcaggacactatgcctcccactggagaaagacaaactcttatgttctctgctaccttccccaaagagattcaaatgttggccagagatttcttaagcaactacattttcttggccgttggcagagtcggttcgacctcggagaatatcacccagaaaatcgtctgggtagaggagcatgagaaacgatcgtatcttctagacttgcttggagcttgtaacttccaagagccaactcaggaatcattgacattggtgttcgtggagaccaagaagggagctgacatgctggaagagttcctgcataatcagcattacccggtaacaagtatccacggagatcgttctcaacacgaacgtgaggatgcgctacgtcgcttccgctctggtcatactccgattttagtggccactgccgttgcagctcgtggtcttgatattccccatgtgaagcacgttattaactttgatcttcctggagacgtagaagaatacgttcatcgtattggtcgtaccggccgtatgggaaatcttggtttggcaacatccttctttaactcaaagaatcagaatttggtgcgcgatttagtatcattgctcgttgaggctaatcaagaattgccgcactggctagaagatatgtgctctgattctcggcatggtggaggtgccagccggcgaccagctgccaagggtcgcttcagtggtggtggatttggcgccagagattaccgtcaatctagcggtggtggtggaccacccagtcgtagcagcggacctcccggtagacccggcggttatggagggggttatggaggtggcggtggctatggtggcaactacaactcttcgtacaattccagtaacaatagtggtggtggtagtgatcaagactggtgggcgtcatga

SEQ ID NO: 3361 - protein, 708 aa, Nasonia vitripennis
MSNADNQNGSGLEQQLAGLDLQDSRQSSGGRYVPPHLRNKSATSNRVVDEPDSFSDSPQGGDRPPLSSQGGRFGDRGGDRDRGRGLGGGGGGPGGGGGYGRRNDADFGNFGGRNRRQENGRDYRYERDAPRSGGNDRWQEQPRGNDRWQDNGRNDRMGGGGGGRWNDDDRRGGGGGGKQIDWTIPTARDERCELELFGERSTGINFSKYEDIPVEASGEDIPPHISSFDEVKLTEIIKNSINLAGYDKPTPVQKYAIPIIIGRRDVMACAQTGSGKTAAFLVPILNQIYESGPPPLPPNASGRRKQYPLGLVLAPTRELATQIYDEARKFAYRSRMRPAVVYGGSNMVEQLRELDRGCHLLVATPGRLVDMLGRGKIGLHNCRYLVLDEADRMLDMGFEPQIRRIVEQDTMPPTGERQTLMFSATFPKEIQMLARDFLSNYIFLAVGRVGSTSENITQKIVWVEEHEKRSYLLDLLGACNFQEPTQESLTLVFVETKKGADMLEEFLHNQHYPVTSIHGDRSQHEREDALRRFRSGHTPILVATAVAARGLDIPHVKHVINFDLPGDVEEYVHRIGRTGRMGNLGLATSFFNSKNQNLVRDLVSLLVEANQELPHWLEDMCSDSRHGGGASRRPAAKGRFSGGGFGARDYRQSSGGGGPPSRSSGPPGRPGGYGGGYGGGGGYGGNYNSSYNSSNNSGGGSDQDWWAS

SEQ ID NO: 3362 - DNA, 1917 bp, Aedes aegypti
  CDS (1)..(1917)
atgtgcgatgaatgggaggataatgatgcaaccggaaaatctttcggccagtcaaactacggcggcggagacgatgcgcaggacagtggtttcgcggaaaatcgtcgaggcggaggcggctttcgaggtcgcggtggacgtggtggccgcggaggacgaggtggacgaggaggcggccgtagcgatttcggcggtggcgacaatgatggagaatatcagaacggatacagtcgcggtggaggtggcggctatgggggggatgatgacgctaatggccacgagaacggatttggcggcggagatcgtggcggattccgtggacgtggccgcggtggtcgtggaggtcgtggtggacgaggcggcggtcgcagcgacttcggcggaggcgacaacgaaggagaaaacggattcggtcgtggtggcggagggggaggcttccgttcacgcaacgatgacgaaaacaatgagaacggcacggatgaccaggtgaaaacggagaagccacgagaactgtacattccacctgcgcccaccgaaaacgaggacgaaatgttcggctcgggtatcagttctggtatcaactttgacaagttcgatgaaatcaaagtaaacgtaacgggagagaaccctcctagcccaatcaagtcgttcggcgattcgggtctacgagattatttgctgcagaacattcgcaaatcgcattacacgaaacctactccgattcaaaagtatgctattcccatcatcatggacaagcgagatttaatggcctgtgcccagaccggttctggtaaaacggccgcgtttctgctacctatgatcaacacgctgctgaatgataacgctgatatggtccctggaaatccattcgtagtcatcattgctccaacacgagaattggcgctacagattttcaacgaagcccgcaagtttgcgcttggaaccgttctcaaggtttgcgttgcctacggaggaaccgctacccgtcatcagatggacaacattcaaaatgggtgccacattcttgtcgccacgcccggtcgtctgttggacttcgtcgataagcaagcagtaacgtttgaacgggtaaaattcgtggtgctcgatgaagcggatcgcatgcttgacatgggtttcatgccatcggttgaaaagatgatgaaccatgaaacgatgcggcctaaagaggaacgacaaacgttgatgttctctgccacgttccccgccgaaattcaagaattagctggtcaatttctgaacaattacatcttcgtcgcggtgggaattgtcggaggtgccagcacggatgtggagcagacgatccaccaggtgtccaagttccagaaacgtaaaaagttggaggaactgttggaagctgacgatccaaccggaacattggtgttcgttgagaccaagcgtaatgctgattacctggcgtcgcttctgtcggaaactaaatttccaacaacatccattcacggagatcgattgcagcgtgaacgagaggaagccttgcgagatttcaaatctggaaaaatgttcatcctgattgccacatcggttgctgcacgagggctggacattaagaatgtggcccatgtagttaattatgatctgcccaaaagcatagatgactatgtgcatcgcattggaagaactggccgtgttggcaacaaaggcaaggccacgagcttttacgatatggaagcagatgccgcaattgcgccagatttggtcaagatcttaacgcaagcgggccaacaggtgcccgatttcctagagggtctttccacaggtggaggttcgttcggtggaggaagtcagtttggcggacgagatatccgttctcgggatactggcggatcgcgcgtcgacgcgcagcccaaacagatggaaccagaagaagactgggattaa

SEQ ID NO: 3363 - protein, 638 aa, Aedes aegypti
MCDEWEDNDATGKSFGQSNYGGGDDAQDSGFAENRRGGGGFRGRGGRGGRGGRGGRGGGRSDFGGGDNDGEYQNGYSRGGGGGYGGDDDANGHENGFGGGDRGGFRGRGRGGRGGRGGRGGGRSDFGGGDNEGENGFGRGGGGGGFRSRNDDENNENGTDDQVKTEKPRELYIPPAPTENEDEMFGSGISSGINFDKFDEIKVNVTGENPPSPIKSFGDSGLRDYLLQNIRKSHYTKPTPIQKYAIPIIMDKRDLMACAQTGSGKTAAFLLPMINTLLNDNADMVPGNPFVVIIAPTRELALQIFNEARKFALGTVLKVCVAYGGTATRHQMDNIQNGCHILVATPGRLLDFVDKQAVTFERVKFVVLDEADRMLDMGFMPSVEKMMNHETMRPKEERQTLMFSATFPAEIQELAGQFLNNYIFVAVGIVGGASTDVEQTIHQVSKFQKRKKLEELLEADDPTGTLVFVETKRNADYLASLLSETKFPTTSIHGDRLQREREEALRDFKSGKMFILIATSVAARGLDIKNVAHVVNYDLPKSIDDYVHRIGRTGRVGNKGKATSFYDMEADAAIAPDLVKILTQAGQQVPDFLEGLSTGGGSFGGGSQFGGRDIRSRDTGGSRVDAQPKQMEPEEDWD

SEQ ID NO: 3364 - DNA, 1542 bp, Chlamydomonas reinhardtii
  CDS (1)..(1542)
atgtcgcactactcaagccacggaaggggggatgaccggtggggaggaggaggctcgtcttatggcggaggcggaggcagctcgcgatgggacagtggaggtcacggcggtggaggcggaggcggaggctttaacactcgcggaggtcgcgatgacctcgatcgtatggcgttaccccgccccgactttacgaacctgccaaagttcgagaaatgtttctacctggagcacccagccgttagcgggcggacacctgaggaggtggagcagtaccggcgcgaaaaacagattcacgtctacggggatggcgtgccgaagccggtgaagacgtttgaggaggcatctttccctgagtacgtgctggaggaggtgctgcgggcgggcttcaaggagccaacgcccatccagtgccagggctggccgatggccctgctgggccgcgacctcatcggcctggcggagaccggcagtggcaagacgctggcgtacctgctgccggccgtggtgcacatcaacgcgcagccctacctacagtccggcgatggccccatcgtgctggtgctggcgcccacgcgcgagctggcggttcagatccagcaggagtgccagcgcttcggcgcctccagccgcatcaagaacaccgtcgtgtacggcggtgcgcccaagggcccccaggcgcgcgacctgcgcggcggcgtggagatcgtcattgccacgccgggccgccttatcgacatgctggacagccgcatcaccaacctgcggcgtgtgacatacctggtgctggacgaggcggaccgcatgctggacatgggctttgagccgcagatccgcaagattgtggaccagatccggcccgaccgccagacgctgctgtggtcggcgacgtggcctaaggaggtgcaggccattgcgcgcgacttcctcaaggacccctaccaggtgatcatcggctcgcccgacctcaaggccaaccacaacatccggcaggtggtggagatggtggagggcttcgccaagtacccgcgcctgcgcaagctgctggacggcgagatggacggcaggcgtatcctcatcttcgtggagacaaagcgcggctgcgacgagctggtgcggcagctgcgcacggacggctatccggcgcttggtctgcacggcgacaagagccagcaggagcgcgactgggtgctgcaggagttcaagaacggcacgcaccccatcatgctcgccacggacgtggccgcacgtggactagacgtcaaggacatcaaggtggtggtgaactacgacatgcccaagacggccgaggactacgtgcaccgcatcggccgcacggggcgcgctggcgccactggcactgcctactccttcttcaccaacggcgacgcgcgcctggcgcggcaggtggtggacgtgatgcaggaggctggtcagcagccgccgccggagctgatgcagatgatgtcgttcggcggcggaggcggaggcggtgagtggggggggctggttcggcgcaggttgtgctgcgcattggctgcataa

SEQ ID NO: 3365 - protein, 513 aa, Chlamydomonas reinhardtii
MSHYSSHGRGDDRWGGGGSSYGGGGGSSRWDSGGHGGGGGGGGFNTRGGRDDLDRMALPRPDFTNLPKFEKCFYLEHPAVSGRTPEEVEQYRREKQIHVYGDGVPKPVKTFEEASFPEYVLEEVLRAGFKEPTPIQCQGWPMALLGRDLIGLAETGSGKTLAYLLPAVVHINAQPYLQSGDGPIVLVLAPTRELAVQIQQECQRFGASSRIKNTVVYGGAPKGPQARDLRGGVEIVIATPGRLIDMLDSRITNLRRVTYLVLDEADRMLDMGFEPQIRKIVDQIRPDRQTLLWSATWPKEVQAIARDFLKDPYQVIIGSPDLKANHNIRQVVEMVEGFAKYPRLRKLLDGEMDGRRILIFVETKRGCDELVRQLRTDGYPALGLHGDKSQQERDWVLQEFKNGTHPIMLATDVAARGLDVKDIKVVVNYDMPKTAEDYVHRIGRTGRAGATGTAYSFFTNGDARLARQVVDVMQEAGQQPPPELMQMMSFGGGGGGGEWGGLVRRRLCCALAA

SEQ ID NO: 3366 - DNA, 1224 bp, Chlamydomonas reinhardtii
  CDS (1)..(1224)
atgctgcacgccacgcgcaacttcgtggcgcccagccccatccaggcgcagtgctggcccatcatcctggcgggccgcgacctcatcggcatcgcggccaccggtagtggcaagaccctggggtttgggctgcccatgcttcgccacattgcggcgcagcgtgaggcgggcgtggtgaccggcaaggggccgtttgcggtggtgatggcgcccacccgcgagctggcgctgcagatcaacgaggtgctggaggaggcgggcagcaaatgcggcgtgcgcacggtgtgcgtgtacggcggcgtgcccaagcatccccagattcaggcgctgaggtccggggtggaggtggtggtgggcaccccaggccgcatggaggacctactcaacgacggagcgctcaagctgaaccagatcacgtacgcggtgctggacgaggcggaccgcatgctggacctgggctttgagccgcacatccgcgccatcatgaacctaacccgcgccgaccgccagacgctcatgttcagcgccacgtggcccaccgcggtgcagaagctggcggtggccttcctgtcgcacccagtcaaggtgaccatcggcagccaggacctggccgccagccactccattacgcagcacgtggaggtcattgagccgcacgcgcgcgacgggcggctgctggacctgctgcagcagtaccacggcgccaaggggcgcaagaaccgcgtgatcatctttgtgctgtacaagaaggaggcgccgcgcgtggagcagctgctcacacggaaaggctggaaggcgggggctatccacggtgacatcagccaacaacaacgcacggacgctgtggagaagttcaaatcgggggccgtaccgctgctcattgccacggacgtggcggcacgcggcctggacatccccgacgtcgaggtggtgatcaactactcgttccctctgaccacggaggactatgtgcaccgcatcggccgcacagggcgggcgggcaagacgggagttgcatacacgttcttctgcgccggccctgacaagccgcgcgccggcgagctgatcaacgtgctgcgcgaggcgggccaggaggtgcccgcagacctgctcaagttcggcacggctgtgaagaagaaggagtccaagatgtacggcgcgcatttccgtgatgtggacgtgcacgctaaggccaccaaggtcacgtttgacgacgacgagtag

SEQ ID NO: 3367 - protein, 407 aa, Chlamydomonas reinhardtii
MLHATRNFVAPSPIQAQCWPIILAGRDLIGIAATGSGKTLGFGLPMLRHIAAQREAGVVTGKGPFAVVMAPTRELALQINEVLEEAGSKCGVRTVCVYGGVPKHPQIQALRSGVEVVVGTPGRMEDLLNDGALKLNQITYAVLDEADRMLDLGFEPHIRAIMNLTRADRQTLMFSATWPTAVQKLAVAFLSHPVKVTIGSQDLAASHSITQHVEVIEPHARDGRLLDLLQQYHGAKGRKNRVIIFVLYKKEAPRVEQLLTRKGWKAGAIHGDISQQQRTDAVEKFKSGAVPLLIATDVAARGLDIPDVEVVINYSFPLTTEDYVHRIGRTGRAGKTGVAYTFFCAGPDKPRAGELINVLREAGQEVPADLLKFGTAVKKKESKMYGAHFRDVDVHAKATKVTFDDDE

SEQ ID NO: 3368 - DNA, 1914 bp, Chlamydomonas reinhardtii
  CDS (1)..(1914)
atgagaggtgaggcttcagagcagagagcagcgacaggcggtaatggagatgccgcccggccagtcaagcggtatcggcgggacgagctcgacaaggaagaagagaacccgatgctgctttcggaggacggtgacgatgaggggcaggagtatgtgccactgcgcaagcggagggaggcggaggagtcccggctggtcgcgctgctgcggggtgggcggcgggcgggcagcgcggagcctgacaacggcgggcgggccggcagtgagccgcctggcgaccggcccaaggagtcgctgctggtcatcacagccaggaacctgaagcagacgggtgcgcccacggaagcccaggctgcgctgcaagaggaggaggacattatgcggcacgcgctgcagaagcaggcgctcaaggcggtcaaggagctggccacgggtgtggagtacactcattccatcgggacgggctggaagccgccgctgcgctaccgccgcattcctcaggacctgcagcaacagctgcgggacttgctgcgcatcgtgtgcgatggccgcagtatcccaccgcccatccccagcttcgcggacatgaagctgcctcctgcggtgctgcgggtgctggccagcaagggcatcaagaagcccacgcagatccagatgcaaggcctgccggtggcgctcagcggccgcgacatgatcggcatcgcgtccaccggaagcggcaagacgctggtgttcacgctgcccatgatcctcatcgcgctgcaggaggagatgcgcatgccgcttggccagaacgagggccccatcggcatggtcatctgcccctcccgcgagctggccacacagacgtacgagatcgccgacatgtactgccaggcgctgaacgcggaccgctacccggaggtgcgggtgatgctgtgcatcggcggcatcgaccccaagcccatgtacgagacgctgcggcgggggctgcacgccgtggtggccacacccggccgcctcaaggacctgctgcacaagaagcgcatgaacctggacatctgccgctacctgtgtctggacgaggcagaccgcatggtggaccaggtgggctttgaggacgacgtgcgcgacattctgtcctttttcagggggcagcggcagacactcatgttcagcgcgaccatgcccgccaagatcaaggcgtttgcggagagtgcgctggtggacccagtggaggtcaacgtgggccgagcaggtgccgccaacatggacgtgatccaggaggtggagtacgtcaaggaggaagccaagctgccgtatctgttggagtgcctgcagaagaccgcccctccggtgctggtgtttgcggagaataagcgcgacgtggacatcatccacgagtatctgctggtgcagggtgtggaggccgtggcggtgcacggcgacaaggcgcaggaggaccgccacgccgctatcgcctccttcaagaagggcgacgccgatgtgctggtggccacagacgtggcgtccaagggtctggacttcccggacatccagcacgtgatcaactacgacatgcccgaggagattgagaactacgtgcatcgcatcggtcgcacgggtcgttgcggcaagacgggtgtggccaccaccttcataaacaccaagcagtgcagtgagaccatcctgctggatctcaagcacttgctcaaggaggccaagcagcgtgtgcctcacttcctgctggcgctggatgaccctctggaggcacaggcggagctggaggagaagagtggcatcaagggctgcagctactgcggtggcctgggtcaccgtgtcaccaactgccccaagctcaagtccgaggacaaggccaagtcacgcgccaacaaggactactttggcagcggcggcttcggaggagagatctaa

SEQ ID NO: 3369 - protein, 637 aa, Chlamydomonas reinhardtii
MRGEASEQRAATGGNGDAARPVKRYRRDELDKEEENPMLLSEDGDDEGQEYVPLRKRREAEESRLVALLRGGRRAGSAEPDNGGRAGSEPPGDRPKESLLVITARNLKQTGAPTEAQAALQEEEDIMRHALQKQALKAVKELATGVEYTHSIGTGWKPPLRYRRIPQDLQQQLRDLLRIVCDGRSIPPPIPSFADMKLPPAVLRVLASKGIKKPTQIQMQGLPVALSGRDMIGIASTGSGKTLVFTLPMILIALQEEMRMPLGQNEGPIGMVICPSRELATQTYEIADMYCQALNADRYPEVRVMLCIGGIDPKPMYETLRRGLHAVVATPGRLKDLLHKKRMNLDICRYLCLDEADRMVDQVGFEDDVRDILSFFRGQRQTLMFSATMPAKIKAFAESALVDPVEVNVGRAGAANMDVIQEVEYVKEEAKLPYLLECLQKTAPPVLVFAENKRDVDIIHEYLLVQGVEAVAVHGDKAQEDRHAAIASFKKGDADVLVATDVASKGLDFPDIQHVINYDMPEEIENYVHRIGRTGRCGKTGVATTFINTKQCSETILLDLKHLLKEAKQRVPHFLLALDDPLEAQAELEEKSGIKGCSYCGGLGHRVTNCPKLKSEDKAKSRANKDYFGSGGFGGEI

SEQ ID NO: 3370 - DNA, 2593 bp, Physcomitrella patens subsp. patens
  CDS (218)..(2245)
gctattcagtgtctgttgctccgcatcacgttccgttttttcacgactcattcgccggccaattttaacgccatctgtcccttacatcagcttagtttctctttatcagggacttgagggagaaagaagccgtcgttgcggactttcttagagtgggtgaatttggaatttggagcgtgcccgtgaagtgtagtagtttccgtgtcgccttgtgacgatggtcggcgctgctgtttcggcggctcctcgatatgctcctgctgatccgacactaccgcccccatggacagcgttggtggatggaaacacggggtatatctactactggaaccctgacacaaatattacacagtatgataggcctttgcctttggtaggatccgggcgccctttaccctctggtcctcctccttcgtcggttatatctggaacaaagttggctgcaattcctagcgggaaagatcaacctaacggggtgtcgggatctgctcctcctgtgggaatgggattatctggaggtcagaaacatggtgcgggcgtttatgatgatgccgatcgtgatggttattacaagcgtccaagagtagaggcctatgcaaatgtccccacttcagatatcgattcttacagaaagcttcacgaagtgtctgccttgggagaaaatgtccctgctccttttctgtcatttgaagcagttggacttccaccggacatgctcagagagatacaagcggctggttttaaatcccccacgccaattcaagctcaatcttggccaatagccatgcaaaaccgggatattgttgcaattgcgaagaccggatctggtaaaactttgggttatttgataccagcctttcttcatctcgaacgtcatcggaataattcaagacttggaccaagtgttctcgtgatagctcctactcgtgaattagctacacagattcaagaggaatgcgtgaagtttggaagatcctcaaggattacaagcacgtgtgtttatggaggcgcccccaaaggtcctcagttgcgagacatcgagcggggagctgatatcgtaatagctactccagggcgtttgaatgactttttggaagtaaagaaaatcagtcttcggcaagtgtcttatctcgtattagacgaagcagatcgtatgcttgatatggggtttgagcctcaaattcgaaaaattgtgaacgagattctgtcacgacggcagactctcatgtatactgctacgtggccgaaagaagtacgcaagattgcaggggatttacttatcaaccctgtccaggtcaacattgggaacacagatgagctttctgcgaacaaatctattactcagcatgtggaagtggttgtgccctatgagaagcagcgtcgactagaacaaatattacgttcacaagagcctggctctaagattatcgtattttgttctaccaagcgcatgtgtgacatgctctcacgcaatttaggccgtgactttggcgcagccgcaatccacggagacaaatcgcaaagtgaacgggattttgttctgtcccaatttaggacgggaagaactcctatccttgttgcgactgacgtggctgcccgagggcttgacattaaagacatcaggtttgtcgtgaattatgatttccctacgggagttgaagactacgttcaccggattggacggacaggtcgagctggtgcaaccgggcttgcatatacattcttttctgaacaggatgggaaatatgcgaaggaacttattaaagtacttgaaggagctaaccagaaggtgcctcaagaactgaaggacatagcgagtaggggtggagggatgttcaaaagtcgcacgggcaatcgttggggtggtgactctggtaaagggggaagggatggtggacgaagcagctatggaggagggcgtggcgattttggtggaagaggtggtttttatggtggtggccgggatgggggcaggtttgatagccgggatcgctatggtgaccgtctgccagaccgtagtcatgaccgatacgtcgcaccgggcggggctagatatggggagaaggacaaaagcaagaatcgcagccgcagctacagccgaagtcctagtcggtccagggcatacagtcgcagcagaagccgcagctatgagcgctacagtgacagcagaggaagagatcgtagcagatccccagctagtcgtagatcgtattccccggacggagggcggggtggacgacgatagaatagccacgctatatgtaaattcctgagaagctttaggcaacttttctttgttcctgtgatttagagatgatacatgttcttcacgctcccttgttttcctcgaatgacgagagaaaacattgtagtttacttagaaatgctgccattcggtttatgtggcagcagtaggaattcactgcttcccttgccatcttcggaagccatggcataaatttcagagcttctttcactagtggctcgcagttttccggacctcatgccttgtcgccattagcattcatggacttgaatccattcggggttccttcaacagtcttcaaagatataaggtgtatgcaaggagcat

SEQ ID NO: 3371 - protein, 675 aa, Physcomitrella patens subsp. patens
MVGAAVSAAPRYAPADPTLPPPWTALVDGNTGYIYYWNPDTNITQYDRPLPLVGSGRPLPSGPPPSSVISGTKLAAIPSGKDQPNGVSGSAPPVGMGLSGGQKHGAGVYDDADRDGYYKRPRVEAYANVPTSDIDSYRKLHEVSALGENVPAPFLSFEAVGLPPDMLREIQAAGFKSPTPIQAQSWPIAMQNRDIVAIAKTGSGKTLGYLIPAFLHLERHRNNSRLGPSVLVIAPTRELATQIQEECVKFGRSSRITSTCVYGGAPKGPQLRDIERGADIVIATPGRLNDFLEVKKISLRQVSYLVLDEADRMLDMGFEPQIRKIVNEILSRRQTLMYTATWPKEVRKIAGDLLINPVQVNIGNTDELSANKSITQHVEVVVPYEKQRRLEQILRSQEPGSKIIVFCSTKRMCDMLSRNLGRDFGAAAIHGDKSQSERDFVLSQFRTGRTPILVATDVAARGLDIKDIRFVVNYDFPTGVEDYVHRIGRTGRAGATGLAYTFFSEQDGKYAKELIKVLEGANQKVPQELKDIASRGGGMFKSRTGNRWGGDSGKGGRDGGRSSYGGGRGDFGGRGGFYGGGRDGGRFDSRDRYGDRLPDRSHDRYVAPGGARYGEKDKSKNRSRSYSRSPSRSRAYSRSRSRSYERYSDSRGRDRSRSPASRRSYSPDGGRGGRR

SEQ ID NO: 3372 - DNA, 1749 bp, Physcomitrella patens subsp. patens
  CDS (1)..(1749)
atgccctatgtccctccacatctgagggcgggagccgcctcagcaggagcagcaccggcgagcggtggcgcagcacgcagagacggaggaggtcgggactcgtatggcggcagctttggagcgagcgcgggtgccaggaggtcatcgtcggaggtttcgttcggcaacgggggcagcagctacggaaacgggtatgggcaggggagtcgggagagcagcggtgggagcaaggaggggagcggaggagtgcgaggagcggggcatcccgaggtggtgtgggcgacatggcagccttcggagcgcgtgcagaagctgcagccagagcagattgcggaggtgagggccaggctgaatgtggacgtggagattgcgaccggctcggagccggcgccggctcccatcgagtcgttcgaggacatgtgcctgcatttgagcatcatgaaggacgtgacgttccacaattatacgacgccgacgcccatccaggcgcaggctctgccggtggcattgtcggggagggacttgctggggtgcgcggagacggggtcggggaagacggccgcgttctcgctccccatgatccagcattgcctggcgcagcccccgatccgcagaggggacggcccgctggcgctggtgttggcgcccacgagggagctggcgcagcagattgagaaggaggtgaaggcgttctgccggtcggcggaggggttcaggacggcgatcgtggtgggagggaccaacatttacgagcagaggtcggagctgcgggccggcgtggagatagtggtggccacccccggcagattcatcgaccacttgcagcaagggaacagttcgctgtcgagggtgtcgtacgtcgtgctggacgaggcggacaggatgctggacatgggtttcgagcctcagatcagggaggtgatgagaagccttccgaagaagcaccaaacgctactgttcagtgcaaccatgccggaggagatcgaggccttggctcaggagtacctggacaacccgatccgggtgaaggtgggtcgggtgagcagcccgacggcgaacgtgacgcagaacctggagaagatcacggagaaggagaagatcgaaagcttgctggctctgctggtggacgagcactcgcagtcgctggacaccaatcaaccaccgcctttgacgatcgtattcgtggagcggaaggcacgctgcgacgaggtgacggacgctttggtggagcaagggctgaaggcgacggcgctgcatggggggaggagccagagcgagagagaggcagcactgagggatttcaggaagggcaccacgaacattctggtggcgacggatgttgcatcgcgagggttggacgtgacaggtgtggcgcacgtgatcaacttggacctgccgaagaccatggaggattacgttcaccggattgggagaacaggtcgtgcaggggcttcgggacgagcaacgtcgttttacacggagcgagacatgttcctggtagcccaaatccgaagggcaatcacggaggcggaatccgggaacgccatggcgttcgcgacgggcaaagccgcgaggaggaaagagagggagcaagcagcggcgttcagggaggggagggtggctcctttgggagtagcccaaatcggtgcaacgacggttcgtgtggacgacaagtacaagcacatgctttctgccgcggcggatccgaagaagggcgaaggtgcagcagacgacgcatgggaggactag

SEQ ID NO: 3373 - protein, 582 aa, Physcomitrella patens subsp. patens
MPYVPPHLRAGAASAGAAPASGGAARRDGGGRDSYGGSFGASAGARRSSSEVSFGNGGSSYGNGYGQGSRESSGGSKEGSGGVRGAGHPEVVWATWQPSERVQKLQPEQIAEVRARLNVDVEIATGSEPAPAPIESFEDMCLHLSIMKDVTFHNYTTPTPIQAQALPVALSGRDLLGCAETGSGKTAAFSLPMIQHCLAQPPIRRGDGPLALVLAPTRELAQQIEKEVKAFCRSAEGFRTAIVVGGTNIYEQRSELRAGVEIVVATPGRFIDHLQQGNSSLSRVSYVVLDEADRMLDMGFEPQIREVMRSLPKKHQTLLFSATMPEEIEALAQEYLDNPIRVKVGRVSSPTANVTQNLEKITEKEKIESLLALLVDEHSQSLDTNQPPPLTIVFVERKARCDEVTDALVEQGLKATALHGGRSQSEREAALRDFRKGTTNILVATDVASRGLDVTGVAHVINLDLPKTMEDYVHRIGRTGRAGASGRATSFYTERDMFLVAQIRRAITEAESGNAMAFATGKAARRKEREQAAAFREGRVAPLGVAQIGATTVRVDDKYKHMLSAAADPKKGEGAADDAWED

SEQ ID NO: 3374 - DNA, 2055 bp, Physcomitrella patens subsp. patens
  CDS (1)..(2055)
atggttggcgctgctgttgcggcggctcctcgattcgctcctgaagatccaacactgcctgccccatggagagctttggtagatggaaacacggggtacatctattactggaacccggagacgaatatcacgcagtacgacaagccgttgcccctagctgcatctgggcctcctcttccgtctggacctcccccttcatcggcctcgattaattcaaatttatctcttccagccggtggcactgtgactggatctgctggtcctgtaggtatgggtttgtctggagggcaaaaacatggtgcaggtgtttatgacaatactgatcgtgatggttactacaagcgcccaagagtggaagcttacacaaatgctttgacttctgatattgactcctacaggaaactacacgaagtgaccgcactgggagacaatgtccctgcaccttttatgtcatttgaagctgtcggatttccaccagatatgctcagagagcttcaaattgctggattcaaatctcccaccccaattcaagctcaatcttggcccatagcaatgcaaaatcgggatatagtggcgattgcgaagacgggttccgggaagactttgggttatttgattcctgcttttcttcatcttgaacgtcatcgcaacaattcaagactaggacctactgtgctcgtgctagctcctactcgtgaattagctactcagatacaggatgaatgcgttaagttcggaaggtcctcaaggatcacaagcacgtgtgtttatggaggtgcccccaaggttcctcagttgcgagacattgagcgaggagccgacatagtcatagcaactcctgggcggttaaacgactttttggaagtaaaaagagttagtctcagacaggtgtcatatctggtacttgacgaagcagatcgtatgcttgatatggggtttgagcctcaaatacgcaaaattgtgaatgagataccgtcacgaaggcagactctcatgtacactgcgacttggcccaaagaagtcagaaagatagctggagaccttctcatcaatcctgttcaggttaatattggtaacaccgatgagcttgctgccaacaaatccatcactcagaatgtggaggtagttgtgccctacgagaaacagaggcgactagagcagattctacgatcacaagagcctggttccaagattatcatattttgttccaccaagcgcatgtgtgatacgctctctcgaaacttgggtcgtgacttcggcgcagcggctattcacggggataagtctcagagtgaaagagacttcgtcctgtctcaatttagaaccggaagaacacccatccttgttgcaactgacgtcgctgccagaggtcttgacatcaaagatatcagagttgtcgtaaattatgattttccaacgggagtcgaagactatgttcatcgaattgggcgtacaggccgagctggtgccactggtcttgcatacacgttcttctctgaacaggatgggaaatacgccaaggagctcatcaaagttcttgaaggagctaaccagaaagtgcctccagagttgaaggacatcgccagtagaggtggagggatgttcaaaggtcgaatggggaatcgttggggtggtgattccggtggcagaggcggaagagatggtggacgaagcagctatagaggaggccgtggggattttggtgggagaggcagttcttatggaggtgggcgtgacggtggtggccgggatgggggtcgctttgacagtcgggatcgttatggtgatcggctgggagatcgcagtcatgaccggtacgggccacccgatggggttatagcaggagtcccagccggtcgagggcatacagtcgcagcaggagccgcagctacgaccggtacagtgatgacaggggtagagagcgtagtagatccccacccagtcggaggtcatactctcctagcggaggacggggcggaagacgttgaaaataactccaattcgtatgaattgtcgagatgttgtggagagaatttcctgaagactgtattctga

SEQ ID NO: 3375 - protein, 684 aa, Physcomitrella patens subsp. patens
MVGAAVAAAPRFAPEDPTLPAPWRALVDGNTGYIYYWNPETNITQYDKPLPLAASGPPLPSGPPPSSASINSNLSLPAGGTVTGSAGPVGMGLSGGQKHGAGVYDNTDRDGYYKRPRVEAYTNALTSDIDSYRKLHEVTALGDNVPAPFMSFEAVGFPPDMLRELQIAGFKSPTPIQAQSWPIAMQNRDIVAIAKTGSGKTLGYLIPAFLHLERHRNNSRLGPTVLVLAPTRELATQIQDECVKFGRSSRITSTCVYGGAPKVPQLRDIERGADIVIATPGRLNDFLEVKRVSLRQVSYLVLDEADRMLDMGFEPQIRKIVNEIPSRRQTLMYTATWPKEVRKIAGDLLINPVQVNIGNTDELAANKSITQNVEVVVPYEKQRRLEQILRSQEPGSKIIIFCSTKRMCDTLSRNLGRDFGAAAIHGDKSQSERDFVLSQFRTGRTPILVATDVAARGLDIKDIRVVVNYDFPTGVEDYVHRIGRTGRAGATGLAYTFFSEQDGKYAKELIKVLEGANQKVPPELKDIASRGGGMFKGRMGNRWGGDSGGRGGRDGGRSSYRGGRGDFGGRGSSYGGGRDGGGRDGGRFDSRDRYGDRLGDRSHDRYGPPDGVIAGVPAGRGHTVAAGAAATTGTVMTGVESVVDPHPVGGHTLLAEDGAEDVENNSNSYELSRCCGENFLKTVF

SEQ ID NO: 3376 - DNA, 1803 bp, Physcomitrella patens subsp. patens
  CDS (1)..(1803)
atgccatcaacatgggcagagtcgccacccgacacggtggctactgaaaatggaagtgcagcaggagcctcaggtggtcggccagccagagcgtcttatgtgcctcctcacttgcgaaaccgtcctcaagtagcggctgctgcacccaaagcggaagctgggggtctaggcaaggccgggaatgggtccggttggggtgcaagtccggcggtgaatcattcagccagttgggggaactcaaatggttcaggtcggagctatggaggtggcggacgaggccaaagggggggatgggagagagaagctaatcccttcgctaacgacgaaccagtctcggaggcaatctttgaggcagagaatactggtatcaacttcgatgcgtacgaggacattcctgtagagacgagtggtaataacataccacctccggtgaacacattcgccgaaattgacctgggaccggcgctgaacgaaaacatcagaagatgcaagtacacgaagccgactcccgtgcaaaagtacgctataccgattagtttgcatggtcgtgatttgatggcatgtgcacagacggggtcagggaagacggctgcgttttgttttccaattatcgcagggattatgaggaacactcctccaggccgtcctcggggtggaaggaaggcattgccgttggctctgatattgtcgcccacgagggagctgtcttgccagatcagcgacgaagccaagaagtttgcgtatcagaccggcattagagtagtggtcgcttatgggggggctcccgttcataatcagcttagagagatggaaagaggtgtagacatcttagttgccacccctgggcgtttgagtgatctcttggaaagggctagagtatccctgtctatggtgcgatacttggcgctagatgaggctgatcgaatgctggacatgggtttcgaaccccagattcgtagaatagttgagcagatggatatgccaccggctggtgaacgccagacaatgctgttcagtgctacatttcctcgagaaatacagagactagcatcggatttcttgtcgaactacattttccttgctgtgggcagggtaggatccagtacggatctaatcgtgcaacgggtagagtatgtgcaagatgtggacaagcgtagcatgctgatggaccttattcatgctcaaagcgccttggctccgcctgggcagcaaactttgacgttagtctttgtggagactaagaaaggagcagatgctttagaggactggctgtgccgcctcggattcccagctaccacaatccacggtgatcgtagccagcaggagcgagaacatgccttgagatcttttaggacgggagtgacgcccattctcgttgctacggatgttgccgcccggggtcttgatattccacatgttgcccatgtcgtgaatttcgacctccctagtgatattgatgattacgtgcatcgcattggtcgtactgggcgtgcgggaaagagtggtgtggcaactgctttcttcaacgagaaagaccaggcgttagcgcgaccgctgacagagctgatgacagaatctaaccaggaggtgcctggatggttgactaactacgctacgagagctagttatggaggtggtggtaggaacagacggtcgggaggaggatcgagatttggtggccgtgatttccgtagggaaggcggcagaggaggtggagggggccaccaccacgggggatatggtggtggcggtggtggttatggaggtggaggatatggaggtggtagtagtgcatgggattag

SEQ ID NO: 3377 - protein, 600 aa, Physcomitrella patens subsp. patens
MPSTWAESPPDTVATENGSAAGASGGRPARASYVPPHLRNRPQVAAAAPKAEAGGLGKAGNGSGWGASPAVNHSASWGNSNGSGRSYGGGGRGQRGGWEREANPFANDEPVSEAIFEAENTGINFDAYEDIPVETSGNNIPPPVNTFAEIDLGPALNENIRRCKYTKPTPVQKYAIPISLHGRDLMACAQTGSGKTAAFCFPIIAGIMRNTPPGRPRGGRKALPLALILSPTRELSCQISDEAKKFAYQTGIRVVVAYGGAPVHNQLREMERGVDILVATPGRLSDLLERARVSLSMVRYLALDEADRMLDMGFEPQIRRIVEQMDMPPAGERQTMLFSATFPREIQRLASDFLSNYIFLAVGRVGSSTDLIVQRVEYVQDVDKRSMLMDLIHAQSALAPPGQQTLTLVFVETKKGADALEDWLCRLGFPATTIHGDRSQQEREHALRSFRTGVTPILVATDVAARGLDIPHVAHVVNFDLPSDIDDYVHRIGRTGRAGKSGVATAFFNEKDQALARPLTELMTESNQEVPGWLTNYATRASYGGGGRNRRSGGGSRFGGRDFRREGGRGGGGGHHHGGYGGGGGGYGGGGYGGGSSAWD

SEQ ID NO: 3378 - DNA, 1755 bp, Physcomitrella patens subsp. patens
  CDS (1)..(1755)
atgcctttaacatggggagagtcgacttccgaggtggtggtcactgagaatggaattatagcaggagcgaccggtggtcgctctgctagaccatcatacgtgcctcctcatttgcgaggccgtcctcagggtgcttccgcaggaggtggagtgagcaacaacgtggatattgcaccaaaaggagtaaaccatgtggcgagctggggaaattcgagtggttcaggtaggggttatagacatggaggaagaggtcggcgaggaggttgggagagggaggttaaccctttcgcaaatgatgggccagtcgcagagaatatattcgaggcagagaacacgggtatcaattttgacgcgtacgaggatataccggtggagacaagcgggaacaacgtgcctcctccggtgaatacatttgccgaaatagatctcggtgcagcactgaatgaaaacatacggagatgtaagtacaccaagcccacgccggtgcagaggcatgccataccaataagtttgaacggtcgagatctgatggcttgcgcccagacggggagtgggaagaccgcggcattctgtttccctattatcgcggggataatgaggaacactccccctgggcgacctcgtggcggaagaaaggcactgccgttagctcttattctatcgccaactagggagttgacaagccagatcagcgacgaggctaagaaatttgcataccagactggtattagagtagtggtctgttatggtggtgcccctgttcacaatcagcttagggagttggaaagaggtgttgacattcttgtcgcaaccccaggacgtctgagtgaccttttggagagagctagggtttccttgtctatggtacgatatttgacgttggatgaggcggatcggatgttggacatgggttttgaacctcagattcgcagaatagtagagcagatggatatgccaccggctggtgagcgtcaaacaatgctattcagtgccacctttccaagagaaattcagagattggcatcggatttcttgtcgaactacatattccttgctgtaggcagggtgggatctagtacggaactgattgtgcagcgcgtagagtacgttcaagatgcagacaagcgcagtatgcttatggacctgatccatgctcagagcgctttggctcctcctgggcagacatcgttgacgttggtatttgtcgagacaaaaaaaggtgcagatgcattggaagactggctgtgtcgcatgggttttcctgcgacaacaattcatggcgaccgaaaggtgtttccaacgcaggagcgagaacatgctttgagatccttccggacaggagttacgcctattcttgttgcgacggatgtggcagctagagggttggatattccacatgtcgcacatgttgtgaattttgatttaccgaatgacatcgatgactatgtacatcgtattgggcgtacagggcgtgccgggaagagtggtgttgccacggcctttttcaatgagaaggaccagtcattagcaagatctttgacagagctgatgacagagtctagccaagaggtcccaggatggttaacgaactttgccactagagctagttatggaggtaggagcaggcggtctggaggaggttcgaagttcggaggacgtgatttccgtagagaaggtggtcgaggaggtggtggaggccatcacggtggatacaatggtggtggtggttacggaggtagcagcgcttgggactag

SEQ ID NO: 3379 - protein, 584 aa, Physcomitrella patens subsp. patens
MPLTWGESTSEVVVTENGIIAGATGGRSARPSYVPPHLRGRPQGASAGGGVSNNVDIAPKGVNHVASWGNSSGSGRGYRHGGRGRRGGWEREVNPFANDGPVAENIFEAENTGINFDAYEDIPVETSGNNVPPPVNTFAEIDLGAALNENIRRCKYTKPTPVQRHAIPISLNGRDLMACAQTGSGKTAAFCFPIIAGIMRNTPPGRPRGGRKALPLALILSPTRELTSQISDEAKKFAYQTGIRVVVCYGGAPVHNQLRELERGVDILVATPGRLSDLLERARVSLSMVRYLTLDEADRMLDMGFEPQIRRIVEQMDMPPAGERQTMLFSATFPREIQRLASDFLSNYIFLAVGRVGSSTELIVQRVEYVQDADKRSMLMDLIHAQSALAPPGQTSLTLVFVETKKGADALEDWLCRMGFPATTIHGDRKVFPTQEREHALRSFRTGVTPILVATDVAARGLDIPHVAHVVNFDLPNDIDDYVHRIGRTGRAGKSGVATAFFNEKDQSLARSLTELMTESSQEVPGWLTNFATRASYGGRSRRSGGGSKFGGRDFRREGGRGGGGGHHGGYNGGGGYGGSSAWD

SEQ ID NO: 3380 - DNA, 1617 bp, Physcomitrella patens subsp. patens
  CDS (1)..(1617)
atgccctatgtccctccacatctgagggcgggagccgccccagcagcagcagcaccggcttctagcggtggcgcagcagcacgcagagacggaggtcgagactcgtatggcggtagctttggagcgagcgcgggtgccaggagatcagcgtcggagggagaggggagcgcagcgcgcggggtagggcaccccgaggtggtgtggccggactggaagccgtcggagcgcgtgcggaagctgttgcccgagcagattgcagaggtgagggccaggctcaatgtggacgtggagattacgcccgacacagagccggcgccggctcccatcgagtcgtttgaggacatgtgcctgcatttgagcatcatgaaggacgtgacgttccacaattacacaacgccgacgcccatccaggcgcaggctttgccggtggcattgtctgggagggacctgctgggatgcgcagagacggggtcggggaagaccgccgcgttctcgctgcctatgatccagcattgtctggcgcagccgccgattcgcagaggggatggcccgttggcactggtgttagcgcccacgagggagctggcgcagcagattgagaaggaggtgaaggcgttcagccggtcggcggaggggttcaagacgtcgatcgtggtgggagggacgaacatttacgagcagaggtcggagctgcgggccggcgtggagatagtggtggccactcctggtaggttcatcgatcacttgcagcaggggaacagttctctgtcgagggtgtcgtacgtggtgttggacgaggcggacaggatgctggacatgggtttcgagcctcagatcagggaggtgatgagaagccttccgaagaagcaccaaaccctacttttcagcgcgacaatgccggaggagatcgaggctctggcgcaggagtacctgaacaaaccggtgcgggtgaaggtgggaagagtgagcagcccgacggcgaacgtgacgcagaacctggagaagatcacggagaaggagaagatagacagcttgctggctctgctggtggacgagcattcgcagtcgttggattccaatcaaccaccgccactgacgatcgtgttcgtggagcggaaggcacgctgcgacgaggtgacggatgcgttggtggagcaagggctgaaggcgacggcgctgcacggagggaggagccagagcgagagagaggcggcactgagggacttccggaaaggcaccacgaacatcctggtggcgacggatgtggcttcgcgagggttggacgtgacaggtgtggcacacgtgatcaacttggacctgccgaagaccatggaggattacgttcatcggatcgggcgaacgggtcgtgcaggggcctcgggacgagcgacgtccttttacacggagcgagacgtgttccttgttgctcaaatccgaagggcaatcacggaagcggaatccgggaataccatggcagaagggaggatgactcctctgggagtggctcaagttggtgcgacgacagttcgcgtggacgataagtacaagcacatgctttctgctacggcagatccgaagaagggcgaaggggcagcggacgacgcatgggaagactag

SEQ ID NO: 3381 - protein, 538 aa, Physcomitrella patens subsp. patens
MPYVPPHLRAGAAPAAAAPASSGGAAARRDGGRDSYGGSFGASAGARRSASEGEGSAARGVGHPEVVWPDWKPSERVRKLLPEQIAEVRARLNVDVEITPDTEPAPAPIESFEDMCLHLSIMKDVTFHNYTTPTPIQAQALPVALSGRDLLGCAETGSGKTAAFSLPMIQHCLAQPPIRRGDGPLALVLAPTRELAQQIEKEVKAFSRSAEGFKTSIVVGGTNIYEQRSELRAGVEIVVATPGRFIDHLQQGNSSLSRVSYVVLDEADRMLDMGFEPQIREVMRSLPKKHQTLLFSATMPEEIEALAQEYLNKPVRVKVGRVSSPTANVTQNLEKITEKEKIDSLLALLVDEHSQSLDSNQPPPLTIVFVERKARCDEVTDALVEQGLKATALHGGRSQSEREAALRDFRKGTTNILVATDVASRGLDVTGVAHVINLDLPKTMEDYVHRIGRTGRAGASGRATSFYTERDVFLVAQIRRAITEAESGNTMAEGRMTPLGVAQVGATTVRVDDKYKHMLSATADPKKGEGAADDAWED

SEQ ID NO: 3382 - DNA, 1911 bp, Anopheles gambiae str. PEST
  CDS (1)..(1911)
atgagtaatgctattaaccaaaatggtacaggtctagaacagcagtttgctggtctggacttgcagcagaagcagcagcaacttggcggcggcggtggcagcaacccagaatccggaaatcctaagcatccggccgggcggtacgtaccaccgcaattgcgagaatgtgctgatagcggtggcgactttcaacctgctgataccggtgccggcgttggtcctgtaagcggcggcggtatcggtggcggaggtggcagacggggtggatacggcgattcgaaccggaatcgtggcggcggcgacttcgggcgctacggcgatcgtgactatcgcggaggcgacttcaacaggcgtagcggaggcggcggtggcggccgctatcagaacgatcggcgcggcggcgactacggcaactatggccgcggcggtggcgaccggggctacaacaatggcggtggcttccagcgcggcggggacggcgggggctatcagaattctgaaggtttcggaggcgatcggcgggacaacaactgggggtcgtacggtggcgctcgtggtggtccgggtggcggaccggcagccgttggccgtgatcgacccatggacgggccgcctcagaatgatcgctggccggagccgggagcggcaatgggcccgcccggaccgggcagcgtcggcagcggtggcggaaccggccccggtgaagggcccggatacggcggcggtggcggtggatccggacgcggccagatcgactacacagtgctcaccgagcgggacgagccactggcgacgcagatcttcgaggagtcgaagaagttctgctaccggtcgcgcatgcgcccggccgtactgtacggcggcaacaacacgcaggaccagatgcgcgatctcgagcgcggctgccacctgatcgtggcgacgcccggtcggctggaggacatgatcgggcgcggcaaggtcgggctggacaacatccgcttcctggtgctggacgaagccgaccgcatgctggacatgggcttcgagccgcagatccggcgcatcgtcgaggagagccgcatgccggtgacgggcgaacggcagacgctcatgttctccgccaccttcccgaaggcgatccaggagctggcgagcgacttcctgtaccgctacatcttcttggcggtcgggcgcgtcggctcgacctcggtcaacattacgcagacgatcttctgggtggaggaaaacatcaagcgctcgcatctgctcgatctgctgtcgaacatcaccaagcagaacgacggggacgacgagaactgtctgacgctgatctttgtcgagacgaagaaggcggccgactcgctggaggagttcctgtacaaccacaacttcccggtcacgagcatccacggcgatcgtacgcaggcggagcgcgaggaggcgctgcgcctgttccgctgcggccgctgcccgatcctggtcgcgacggccgtggccgcccgcgggctggacattccgaacgtgaagcaggtgatcaacttcgatctgccggccgaggtggaggagtacgtgcaccgcatcggtcgtaccggccgtatgggcaacctcggtaccgccacctccttctttaacgagaagaatcgcaacgtggcgaacgggctggtgcgcctgctggccgagacggggcaggaaattcccggcttcctggaggagatgaccaacagccgtagtttcgggggcaatcgccgcggccgtgtaccgcgcggcggtggtggctcgaccttcggctcacgagattaccgtcagcagaacagtggccgctcgggcggtggctcgcgcgatcatcgcccaatgggcggtggcggtggtggttcccgcggtggttatggcggcggtggtggcggtggcggtggatatggcggtaagtga

SEQ ID NO: 3383 - protein, 636 aa, Anopheles gambiae str. PEST
MSNAINQNGTGLEQQFAGLDLQQKQQQLGGGGGSNPESGNPKHPAGRYVPPQLRECADSGGDFQPADTGAGVGPVSGGGIGGGGGRRGGYGDSNRNRGGGDFGRYGDRDYRGGDFNRRSGGGGGGRYQNDRRGGDYGNYGRGGGDRGYNNGGGFQRGGDGGGYQNSEGFGGDRRDNNWGSYGGARGGPGGGPAAVGRDRPMDGPPQNDRWPEPGAAMGPPGPGSVGSGGGTGPGEGPGYGGGGGGSGRGQIDYTVLTERDEPLATQIFEESKKFCYRSRMRPAVLYGGNNTQDQMRDLERGCHLIVATPGRLEDMIGRGKVGLDNIRFLVLDEADRMLDMGFEPQIRRIVEESRMPVTGERQTLMFSATFPKAIQELASDFLYRYIFLAVGRVGSTSVNITQTIFWVEENIKRSHLLDLLSNITKQNDGDDENCLTLIFVETKKAADSLEEFLYNHNFPVTSIHGDRTQAEREEALRLFRCGRCPILVATAVAARGLDIPNVKQVINFDLPAEVEEYVHRIGRTGRMGNLGTATSFFNEKNRNVANGLVRLLAETGQEIPGFLEEMTNSRSFGGNRRGRVPRGGGGSTFGSRDYRQQNSGRSGGGSRDHRPMGGGGGGSRGGYGGGGGGGGGYGGK

SEQ ID NO: 3384 - DNA, 1791 bp, Unknown
  Unidentified
  CDS (1)..(1791)
atgagcggagacggtgaatgggatgattgtgacgagggacgtagcttcgatcagcccaagtacgatgctaccgaaaatagtgttcaggacaacgatactaacgggttcgacaactatcagtccaacaatggtttcggtgacgagtatcaaagcaacgacaacggtggatatggcggcggtgacgatggatacggcggcggtggtcgtggaggccgtggaggccgaggtggcggacgaggtcgtggtcggggccgtggcgggcgcgatggtggcggtggcttcggtggcggtggctacggtgatcgaaacggcgatggcggccgacctgcctattctggcaacagcgatccaagcatggaccaggtgaagacggacaagccgagggagctgtacattccgccacttccgaccgaggacgaatcgctgatcttcgggtccggcatcagctccgggatcaattttgacaagttcgaggaaatccaggtgcgcgtgtcgggcgaaaatccaccggatcacgtggagagcttcgagcgctccggtttgcgcgaggaggtgatgacgaacgtgcgcaagtcgagctacacgaaaccgacgcccatccagcggtacgccatcccgatcatcctgaacgggcgcgacctgatggcctgcgcccagaccggttcgggcaagacggccgccttcatgctgccgatgatccaccatctgctggacaaggaagactcgctggagctgcgcacgcgcaacccgtacatcgtgatcgtggccccgacccgcgagctcgcgattcaaatccacgacgaggggcgcaagttcgcgcacggcaccaagctgaaggtctgcgtatcgtacggcggcacagccgtacagcaccagctgcagctgatgcgcggtggctgccacgtgctggtggcaacgcccggtcggctgctggacttcatcgaccgggggtacgtgacgtttgagaacgtgaacttcgtggtgctcgacgaagccgatcggatgctggacatgggctttctgccctcgatcgagaaggtgatgggacacgcgacgatgccggaaaagcagcagcggcagacgctcatgttttcggctacgttcccggccgaaatccaggagctggcgggcaagttcctgcacaactacatctgcgtgttcgtgggcatcgtcggcggagcgtgtgccgatgtggagcagacgatccatctggtggaaaagttcaagaagcgcaagaagctggaggagatcctgaacggcggcaatcccaagggtacgctcgtgttcgtggagacgaagcgcaatgcggactatctggcatcgctgatgtccgagacgcagttcccgaccacctccatccatggcgatcggttgcagcgggagcgcgagatggcgctgtacgatttcaagtccgggcggatggacgtgctgatcgcgacgtcggtagcggcccgcgggctggacattaaaaatgtgaaccacgtggtgaactacgatctgccgaagagcatcgatgattacgtgcaccgtatcgggcgaaccgggcgcgtcggtaacaagggccgagcgactagcttctacgacccggaggcggaccgggctatggcgagcgatctggtgaagattctcacccaggccgggcagtcggtgccggactttttgaaggatgctggcggctccggctcgtacatgggatcgtcccagttcggtggcaaggatatccgcgactcgtacggttcgcgtgtcgatgcccagccggttgccctcgagccggaggaagagtgggagtaa

SEQ ID NO: 3385 - protein, 596 aa, Unknown
  Unidentified
MSGDGEWDDCDEGRSFDQPKYDATENSVQDNDTNGFDNYQSNNGFGDEYQSNDNGGYGGGDDGYGGGGRGGRGGRGGGRGRGRGRGGRDGGGGFGGGGYGDRNGDGGRPAYSGNSDPSMDQVKTDKPRELYIPPLPTEDESLIFGSGISSGINFDKFEEIQVRVSGENPPDHVESFERSGLREEVMTNVRKSSYTKPTPIQRYAIPIILNGRDLMACAQTGSGKTAAFMLPMIHHLLDKEDSLELRTRNPYIVIVAPTRELAIQIHDEGRKFAHGTKLKVCVSYGGTAVQHQLQLMRGGCHVLVATPGRLLDFIDRGYVTFENVNFVVLDEADRMLDMGFLPSIEKVMGHATMPEKQQRQTLMFSATFPAEIQELAGKFLHNYICVFVGIVGGACADVEQTIHLVEKFKKRKKLEEILNGGNPKGTLVFVETKRNADYLASLMSETQFPTTSIHGDRLQREREMALYDFKSGRMDVLIATSVAARGLDIKNVNHVVNYDLPKSIDDYVHRIGRTGRVGNKGRATSFYDPEADRAMASDLVKILTQAGQSVPDFLKDAGGSGSYMGSSQFGGKDIRDSYGSRVDAQPVALEPEEEWE

SEQ ID NO: 3386 - DNA, 1938 bp, Magnaporthe grisea 70-15
  CDS (1)..(1938)
atggccgatcaactcaacatggctgggctcagcgtcggtgggggcggccccggaaacggacctcgatcttacatcccgcctcatatgagaggcaaggtcggtggtcctggcatgaacggaccccagaacggaccccagaacggcggcggccccccaggccacgatggacccccatcttcagttaacaacggcttgaacaactctgcttgggctggaaaccagaaccacgatgctcgcggcggaaactggggcaaccagggcggcggccccccgcctcgcaacaacaactggaaccgtccctcgttcaaccccaacgcttatggcggcggcaaccaaggcggcggccatggcggcggtggtggtggcggctatgctagaggctcaggagacggccagtggcgtgatggcaagcacattcccggtcctgtaaacgctcgcgtcgagcgtgagctgttcggcactcccgacgacccgtcgaagcagcacaccggtatcaacttcgagaagtatgatgacatccccgtcgaggcttctggtcacgatgtgcccgagcccgtctacaccttcagcaaccctcctctggatgaccatcttatcagcaacattgagcttgcccgactggttccggaaagactggtggtttcttgttccctattctctcccaggcattcaagactggcccttcgcccatccccgcaacaaaccagggacctggacggttacggtcggcagcgcaaggcttaccctacctctttgatcctggcgcccactcgtgagcttgtttctcagatctacgatgagtctcgcaagtttgcctacaggtcgtgggttcgcccttgcgtcgtgtacggtggtgccgacattggtagccagctccgtcagattgagcgtggttgcgatttgctcgttgccactcccggtcgtcttgtcgatctcatcgagcgtggtcgcatctcgctgtgcaacatcaagtacctggttttggacgaggctgatcgcatgcttgacatgggtttcgagcctcaaattcgccgcattgttgagggcgaggacatgcccaacgtgcaggaccgccagactctcatgttttcagccaccttccctggttacatccagcagcttgcccgcgacttcctcaaggactacattttcctgtcggttggacgtgtcggttccacctccgagaacatcactcagcgcgtcatggaggtcaagcaccgtgatgacaagatctcccacctcttggatctgctcagcacccacggcggcggcctcacccttatcttcgttgagacgaagcgcaacgctgatgagctgtcggacttcttgcagaaccagaacctccctgccacctctatccacggagaccgtactcagcgtgagcgtgagcgtgctctcgagatgttccgcactggccgctgccccattttggtggctactgccgttgctgctcgtggtctcgatattcccaacgttacccacgtcatcaactatgatcttcccaccgatattgatgactacgtccaccgaattggtcgtaccggtcgtgccggcaacaccggtattgctactgctttcttcgacatgaaggataacagcggtgttgctcaggagctgcttaacatcctgaaggaggccaagcaggacattcctcccttcctggagactgctgcccgcatgaagtcgtacggtggcggccgtggccgtggaggtggtggccgtggccgtggcggcggcggcaaccgtgacttccgcaagttcggcggcggcggcggcggcggcttcaacggaggcggcggtggtggcttcagcggtggtggctacggcggcggcggcggtggttacggcggtggtggtggtggctacggcggcggcggctacggcggcggcggcggtggcagctacggaaaccccggcggcggccagtcctggtggtaa

SEQ ID NO: 3387 - protein, 645 aa, Magnaporthe grisea 70-15
MADQLNMAGLSVGGGGPGNGPRSYIPPHMRGKVGGPGMNGPQNGPQNGGGPPGHDGPPSSVNNGLNNSAWAGNQNHDARGGNWGNQGGGPPPRNNNWNRPSFNPNAYGGGNQGGGHGGGGGGGYARGSGDGQWRDGKHIPGPVNARVERELFGTPDDPSKQHTGINFEKYDDIPVEASGHDVPEPVYTFSNPPLDDHLISNIELARLVPERLVVSCSLFSPRHSRLALRPSPQQTRDLDGYGRQRKAYPTSLILAPTRELVSQIYDESRKFAYRSWVRPCVVYGGADIGSQLRQIERGCDLLVATPGRLVDLIERGRISLCNIKYLVLDEADRMLDMGFEPQIRRIVEGEDMPNVQDRQTLMFSATFPGYIQQLARDFLKDYIFLSVGRVGSTSENITQRVMEVKHRDDKISHLLDLLSTHGGGLTLIFVETKRNADELSDFLQNQNLPATSIHGDRTQRERERALEMFRTGRCPILVATAVAARGLDIPNVTHVINYDLPTDIDDYVHRIGRTGRAGNTGIATAFFDMKDNSGVAQELLNILKEAKQDIPPFLETAARMKSYGGGRGRGGGGRGRGGGGNRDFRKFGGGGGGGFNGGGGGGFSGGGYGGGGGGYGGGGGGYGGGGYGGGGGGSYGNPGGGQSWW

SEQ ID NO: 3388 - DNA, 2106 bp, Apis mellifera
  CDS (1)..(2106)
atgagtaatgcagccaaccagaatggatcaggtctagagcagcagttagctggtctggacttgcagggctcccgccaaccaagtgggggtcgctacgtaccaccgcatttacgaaataaatctggaagtaacgcgccttctggcggagatcatcatttttcttccaactcaagaccatattctgatagagatagaggaagggatcgtgatcgcgaaagggaaagggaaagagatcgtgatagaggaagaggtggttcaggttatagagatacgcgctctcgtgatgtcgattttggaaatttcggaaatttcggtgggcgcactagacgtagtgccaatcaagaaaatggaagagattatagatattccaattcagaccgtgagcgagatcgagatcgcacggttaactctggaaatgatcgttggcaagaacctagaaacgatcgctggccagacaacagaaacgatcatagaatggggggcggtcgatggaaggacgacagagaaggaggtaggacgaattctgaaatcgactggacaatacccacttccagagatgagcgattggaggtggaattatttggtactggaaatactggcattaattttagtaaatatgaggatatcccagttgaggctaccggggataacatacctccacacatcacatcttttgacgaagttaagctgacggagataataaagaatagtattagtttggctggttatgataaacccacaccagtacagaagtatgcgataccgattattatcggacgccgtgatgttatggcctgtgcccaaacagggtctggtaaaacagcggcctttttagtgccaatattaaatcagatttatgaaagcgggccacgtccaccaccaattaattcttctggaaagcgcaaacatttccctcttggtctagtattagcacctacaagagagcttgctacgcaaatatatgacgaagcacggaaatttgcatacagatcacgtatgcgtcctgctgttgtctacggtggttcgaacatcgtagatcaaatgcgagaattggatcgtggatgtcatttacttgttgcaacacctggtcgccttgtagatatgttaggtcgtggtaaaatcggattacataattgtcgatatttagtattggacgaagctgatcgtatgttggatatgggtttcgagccacaaataagacgtatagttcaggaggatacaatgcctcccacgggagaaagacaaacgctcatgttttcagctacatttccaaaagaaattcaaatgctggcaagagattttcttagtaactatatctttttagctgtaggccgtgttggttctacgtctgaaaatattactcagaaaattgtatgggtggaggaacatgataagcgttcttatttgcttgatcttcttcaagctagcaatttttcagatccttctgccgaatcattgactctagtattcgtggaaacaaagaaaggtgcggatatgttagaagaatatttacatcaaatgggatatccggtcactagcatccatggtgatcgaacacagcgtgaacgagaagatgctttacgtcgttttcgagctggtaaagcgccaatacttgttgctactgctgttgctgcccgtggacttgatattccacatgttaaacatgtgataaatttcgatttacccggagatgtagaagaatatgttcatcggatcggtcgtacaggtcgtatgggaaatttaggtttagcaacatcatttttcaacaataagaatattaacttagtacgtgacttggtatctctcttagttgaagctaatcaagaacttccaccttggttagacgatatgtttagtgaagcaagatattccggaggtggatctcgtcgtgccggaagtactaaaggccgatttagcggtggatttggtgctagagattatcgtcagcaacctagctccgggtctgctcgcaataatggttcctccaataggcctggtagttatggaggaagttacggaaattatggaggtaactataacaattcatcgtataataattctgctaacaacgtcaacagtaatgatcctgattggtgggacaagtaa

SEQ ID NO: 3389 - protein, 701 aa, Apis mellifera
MSNAANQNGSGLEQQLAGLDLQGSRQPSGGRYVPPHLRNKSGSNAPSGGDHHFSSNSRPYSDRDRGRDRDRERERERDRDRGRGGSGYRDTRSRDVDFGNFGNFGGRTRRSANQENGRDYRYSNSDRERDRDRTVNSGNDRWQEPRNDRWPDNRNDHRMGGGRWKDDREGGRTNSEIDWTIPTSRDERLEVELFGTGNTGINFSKYEDIPVEATGDNIPPHITSFDEVKLTEIIKNSISLAGYDKPTPVQKYAIPIIIGRRDVMACAQTGSGKTAAFLVPILNQIYESGPRPPPINSSGKRKHFPLGLVLAPTRELATQIYDEARKFAYRSRMRPAVVYGGSNIVDQMRELDRGCHLLVATPGRLVDMLGRGKIGLHNCRYLVLDEADRMLDMGFEPQIRRIVQEDTMPPTGERQTLMFSATFPKEIQMLARDFLSNYIFLAVGRVGSTSENITQKIVWVEEHDKRSYLLDLLQASNFSDPSAESLTLVFVETKKGADMLEEYLHQMGYPVTSIHGDRTQREREDALRRFRAGKAPILVATAVAARGLDIPHVKHVINFDLPGDVEEYVHRIGRTGRMGNLGLATSFFNNKNINLVRDLVSLLVEANQELPPWLDDMFSEARYSGGGSRRAGSTKGRFSGGFGARDYRQQPSSGSARNNGSSNRPGSYGGSYGNYGGNYNNSSYNNSANNVNSNDPDWWDK

SEQ ID NO: 3390 - DNA, 1551 bp, Burkholderia vietnamiensis G4
  CDS (1)..(1551): transl_table=11
atgacttcgagcatcaacaccagcccgctcaacgcgatcgccgaccaggcgctcggtctcgacgccgccgcaccggccgcagtcgaaccggcgtcggacgagccgactttcgcgtcgctcgggctgtcgccggagatcgtctccgcgctggaggcagccggctacgccaagccgacgccggtgcagcagcgcgcgattccggccggtatcgccggccgggatctactggtatcgagcccgaccggttcgggcaaaacggccgccttcatgctgcccgcgatcgaacgcttcgcgcagctccagaaatcgcaggcgcagcaaccgcgcgcgccgcgtgaaccgaaccagggcgaccgccgtgcgcgccgcccgcaaccggtcgctcgtccgagcctgctcgtgctgacgccgacccgcgaactcgcgatgcaggtcaccacggccgcgacgacctacggcaagcacctgcgtcgcctgcgcacggtcagcatcctcggcggcgtggcctacggccagcagctgatgctgctcgcgaagaaccccgagatcctcgtcgcgacgccgggccgcctgctcgaccacctcgagcgcggccgcatcgacctgtcggaactgaagatgctcgtgctcgacgaagccgaccgcatgctcgacatgggcttcatcgacgacatcgaaacgatcgtcgccgcgacgcccgcgtcgcgccagacgatgctgttctcggccacgctcgacggcaagatcggttcgctgacgagccgtctgctgaacaacccggagcgcatcgagatcgtcgcgaagatcgagtcgcgcgcgaacatcgcgcaaacggtgcactacgtcgacgaccgcgaccacaaggatcgcctgctcgatcacctgctgcgcgacgacgcgctcgaccaggcgatcatcttcacggcgaccaagatcgacgccgaccagctcgccggccgcctcgccgacgccggcttcgaatcggccgcgctgcacggcgacctgccgcagggcgcgcgcaaccgcacgatccgtgcgctgcgcgagcgtcgcgtgcgcgtgctggtcgcgaccgacgtcgcggcccgcggcatcgacatccccggcatcacgcacgtgttcaactacgacctgccgaagttcgcggaagactacgtgcaccgtatcggccgcaccggccgcgccggtcgttcgggcaccgcggtgagcctcgtgcaccacgcggaacaaggcgcgctcaagcgcatcgagcgcttcgtgcgctcgccgctgccggtcaacgtgatcgaaggcttcgagccgcgcaaggcaccgacccgcacgccgggcagcggcggtcgcggccgtccgggcggcggtaacggcggtcgccgtttcggcggcaagccgggcggcggctacggcagcggcaatggccgtagctacggcggcggcactggtaacggcaacggcggcggctggagcggcaagccgggcggcagccgcgacggcggtccgcgccgcgacggccagcgcagcggcggcccgcgtcgcagcaactcggcgtcgtaa

SEQ ID NO: 3391 - protein, 516 aa, Burkholderia vietnamiensis G4
MTSSINTSPLNAIADQALGLDAAAPAAVEPASDEPTFASLGLSPEIVSALEAAGYAKPTPVQQRAIPAGIAGRDLLVSSPTGSGKTAAFMLPAIERFAQLQKSQAQQPRAPREPNQGDRRARRPQPVARPSLLVLTPTRELAMQVTTAATTYGKHLRRLRTVSILGGVAYGQQLMLLAKNPEILVATPGRLLDHLERGRIDLSELKMLVLDEADRMLDMGFIDDIETIVAATPASRQTMLFSATLDGKIGSLTSRLLNNPERIEIVAKIESRANIAQTVHYVDDRDHKDRLLDHLLRDDALDQAIIFTATKIDADQLAGRLADAGFESAALHGDLPQGARNRTIRALRERRVRVLVATDVAARGIDIPGITHVFNYDLPKFAEDYVHRIGRTGRAGRSGTAVSLVHHAEQGALKRIERFVRSPLPVNVIEGFEPRKAPTRTPGSGGRGRPGGGNGGRRFGGKPGGGYGSGNGRSYGGGTGNGNGGGWSGKPGGSRDGGPRRDGQRSGGPRRSNSAS

SEQ ID NO: 3392 - DNA, 1368 bp, Salmonella enterica subsp. arizonae serovar 62:z4,z23:--
  CDS (1)..(1368): transl_table=11
atgtcttttgattccctgggattaaaccctgatatcctgcgtgccattgccgagcagggttaccgtgaacctacccctattcagcagcaggcgattcccgccgtgctggaaggccgcgatctgatggccagcgcccagaccggaaccggtaaaacggcgggttttaccctgccattgttgcagcatctgattacccatcagccgcacgctaaaggtcgtcgcccggtgcgcgcgttgatcctcacgccaacccgcgagctggcggcgcaaattggcgaaaacgtcagagattacagtaaatatctcaacattcgctcgttggtggtgtttggcggcgtaagcatcaatccgcagatgatgaaactgcgcggcggcgtggatgtgctggtggcgacgccgggacgtctgctggatctggaacatcagaatgcggtgaagctggatcagattgaaatcctcgtgctggacgaagccgaccggatgctggatatgggcttcattcacgacattcgtcgcgtgctggcaaaactgccgccaaaacgccagaatctgctgttctccgctactttctcggacgacatcaaagcgctcgccgaaaagctgctgcataacccgctggaaattgaagtggcgcgccgtaacacggcgtcagaacaggtgacgcaacacgtacactttgtggataaaaaacgcaaacgcgagcttctgtcgctgctgattggccagggtaactggcagcaggtgttggtcttcacccgcaccaagcatggcgcgaaccatctggcggaacagcttaataaagacggtattcgcagcgcagcgatccacggtaataaatcgcagggcgcacgtacccgcgcgctggcggattttaaatccggcgatctccgcgtattggtagcgacagatattgcggcgcgaggtctggatattgaagaactgccgcatgtggtcaactatgaactgccgaacgtgccggaagattatgtacaccgtattggccgtaccgggcgtgcagcggcaactggcgaggcgctgtcgctggtctgtattgacgagcacaagttgttgcgcgatatcgaaaagttgctgaaaaaagagataccgcgcattactacgccgggctatgagccggacccgtcgattaaagcggagccgattcagaatggccgtcagcagcgcggcggcggcggtggcggtcgtggacgcggtcaaagtcaaggcggagcggggcgcagtcagcagccgcgacgtcaggatagcggggcgccgaaggcgaaatcaaaaccgcgcgcaggcgaggggaaacccgctggcgacaaagcgcgtccgccgcgtcgcccgcgcagaatcacgcccgcccagtaa

SEQ ID NO: 3393 - protein, 455 aa, Salmonella enterica subsp. arizonae serovar 62:z4,z23:--
MSFDSLGLNPDILRAIAEQGYREPTPIQQQAIPAVLEGRDLMASAQTGTGKTAGFTLPLLQHLITHQPHAKGRRPVRALILTPTRELAAQIGENVRDYSKYLNIRSLVVFGGVSINPQMMKLRGGVDVLVATPGRLLDLEHQNAVKLDQIEILVLDEADRMLDMGFIHDIRRVLAKLPPKRQNLLFSATFSDDIKALAEKLLHNPLEIEVARRNTASEQVTQHVHFVDKKRKRELLSLLIGQGNWQQVLVFTRTKHGANHLAEQLNKDGIRSAAIHGNKSQGARTRALADFKSGDLRVLVATDIAARGLDIEELPHVVNYELPNVPEDYVHRIGRTGRAAATGEALSLVCIDEHKLLRDIEKLLKKEIPRITTPGYEPDPSIKAEPIQNGRQQRGGGGGGRGRGQSQGGAGRSQQPRRQDSGAPKAKSKPRAGEGKPAGDKARPPRRPRRITPAQ

SEQ ID NO: 3394 - DNA, 1452 bp, Pectobacterium atrosepticum SCRI1043
  CDS (1)..(1452): transl_table=11
atgtcatttgattctctcggcctgagtgccgatattctgcgcgcgattgaagagcagggttatcgcgatcctacccccgttcagcgtcaggcaattcctgtcgtgttggaagggcgcgatttaatggccagtgcccaaacgggtacgggtaaaacggcgggctttacgctgccgttattgcaactgctgacgagtcgcgaagcgcagaataaagggaaagggcgccgtccagtacgggcgctgatcctgacgccgacccgtgaactggcggcacagattgatgagaacgtgaaggcgtatagcaaatatttaccccttcgttcactggttgtattcggcggcgtgagcatcaacccgcagatgatgaagttgcgtggcggcgtggatattctggtggcgacgccgggacgtctgctcgatctggaacatcagcgtgctgttgacctgtctcagatcgaaattctggtgctggatgaagcagaccggatgctggatatgggcttcattcacgatattcgccgtgtactggcgaagctgcctgctaaacgccaaaacctgctgttctccgccactttctctgatgagatcaaagcgctggcgaacaaactgttgaccaatccggcttcggtcgaagtcgtgcgtcgtaattctccgtctgaactggtcacgcagaatgtgcattttgttgataagcgccgcaagcgtgaactgctatcgcagctaattggtgaaaataactggcagcaggtactggtctttacccgtaccaagcacggggctaaccacttggctgagctgttggaaaaagacggtatcaccgctgcggctatccacggtaataaaagtcagggtgcgcgtactcgcgcgctggccaacttcaaggacggcggcatccgtgtgctggtcgcgacagatatcgccgcgcgtggtctggatatcgaccagttgccgcacgttgtgaactatgaactgccgaacgtgccggaagattacgttcaccgtatcggccgtaccggtcgtgcagaagcgacgggcgaagcgctgtcgctggtgtgtgtggatgaacacaagctgctgcgtgacatcgaacgtctgctgaagcgtgagattccgcgtatcgctattgaaggctacgagccggatccgtccatcaaggcagaaccgattgtgaatggccgtcagggcagccgtggtggtggtagtggtggtgcgcgtagtgcgtctcctcgtgcaccgtctggcgcaccacgcggtcagtccgaacgcagcgaacgtagtcaaggtcagggcgagcgccgttcagccgatgctaatcgtcagccgcgtaaaccgagcggtaatagcgatagcccatggggtactggcggaaaagggaatagtggcaagggcagtggcgaaggacaacgccgcgcaccgcgaccgcaaaaccgcagcaagccagcggacaagtaa

SEQ ID NO: 3395 - protein, 483 aa, Pectobacterium atrosepticum SCRI1043
MSFDSLGLSADILRAIEEQGYRDPTPVQRQAIPVVLEGRDLMASAQTGTGKTAGFTLPLLQLLTSREAQNKGKGRRPVRALILTPTRELAAQIDENVKAYSKYLPLRSLVVFGGVSINPQMMKLRGGVDILVATPGRLLDLEHQRAVDLSQIEILVLDEADRMLDMGFIHDIRRVLAKLPAKRQNLLFSATFSDEIKALANKLLTNPASVEVVRRNSPSELVTQNVHFVDKRRKRELLSQLIGENNWQQVLVFTRTKHGANHLAELLEKDGITAAAIHGNKSQGARTRALANFKDGGIRVLVATDIAARGLDIDQLPHVVNYELPNVPEDYVHRIGRTGRAEATGEALSLVCVDEHKLLRDIERLLKREIPRIAIEGYEPDPSIKAEPIVNGRQGSRGGGSGGARSASPRAPSGAPRGQSERSERSQGQGERRSADANRQPRKPSGNSDSPWGTGGKGNSGKGSGEGQRRAPRPQNRSKPADK

SEQ ID NO: 3396 - DNA, 1704 bp, Psychrobacter arcticus 273-4
  CDS (1)..(1704): transl_table=11
atgactgacatcttatctgcaatcgctgctgaaaacggcattatcgaaagcactgacaccccaaacactactgcaaataccgatactaataatgaagcggctacgactgacgctactgacgaaaataaagttacctttactgacctaaatattgccaagccaattcttagcgcgcttgagcgtagtggttatactcacccaacacctattcaagcagaagccattccttttgcattacaaggtcgtgaccttttgttatctgcgcaaacgggtagtggtaaaacagctgcattcgttatcccagtacttgatcgcttgagccgtgcaaccagcttcgacaaattgaccaaagctcttattctaacgccaacgcgtgaacttgctcagcaagtacatgatagcgtacgtacgtattctaaagatatgcgtggtctattctgcgtgcctttagttggcggcgcaccatacaacggtcagattactgctttgaaaaaaggcgtacaagttatcgttgcaaccccaggtcgtttacttgaccatatcaatgcgggtcgcgttgacttatcaagccttgaaatcttggtacttgatgaagctgaccgtatgctagatatgggttttgctgacgatatcagcgacatactacgtgcagcaccgattgatcgtcaaacgattatgtgttcagcaacttgggacggtcctgtcggcaaaatcgctgccagcttcaccaaaaaccctgagcgtgtatcaatcaaagttgaatctgcgcacatcgaagaaaaagtgtattactgtgatgattttgatcacaaaaaccgtttgcttgacaaaatcgtttgccacaaagatatggaacaaatcattatctttgctgccactaaacgtagtactgaaaaattagcaaaacagctacaagaagccggtcataaagcaagcttcctacatggcgatttgccacaaagcaagcgtaaccgcattgttcaagacctacgtaatggtaaatgcaaaatcttagttgcgaccgacgtagcggctcgtggtctagacgttccagcactatcgcacgtcattaactatgacttaccgcgtcaaacggaagattacgtccatcgtatcggtcgttgtggtcgtgcaggccgtactggtgttgctataagcttatgtagcatggatgaccgtccacagcttaacgctattaaccgttatttagatcgtaaaatggaagcctctgttatcgaaggcatggagcctaagaaaacttacgttcctagcgaaaacaaaggcaatggtcgtggtcgtggccgtggtcgttcaaacggcggtggtaatggtaatggtcaaggtcgtggtcgttcagcgggtggttatgctggttctggcgctagtaaacctagtggtcaaggccgtggtcgcccatcaggtgatagcagcaacgctactggtcaacgcgcaagcaatgacagcggttatcaaggtaagccacgtgattcatctggcaagccaaatgagcgttcaggtggcaagccttaccaaggtaagcgtactggtgctcctagccgcggcgatagcactggcgttccacgtggtgagcgtgctgcaacgggtcgtggtcgtccaagtggtagccaaggtcgcccagcagctcgttcagacagccgtggtcaaggtcgtccaactggcggcaaccgtggtaacaactcgtaa

SEQ ID NO: 3397 - protein, 567 aa, Psychrobacter arcticus 273-4
MTDILSAIAAENGIIESTDTPNTTANTDTNNEAATTDATDENKVTFTDLNIAKPILSALERSGYTHPTPIQAEAIPFALQGRDLLLSAQTGSGKTAAFVIPVLDRLSRATSFDKLTKALILTPTRELAQQVHDSVRTYSKDMRGLFCVPLVGGAPYNGQITALKKGVQVIVATPGRLLDHINAGRVDLSSLEILVLDEADRMLDMGFADDISDILRAAPIDRQTIMCSATWDGPVGKIAASFTKNPERVSIKVESAHIEEKVYYCDDFDHKNRLLDKIVCHKDMEQIIIFAATKRSTEKLAKQLQEAGHKASFLHGDLPQSKRNRIVQDLRNGKCKILVATDVAARGLDVPALSHVINYDLPRQTEDYVHRIGRCGRAGRTGVAISLCSMDDRPQLNAINRYLDRKMEASVIEGMEPKKTYVPSENKGNGRGRGRGRSNGGGNGNGQGRGRSAGGYAGSGASKPSGQGRGRPSGDSSNATGQRASNDSGYQGKPRDSSGKPNERSGGKPYQGKRTGAPSRGDSTGVPRGERAATGRGRPSGSQGRPAARSDSRGQGRPTGGNRGNNS

SEQ ID NO: 3398 - DNA, 1899 bp, Ralstonia eutropha JMP134
  CDS (1)..(1899): transl_table=11
atgacccagcacgacactcgtgcggagcaagctattgcctccgccaccgacgcttcgatcacttccgctgtccagagcccgctcgacaagctcgacgccatgctcaaccccgcgcaagtgaccgagaccgtcgcggcagaggaagtcaccaacggctttgccacgcttggcctggatgcggccatcctgcgtgccctctccgaactgaactacaacaacccgacgcccgttcaggcgcaggccattcccgccttcctggccggccgcgacctgctggtgtcgagccagaccggctcgggcaagacggcggcgttcatgctgccggcaatccagcgcatcagcgaaaagcccgcaacgaaccgcccgacggaaccggccaagcgcatgaagggcaagcgtccccgcccgtcgccggcacagccgtcactgctggtgctgacgccgacgcgcgaactggcgctgcaggtcaccgaagccgctgccaagtatggccgcaacctgcgccgcatcgtgtgcgcgagcattctgggcggcatgccctacccgaagcagctggccgcgctgtccaagatgcctgacatcctggtggccacgccgggccgtctgctcgaccatatctcggccggccgcatcgacctgtccgcactcgacatgctcgtgttcgacgaagccgaccgcatgctggacatgggctttgccgatgacatcgacgcgatcgtcgacgccaccccggctagccgccagacgctgatgttctccgccacgctcgacgcacgcatcgcccagctcgcctcgcgccagctgaaggatccgcagcgcatcgagatcgccgcggcccgcgccgaccagagccatatcgaacagcgcctgcacttcaccgacgacatgtcgcacaaggaacgcctgctcgaccacctgctgcgcgatgccacgctcaagcaagccatcgtgttcacggccaccaagcgtgacgccgactcgctggccgaacgcctgtccgataccggctttgccgccggcgcgcttcacggcgacatgacccagggcgcgcgcaaccgcaccctgaccgcactgcgccgcggcaatctgcgcgtgctggtcgcgaccgacgtggccgcgcgcggcatcgacgtgcccgacatcacccacgtggtgaacttcgacctgcccaagcaggccgaggactatgtgcaccgtatcggccgtaccggccgcgccggccgctcgggcgtcgcgatcaacctggtgaaccacaacgacacgttccagtggaagcgcatcgagcggttcaccaacaaccgcatcgacgcttcggtgatcgaaggcctggagccgcgccgttcgcccaagccgcgctcgaacttcggcggcaagccgggcggccgtggcaatggtggcggctaccgtggcggtgagcgcagctttggcgatcgcaacttcggtgaccgcaagttcggtggcgaaagccgtggcttcggtaaccgtggcaaccaggaaggtggtcgcagcttcggtgatgacaaccgtggctttggcaaccgtgaaggcagcggctaccgtggcggcgagcaacgcagcttcggcggcggcgaccgcaacttcggtggcgagcgcaagttcggcggcgacaatcgcggctttggccagcgcgccaaccccgaaggcggccgcagcttcggtgacgacaaccgtggcttcggcaaccgtgaaggcggcggctaccgtggcggcgagcaacgcagcttcggcgaccgcagctttggtgaccgcaaggtcggtggcgaaggccgcagcttcggcgaccgcggcggccgtgatggcggccgcagcctcggcaaccgtgaaggtggcttcggcggccaacgcaacggcaacagccgttcgcgctacgagcgttaa

SEQ ID NO: 3399 - protein, 632 aa, Ralstonia eutropha JMP134
MTQHDTRAEQAIASATDASITSAVQSPLDKLDAMLNPAQVTETVAAEEVTNGFATLGLDAAILRALSELNYNNPTPVQAQAIPAFLAGRDLLVSSQTGSGKTAAFMLPAIQRISEKPATNRPTEPAKRMKGKRPRPSPAQPSLLVLTPTRELALQVTEAAAKYGRNLRRIVCASILGGMPYPKQLAALSKMPDILVATPGRLLDHISAGRIDLSALDMLVFDEADRMLDMGFADDIDAIVDATPASRQTLMFSATLDARIAQLASRQLKDPQRIEIAAARADQSHIEQRLHFTDDMSHKERLLDHLLRDATLKQAIVFTATKRDADSLAERLSDTGFAAGALHGDMTQGARNRTLTALRRGNLRVLVATDVAARGIDVPDITHVVNFDLPKQAEDYVHRIGRTGRAGRSGVAINLVNHNDTFQWKRIERFTNNRIDASVIEGLEPRRSPKPRSNFGGKPGGRGNGGGYRGGERSFGDRNFGDRKFGGESRGFGNRGNQEGGRSFGDDNRGFGNREGSGYRGGEQRSFGGGDRNFGGERKFGGDNRGFGQRANPEGGRSFGDDNRGFGNREGGGYRGGEQRSFGDRSFGDRKVGGEGRSFGDRGGRDGGRSLGNREGGFGGQRNGNSRSRYER

SEQ ID NO: 3400 - DNA, 1602 bp, Thiobacillus denitrificans ATCC 25259
  CDS (1)..(1602): transl_table=11
atgagcttctccgaactggggcttgatcccctcattctcaaatccgtactcgccgccggctacgaaaacgccacgccggttcagcagcaggcgattcctgccgcgctgagtgggggcgacctgctggtgtcctcgcacaccggcagcggcaagacggccgccttcctgctgccgtcgatccagcgtctgctcgccgagccggcggtcaaaagcatcgggccgcgtgtgctggtgctgacgccgacgcgcgaactcgcgctgcaggtcgaaaaggccgcgatgacctacggcaaggagatgcgccgcttccgcaccgcctgtctggtcggcggcgccccctatggcctgcagctcaagcgactctcgcagccggtcgacgtcgtggtcgccacgccgggtcgcctgatcgaccatctcgagcgcggcaagatcgacttctcgcgcctcgaggtgctcgtgctcgacgaagccgaccgcatgctcgacatgggcttcgtcgacgacatcaaggcgatcgccgcgcgctgtccggccgaacggcagaccctgctgttctcggccacgctcgacggcgtcgtcggcaacctcgcacgcgaactgacccgcgacgcgcaacgcatcgagatcgaggcggtgccgcacaaggaagccaagatcgagcagcgcctgctgttcgccgacaacatggaccacaagaaccgcctgctcgacgcgctgttgcgtgacgtcgagatggtgcaggcgatcgtgttcgcatcgaccaagcgcagcaccgaggagatttccgacctgctcgccgaaagcggcttcgcctccgacgccttgcacggtgacatgcagcagggccagcgcaaccgcgcgctgcagcggctgcgcgaagggcgcacccgcgtgctcgtcgcgaccgacgtcgcggcccgcggcatcgacgtcgccagcatcagccacgtcatcaacttcgatctgccgcgccaggccgaggactacgtccaccggatcggccgcaccggccgcgcgggtcgtaccggcatcgcggtgagcttcgccggcatgcgcgagggcggactggtgaagaacatcgagcgctacaccggcaaccgcatcgaggtgcacaccttgcccgggctggagccgacgcagcggccgtcgaccgggcgacccggcaatggccggccgcgcggcaacggtccgcgcgggggctacgagaagcgcagcttcggggatcgcagcgagccgcgcagctacggcgaccggccccgtggcgatagccgcgacaaccgcgaccgcggctaccgcggcgacgcccgtcgtaacgacggcgcacccgcccgtcgcttcgacaatggcgtccgcgggccgtccgacgtgccgcgcatgaccagcgagcagacggcagggcctcgtggcgccgcctccaagcccgaggttaatggcaacagcgtcgagtactgggagaagcgcgaacgcgaggccaaggccaaagccgccacgggccgctcctacggcgaccgcggcaacgccgcgcgtccggcacgtggctacggcaacgagaaccgtggcggggcagggcgcggcggggtgcgcgggcgcttcaaggactga

SEQ ID NO: 3401 - protein, 533 aa, Thiobacillus denitrificans ATCC 25259
MSFSELGLDPLILKSVLAAGYENATPVQQQAIPAALSGGDLLVSSHTGSGKTAAFLLPSIQRLLAEPAVKSIGPRVLVLTPTRELALQVEKAAMTYGKEMRRFRTACLVGGAPYGLQLKRLSQPVDVVVATPGRLIDHLERGKIDFSRLEVLVLDEADRMLDMGFVDDIKAIAARCPAERQTLLFSATLDGVVGNLARELTRDAQRIEIEAVPHKEAKIEQRLLFADNMDHKNRLLDALLRDVEMVQAIVFASTKRSTEEISDLLAESGFASDALHGDMQQGQRNRALQRLREGRTRVLVATDVAARGIDVASISHVINFDLPRQAEDYVHRIGRTGRAGRTGIAVSFAGMREGGLVKNIERYTGNRIEVHTLPGLEPTQRPSTGRPGNGRPRGNGPRGGYEKRSFGDRSEPRSYGDRPRGDSRDNRDRGYRGDARRNDGAPARRFDNGVRGPSDVPRMTSEQTAGPRGAASKPEVNGNSVEYWEKREREAKAKAATGRSYGDRGNAARPARGYGNENRGGAGRGGVRGRFKD

SEQ ID NO: 3402 - DNA, 1551 bp, Burkholderia sp. 383
  CDS (1)..(1551): transl_table=11
atgacttcgagcatcaactccagcccgctcaacgcgatcgccgaccaggcgctcggtctcgacgacgccgccgtaccggccgcggtcgaaccggcgtcggacgagccgaacttcgcgtcgctcgggttgtcgccggagatcgtctccgcgctgcaggccgccggctatgtgaagccgacgccggtccagcagcgcgcgattccggccggcatcgccggccgtgacctgctggtctcgagcccgaccggttcgggcaagactgctgcattcatgctgcccgcgatcgaacgtttcgcgcagctccagaagacgcaagcgcagcaaccgcgcgcgccgcgtgaaccgaaccagggcgaccgccgtgcgcgccgcccgcaacccgtcgcgcgcccgggcctgctcgtgctgacgccgacccgtgaactcgcgatgcaggtcaccacggccgcaacgacctacggcaagcacctgaagcgcctgcgcacggtcagcattctcggcggcgtcgcctacggccagcagctgatgctgctcgcgaagaaccccgaaatcctggtcgccacaccgggccgtctgctcgaccacctcgagcgtggccgcatcgacctgtccgagctgaagatgctcgtgctggacgaagccgaccgcatgctcgacatgggcttcatcgacgacatcgaaacgatcgtcgccgccacgcccgagtcgcgccagacgatgctgttctcggccacgctcgacggcaagatcggttcgctgacgagccgcctgctgaaggatccggaacgcatcgagatccagcagcgcctcgagtcgcgcgcgaacatcgcgcagaccgtgcactacgtcgacgaccgcgaccacaaggatcgcctgctcgatcacctgctgcgcgacgacgcgctcgaccaggcgatcatcttcacggcgaccaagatcgacgccgaccagctcgccggccgtcttgccgatgcaggcttcgaatcggctgcgctgcacggcgacctgccgcagggcgcgcgtaaccgcacgatccgtgcgctgcgcgagcgccgtgtgcgcgtgctggtggccaccgacgtcgcggcacgcggcatcgacatcccgggcatcacgcacgtgttcaactacgacctgccgaagttcgcggaagactacgtgcaccgtatcggccgtaccggccgtgcgggccgttcgggcacggcagtgagcctcgtgcaccacgccgagcaaggcgcgctcaagcgcatcgagcgcttcgtgcgcgcgccgctgccggtcaacgtgatcgaaggtttcgagccgcgcaaggcgcccccgcgcaacggcggcaacggcggccgcggccgtccgggcggcggtaacggcggtcgtcgtttcggcggcaagccgggcggcggctatggtggcaacggtaacggcaacggccgcagctacggcggcggcaatggcggtggctggagcggcaagccgggcggcagccgtgacggcggcccgcgtcgcgacggccaacgtagcggcggcccgcgtcgcagcaattccgcgtcgtaa

SEQ ID NO: 3403 - protein, 516 aa, Burkholderia sp. 383
MTSSINSSPLNAIADQALGLDDAAVPAAVEPASDEPNFASLGLSPEIVSALQAAGYVKPTPVQQRAIPAGIAGRDLLVSSPTGSGKTAAFMLPAIERFAQLQKTQAQQPRAPREPNQGDRRARRPQPVARPGLLVLTPTRELAMQVTTAATTYGKHLKRLRTVSILGGVAYGQQLMLLAKNPEILVATPGRLLDHLERGRIDLSELKMLVLDEADRMLDMGFIDDIETIVAATPESRQTMLFSATLDGKIGSLTSRLLKDPERIEIQQRLESRANIAQTVHYVDDRDHKDRLLDHLLRDDALDQAIIFTATKIDADQLAGRLADAGFESAALHGDLPQGARNRTIRALRERRVRVLVATDVAARGIDIPGITHVFNYDLPKFAEDYVHRIGRTGRAGRSGTAVSLVHHAEQGALKRIERFVRAPLPVNVIEGFEPRKAPPRNGGNGGRGRPGGGNGGRRFGGKPGGGYGGNGNGNGRSYGGGNGGGWSGKPGGSRDGGPRRDGQRSGGPRRSNSAS

SEQ ID NO: 3404 - DNA, 1449 bp, Burkholderia thailandensis E264
  CDS (1)..(1449): transl_table=11
gtgagcgatgccggcgacgccgcgccggacgaaccgacgttcgcgtcgctcggcctgtcgccggagatcgtctccgcgctgcaggcggccggctacgtgaagccgacgcccgtgcagcagcgcgcgattccggccggcatcgccggccgcgacctgctcgtgtcgagcccgacgggctccggcaagacggccgcgttcatgctgcccgcgatcgagcgcttcgcgcagttgcaaaaagcgcaggcgcagcagccgcgcgcgccgcgcgaagcgcagccgggcgagcgtcgcggccgccgcccgcaacccgtcgcgcgcccgggcctcctcgtcctcacgccgacgcgcgagctcgcgatgcaggtgacgacggccgcgtcgacgtacggcaagcacctgcgccgcctgcgcacggtcagcatcctcggcggcgtcgcgtacggccagcaactgatgctgctcgcgaagaaccccgagatcctcgtcgcgacgccgggacgcctgctcgaccacctcgagcgcggccgcatcgatttgtccgaactgaagatgctcgtgctcgacgaagccgaccgcatgctcgacatgggcttcatcgacgacatcgacacgatcgtcgcggcgacgcccgcgtcgcgccagacgatgctgttctcggcgacgctcgacggcaagatcggctcgctcacgaaccgcctgctgaaagacccggagcgcatcgagatcacgcagaagatcgaatcgcgctcgaacattgcgcagaccgtgcactacgtcgacgaccgcgatcacaaggaccgtctgctcgaccacctgctgcgcgacaccgcgctcgaccaggcgatcatcttcaccgcgacgaagatcgacgccgaccagctcgccggccggctcgccgacgccggcttccagtccgccgcgctgcacggcgatctgccgcagggcgcgcgcaaccgcacgattcgcgcgttgcgcgagcgccgcgtgcgcgtgctcgtcgcgaccgacgtcgccgcgcgcgggatcgacatccccggcatcacgcacgtgttcaactacgacctgccgaagttcgccgaggactacgtgcaccggatcggccgcacgggccgcgcgggccgctcgggcaccgcggtgagcctcgtgcatcacgcggagcaaggggcgctcaagcgcatcgagcgcttcgttcgcgcgccgctgccggtgaacgtcgtcgaaggcttcgagccgcgcaaggcgccgccgccgcgcaacgatcgcggcaacggccgcggccgtccgggcggcaacggcggccgccggttcggcggcaagccgggcggcggtcatggcggcggccgctcgggcggctggagcggcaagcctggcggcaatcgcgaaggctatggcgcgcgccgcagcgacggccagcgcggcggcccgcggcgcggcaactcggcagcgtaa

SEQ ID NO: 3405 - protein, 482 aa, Burkholderia thailandensis E264
MSDAGDAAPDEPTFASLGLSPEIVSALQAAGYVKPTPVQQRAIPAGIAGRDLLVSSPTGSGKTAAFMLPAIERFAQLQKAQAQQPRAPREAQPGERRGRRPQPVARPGLLVLTPTRELAMQVTTAASTYGKHLRRLRTVSILGGVAYGQQLMLLAKNPEILVATPGRLLDHLERGRIDLSELKMLVLDEADRMLDMGFIDDIDTIVAATPASRQTMLFSATLDGKIGSLTNRLLKDPERIEITQKIESRSNIAQTVHYVDDRDHKDRLLDHLLRDTALDQAIIFTATKIDADQLAGRLADAGFQSAALHGDLPQGARNRTIRALRERRVRVLVATDVAARGIDIPGITHVFNYDLPKFAEDYVHRIGRTGRAGRSGTAVSLVHHAEQGALKRIERFVRAPLPVNVVEGFEPRKAPPPRNDRGNGRGRPGGNGGRRFGGKPGGGHGGGRSGGWSGKPGGNREGYGARRSDGQRGGPRRGNSAA

SEQ ID NO: 3406 - DNA, 1551 bp, Saccharophagus degradans 2-40
  CDS (1)..(1551): transl_table=11
gtggctgcaatcctgtatcctgcgcgccctttagttgatgcagaccccaatatgaaatttgccgaacttggcctttgtcccgccattcagaaagccgtactcgaacaaggctacgaaacccctaccccaattcaagcgcaagccattccccctgtattagaagggcgcgatgtgatggccgctgcgcaaaccggtacgggtaagacggcggggtttacattgcccattttagaaatactggcagaaggcatagaaaacggccgtaaagtaaagccgaatcaggcacgtgcgttagtacttactcctacgcgagagcttgcagcacaggtaggtgaaaacgttgccctatacggcaagtacttgcctattaaatctaccatcgtatttggcggcgtgaaaattaacccgcaaatgatgaaattgcgcggcggtgtcgacattttagtggccacgccaggccgtttgatggacctatacaatcagcgtgcagtgaagtttgatcagctagaaatgctggtgttggacgaagccgatcgcatgctcgatatgggctttattcacgatattcgcaaaattatggctattttaccgaagaaacgtcaaaacctgatgttttcggcgacgttctcgcaagatattcgcgaattagctaaaagtattgtgaataacccagtagaaattactgtgaacccgcccaacagcaccgcaacccgcgtaaaacagtggatttgccccgttgataaaaaagaaaagcccgctttgcttacccatttgattaaaaccaataagtggcagcaagtgttggtgttctctcgcaccaagcatggcgcaaataaattagttaaacaattggaaggcagtggcctgcgagcagcggcgattcacggcaacaaaagccaaggcgcacgcactaaagcgttagccgagtttaaaaatggcacggtaaaaattcttgtagccaccgatattgccgctcgcggtttggatattgatcaactaccgcaagtggtgaacttcgacttacctcaggttgctgaagattacgtgcatcgaattggccgcacaggccgtgctggcgcagagggcaatgccgtttcgctagtgagtgccgacgaatttcaaatgttaaaagagattgagcgtttaactaaaacgttgctcactcgcgaagttattcaaggctttgagccagaccacaatttacctgagtctcgattagatacccgccccattcgccccaataagccgaaacggcccaagccagcaggtggtgcttcgaaccgcagtggcggtggtaacagtggcggtggcaataatcgcgctaagccgcgtggcgatgacagcaaagcggccaatgccgataccccgtgggcaggcaaagcaaagccgcgcaagcctcgccctgcaggtgctaaacccgctacacaaggtaagcctgccggcgcgcgcaatggcaatacaggcccaaaaggtaagggtgggccagccggtgggggtgccagacgaccaactaataagcctagcggtgcacaaggggctgctagaagttag

SEQ ID NO: 3407 - protein, 516 aa, Saccharophagus degradans 2-40
MAAILYPARPLVDADPNMKFAELGLCPAIQKAVLEQGYETPTPIQAQAIPPVLEGRDVMAAAQTGTGKTAGFTLPILEILAEGIENGRKVKPNQARALVLTPTRELAAQVGENVALYGKYLPIKSTIVFGGVKINPQMMKLRGGVDILVATPGRLMDLYNQRAVKFDQLEMLVLDEADRMLDMGFIHDIRKIMAILPKKRQNLMFSATFSQDIRELAKSIVNNPVEITVNPPNSTATRVKQWICPVDKKEKPALLTHLIKTNKWQQVLVFSRTKHGANKLVKQLEGSGLRAAAIHGNKSQGARTKALAEFKNGTVKILVATDIAARGLDIDQLPQVVNFDLPQVAEDYVHRIGRTGRAGAEGNAVSLVSADEFQMLKEIERLTKTLLTREVIQGFEPDHNLPESRLDTRPIRPNKPKRPKPAGGASNRSGGGNSGGGNNRAKPRGDDSKAANADTPWAGKAKPRKPRPAGAKPATQGKPAGARNGNTGPKGKGGPAGGGARRPTNKPSGAQGAARS

SEQ ID NO: 3408 - DNA, 1371 bp, Methylobacillus flagellatus KT
  CDS (1)..(1371): transl_table=11
gtgtcttttgaaaatttgaacttacatccagccatcctgcgtgccttgaccgaggctggctatagcacccccacacccatccaggcccaggcgattcctgaagtcctagaaggccatgacctcatggcctctgcccagaccggcaccggcaagaccgctgccttcaccctgccagcactcaacctgctggctacgccgcaccctgccaagagccgcggcccccgcatcctggtattgaccccgacccgcgaactggctgcacaggtcaacgaagcagcgcgcaaatacggcaagttcctgcgcgcccgcactgtcagtattgtcggcggcatgccctatccattgcagaacaagttattgtcgcagccaatcgacattctcgtggccacgccgggccgtctgctcgaccatatggaacgcggacgcatcgacatgtcccgcttgcaaatgctgatcctagacgaagccgaccgcatgctggacatgggcttcatgccggatatcgagcgcatttcctccgccttgcctagcgagcgccagacattgatgttctccgccaccttcgaaggccagatcgccaacattgccaagacgttgctgaaaacccccaaggtcattcagatcgcggcacaaaaggaaaagcacgccaatattgagcaaaagctattgttcgtcgatgacatggcgcacaagaacaagctgctggaacatctgctcattgctcccggtgtcaaccaggccatcgttttcacttccaccaagcgtcacgccgacctgctggcggaagacctgtatgctgcaggccacaaatctgccgcactgcatggcgacatgacccagggcgcgcgcaatcgcaccttgaccaagctgcgccatggtgatgtacgcgtgctggttgcaaccgatgtcgcggcccgcggcatcgatgtgcaaggcattacccacgtcatcaactatgacctgccgaagtttgcggaagactatgtccaccgcatcggccgcacaggacgtgcaggcaataccggtgtggcactctcgtttgcttcgcacatggacaggcaccagttgcgcaagatcgaacaatatacaggccagcgcctggagatttccgtgattgaaggcctggagccaaagcgcccagccccacgtatggatcacaatgacaagccacgcagtggccgccctggtcaacgtccaggtggtggcggttacaagccacgcggccagggttacgccagccgcgatggcaaccgttcggaaggccgctcatttggcgaccgggcagcaggcagccgcaccgatgcaaatcgtggcccagccaagcgccaggacagtgaccgtccggcacgccgctcgcgcagctttgcctaa

SEQ ID NO: 3409 - protein, 456 aa, Methylobacillus flagellatus KT
MSFENLNLHPAILRALTEAGYSTPTPIQAQAIPEVLEGHDLMASAQTGTGKTAAFTLPALNLLATPHPAKSRGPRILVLTPTRELAAQVNEAARKYGKFLRARTVSIVGGMPYPLQNKLLSQPIDILVATPGRLLDHMERGRIDMSRLQMLILDEADRMLDMGFMPDIERISSALPSERQTLMFSATFEGQIANIAKTLLKTPKVIQIAAQKEKHANIEQKLLFVDDMAHKNKLLEHLLIAPGVNQAIVFTSTKRHADLLAEDLYAAGHKSAALHGDMTQGARNRTLTKLRHGDVRVLVATDVAARGIDVQGITHVINYDLPKFAEDYVHRIGRTGRAGNTGVALSFASHMDRHQLRKIEQYTGQRLEISVIEGLEPKRPAPRMDHNDKPRSGRPGQRPGGGGYKPRGQGYASRDGNRSEGRSFGDRAAGSRTDANRGPAKRQDSDRPARRSRSFA

SEQ ID NO: 3410 - DNA, 1614 bp, Burkholderia xenovorans LB400
  CDS (1)..(1614): transl_table=11
atgacttcgagcaacacccccagcagcccgttgaacgccatcgccgaccaggcactcggtctcgccgacgcacccgcgcaagccgcagccatcgctgccgccccggaagccgtcgtcgctgaagccgcagcaccgaccggcccgtcgttcgcgtcgctcggtctgtccgcggacgtcgtctccgcgctgaccgccgctggctatcagaaccccacgccggttcagcaacgcgcgattcccgccggcatcgccggccgtgacctgatggtctcgagcccgaccggttcgggcaagaccgccgcgttcatgctgcccgccatcgaacgtttctcgcaactgcaaaagacgcaggccggccagccgcgtgagccgcgtccggccgacggcgcccgcacgcgccgtccgcaaccggttgcccgtccgaccatgctggttctgacgccgacccgcgaactcgcaatgcaggtcaccaccgccgccgccacttacggcaagcacctgaaacgcctgcgcaccgtcagcattctgggcggcgtcgcttacggccagcaattgatgctgctcgcgaagaacccggaaatcctggtcgccacgccgggccgtctgatcgaccacctggagcgcggccgcatcgatctgtcgcaactgcagatcctcgtgctcgacgaagccgaccgcatgctcgacatgggctttatcgaagacatcgaaacgatcgttgccgctacgccggctacgcgtcaaaccatgctgttctcggccacgctcgacggcaagatcacttcgctgaccggccgcctgctgaaggacccggagcgtatcgaaatcgttcagcgcatggagcagcgcaccaacatcgcgcaaaccgtccattacgtcgacgaccgcgatcacaaggaccgtctgctcgaccatctgttgcgcgactccggcctcgatcaggctatcgtcttcacggcaaccaagatcgatgccgaccagctggccggccgtctggccgatgccggtttcgaatcggccgccttgcatggcgatctgccgcagggcgcgcgtaaccgcacgatccgcgcgctgcgcgagcgccgcgtgcgcgtgctggtggcaacagacgtcgccgctcgcggtatcgacattccgggcatcacgcacgtgttcaactacgacctgccgaagttcgccgaagactacgtgcaccgcatcggccgtactggccgtgccggccgctcgggtatcgcggtgagcctcgtgcatcacgcggaacagggcgcgctgaagcgcatcgagcgcttcgtgcgcaccccgctggcagtcaatgtggtcgaaggcttcgagccgcgcaagtcggcaccgtcgggtaacggccgtcctggctttggtggccgcggccgtccgggcggcggcaacggcggtggccgtcgcttcggtagcggctcgggcaagccggccggcaacggcggcgctgcgcgcagcggcaccggtagcaacggcggcggctgggccggcaagtcggctggcggcggttcgcgtgaaggcggcttcggcggcggttcgcgcgacggcggctacggcgcacgccgtagcgacggtccgcgtacggcgcgtcgcggcagctaa

SEQ ID NO: 3411 - protein, 537 aa, Burkholderia xenovorans LB400
MTSSNTPSSPLNAIADQALGLADAPAQAAAIAAAPEAVVAEAAAPTGPSFASLGLSADVVSALTAAGYQNPTPVQQRAIPAGIAGRDLMVSSPTGSGKTAAFMLPAIERFSQLQKTQAGQPREPRPADGARTRRPQPVARPTMLVLTPTRELAMQVTTAAATYGKHLKRLRTVSILGGVAYGQQLMLLAKNPEILVATPGRLIDHLERGRIDLSQLQILVLDEADRMLDMGFIEDIETIVAATPATRQTMLFSATLDGKITSLTGRLLKDPERIEIVQRMEQRTNIAQTVHYVDDRDHKDRLLDHLLRDSGLDQAIVFTATKIDADQLAGRLADAGFESAALHGDLPQGARNRTIRALRERRVRVLVATDVAARGIDIPGITHVFNYDLPKFAEDYVHRIGRTGRAGRSGIAVSLVHHAEQGALKRIERFVRTPLAVNVVEGFEPRKSAPSGNGRPGFGGRGRPGGGNGGGRRFGSGSGKPAGNGGAARSGTGSNGGGWAGKSAGGGSREGGFGGGSRDGGYGARRSDGPRTARRGS

SEQ ID NO: 3412 - DNA, 1632 bp, Burkholderia xenovorans LB400
  CDS (1)..(1632): transl_table=11
atgccgcattcatgcctgcctgggcccatttgtgccgttcgcaaaactgcattgcaaagagcttttatgtcttttgattctctcggcttgtccgaaccgttggtccgcgctgtacacgaacttggctacaccacgccgactccgatccagacgcaagcgattcccgctgtgctcaacggcggcgacctgctggccggtgcgcaaaccggcaccggcaagaccgccggcttcacgctgccgatcctgcaacgtctgaactcctcgcccgccgttgcgaacggttcgggcaagcgcgccgtgcgcgcgctgatcctcacgcccacgcgtgaactggccgcgcaggtggaagaaagcgtgcgcgcctacggcaagtatctgaagctgaagtcgaccgtgatgttcggcggcgtcggcatcaatccgcagatcggcgcgttgcgcagcggcgtggatatcgtcgtcgccacgccgggccgtttgctcgatcacatgcagcagaaaaccatcgacctgtcgcatctcgagattctcgtgctcgacgaggccgaccgtatgctcgacatgggcttcatccacgacatcaaacgcgtgctcgccaagctgccgccgaagcggcagaacctgctgttctcggccactttctccgacgagatcaagacgctcgccgacaatctgctcgactcgccggcgctgatcgaagtcgcacgccgcaacacgacggcggaaacggtcgcgcagaagattcacccggtggaccgtgacaagaagcgcgagttgctcacgcatctgatcaaacagcacaactggttccaggtgctggtgttcacgcgcaccaagcacggcgccaaccgccttgccgaacagttgaccaaagacggcatcagcgccctggcgattcacggcaacaagagccagtcggcccgtacccgcgcgctcgccgagttcaaggacggcacgctgcaggtgctggtcgcgaccgacatcgccgcgcgcggcatcgacatcgatcaactgccgcacgtggtcaactacgatttgccgaacgtgccggaagactacgtgcaccgcatcggccgcacgggccgcgcaggcgctaccggcgaagcggtctcgctggtgtgcgtcgacgaactgcaactgctgaaggacatcgagaagctgatcaagcgtccggtgccgcaggaagtggttgccggtttcgaaccggacccgaccgcgaagccggagccgatcctgcgccgcggccagggtggtggcggcggcggtggtggccgctcgccgcgtcagggtcaaggcgcaccgaagcgtgacgatgcaaggcgcgatggcgccggttccgcgaaaccggcgcaacgttcgggtcaacgtccggccaacggtcaacagcagccgaagccgcagggtgcgaagccggccggcaacggcggtcagccgcgtcgtgacggccagcgccacgacgaccggccgcgcgccgtcgcgcatgaaggcagcgccgcgcagcatgcgccgcgcaagccgcaggccgcgaagccgcaaggcggcaatccgggtgcgttgctgggtggcacgaagccgcgcaacgacgcgccgcgcggtggccagcccacgcgcagtggtcagcgcgggcgctga

SEQ ID NO: 3413 - protein, 543 aa, Burkholderia xenovorans LB400
MPHSCLPGPICAVRKTALQRAFMSFDSLGLSEPLVRAVHELGYTTPTPIQTQAIPAVLNGGDLLAGAQTGTGKTAGFTLPILQRLNSSPAVANGSGKRAVRALILTPTRELAAQVEESVRAYGKYLKLKSTVMFGGVGINPQIGALRSGVDIVVATPGRLLDHMQQKTIDLSHLEILVLDEADRMLDMGFIHDIKRVLAKLPPKRQNLLFSATFSDEIKTLADNLLDSPALIEVARRNTTAETVAQKIHPVDRDKKRELLTHLIKQHNWFQVLVFTRTKHGANRLAEQLTKDGISALAIHGNKSQSARTRALAEFKDGTLQVLVATDIAARGIDIDQLPHVVNYDLPNVPEDYVHRIGRTGRAGATGEAVSLVCVDELQLLKDIEKLIKRPVPQEVVAGFEPDPTAKPEPILRRGQGGGGGGGGRSPRQGQGAPKRDDARRDGAGSAKPAQRSGQRPANGQQQPKPQGAKPAGNGGQPRRDGQRHDDRPRAVAHEGSAAQHAPRKPQAAKPQGGNPGALLGGTKPRNDAPRGGQPTRSGQRGR

SEQ ID NO: 3414 - DNA, 1905 bp, Ralstonia metallidurans CH34
  CDS (1)..(1905): transl_table=11
atgacccagcacgatttccgtgcggagcagcctattgcctccgccaccgacgcattcgccacgcccgccgatgccgccagcccgctcgacaagctcgacgccatgctgaacgctgacgccgcaccggccgtggaggcctcggaaaacggcttcgcaaaactcggcctcgacgccgctatcctgcgcgcactggccgaagccaactacaacacaccgacaccggtgcaggcgcaggccatccccgccttcctggccggccgcgacctgctggtttccagccagaccggctcgggcaagaccgccgcgttcatgctgcccgcaatccagcgcatcagcgaaaagccggccacgcatcgtccgaccgaaccggccaagcgcatgaagggcaagcgcccccgtccgtctccggcccagccgtcgctgctggtgctgacgccgacgcgtgaactggccctgcaggtaaccgaagccgccgccaagtatggccgccatctgcgccgtatcgtctgcgccagcatcctgggcggcatgccctacccgaagcaactggccatgctggcccgtatgccggacatcctcgtggccacgccgggccgcctgctcgaccatatcgaagccggccgcattgacctgtccgcgctggaaatgctggtgttcgacgaagccgaccgtatgctcgacatgggcttcgccgacgacatcgacgccatcgttgccgccacgccggcatcgcgccagacgctgatgttctcggccacgctcgacgcccgcatcgcccaactggcctcgcgccagctccgcgacccgcagcgcatcgaaatcgccgccgcgcgcgccgaccacagcaacatcgaacagcgcctgcacttcaccgacgacatgtcgcacaaggagcgcctgctcgaccacctgctgcgcgatgcatcgctcaagcaagccatcgtcttcaccgctaccaagcgcgatgccgattcgctggccgagcgcctgtcggacaccggcttctccgccggcgcgctgcatggcgacatgactcagggcgcgcgtaaccgcacgctgacggccctgcgccgtggcaacctgcgcgtgctggtggccaccgacgtggccgcgcgcggcatcgacgtgcccgacattacccacgtggtgaacttcgacctgcccaagcaggcggaagactacgtgcaccgcattggccgtaccggccgtgccggtcgctcgggtgtggcgatcaacctcgtgaaccacggtgacatgttccagtggcgccgtatcgagcgcttcacgaacaaccgcatcgacgcctcggtgatcgagggcttcgaaccgcgtcgctcgccgaagccgcgctcgaacttcggcggcaagccgggcggccgcgacggcttccgcggcaacggtggcaccggtggcggctatcgcggcaacaacggcagcggtggctatcgcggtaaccgcgaaggtagcggcgaccgcaacttcggcgagcgccgattcagcagcgacaaccgtggtttcggcgatcgcgccccgcgtccgttcggcgacgacaaccgtggtggcttcggcgatcgtggtgagcgtggtttcggcgaccgtagcaatggcaatagcaatggcggctaccgtggtcaaggtcaaggccagggtcaaggccaagctcagcagcgcagctttggtggcgaacgcagcttcggcaaccgcgacttcgcacagcgcgatggcaaccgtgacgccacgcaacgtgacggtaaccgcagctttggcggcaaccgtgacggccagcgcgacggcaaccgtagctttggcgatcgcagcttcggcgaccgcaagttcggtgaccgcggtggcgatcgcggcggcttcggcggccagcgcaacagccgctcgcgttacgagcgataa

SEQ ID NO: 3415 - protein, 634 aa, Ralstonia metallidurans CH34
MTQHDFRAEQPIASATDAFATPADAASPLDKLDAMLNADAAPAVEASENGFAKLGLDAAILRALAEANYNTPTPVQAQAIPAFLAGRDLLVSSQTGSGKTAAFMLPAIQRISEKPATHRPTEPAKRMKGKRPRPSPAQPSLLVLTPTRELALQVTEAAAKYGRHLRRIVCASILGGMPYPKQLAMLARMPDILVATPGRLLDHIEAGRIDLSALEMLVFDEADRMLDMGFADDIDAIVAATPASRQTLMFSATLDARIAQLASRQLRDPQRIEIAAARADHSNIEQRLHFTDDMSHKERLLDHLLRDASLKQAIVFTATKRDADSLAERLSDTGFSAGALHGDMTQGARNRTLTALRRGNLRVLVATDVAARGIDVPDITHVVNFDLPKQAEDYVHRIGRTGRAGRSGVAINLVNHGDMFQWRRIERFTNNRIDASVIEGFEPRRSPKPRSNFGGKPGGRDGFRGNGGTGGGYRGNNGSGGYRGNREGSGDRNFGERRFSSDNRGFGDRAPRPFGDDNRGGFGDRGERGFGDRSNGNSNGGYRGQGQGQGQGQAQQRSFGGERSFGNRDFAQRDGNRDATQRDGNRSFGGNRDGQRDGNRSFGDRSFGDRKFGDRGGDRGGFGGQRNSRSRYER

SEQ ID NO: 3416 - DNA, 1338 bp, Silicibacter sp. TM1040
  CDS (1)..(1338): transl_table=11
atgaccgaattctcctctatggaccttcccaagcacctgcacacccgcatggaagcgatggggttcaatacacccaccccgattcaggcgcgcgccattccccatgcgctgaatggtcaggacgtgttgggcctggcccagaccggcaccggcaagaccgcggcctttggcgtgccgctggtggcgcagatgctcgaatatggtcgcaagcctgcggccggtacagtgcgcggcctgatcctcgctccgacccgcgagctggccaatcagatcgcagagaccctgcgcggtctcaccgaaggcagcccgctgaagaccgggctcgtcgtgggcggcgtgtcgatcaacccgcagatccaccgcctgtccaaaggcaccgacattctggtggccacccccggccgactgctcgacatcctcgaccgcaaggcgctggatctggggtcttgcgactttcttgttcttgatgaggccgatcaaatgctcgacctcgggttcatccacgccctgcgcaagatcgcggccctcctgcccgaagagcgccagaccatgctgttctcggccacgatgcccaagcagatgaacgagatcgcaaacgcctatctcaagagccccgtgcgcatcgaagtgacccctccgggcaaacccgccgccaaggtcacacaatcggttcatttcatcgccaaggcggaaaagctgagccttctcaaagagctgctctctgcccatgatggcgagcgcacgctggtctttggccgcaccaaacatggcatggaaaagctgatgaaggtgctggacaaggcaggcttcaaggcagcggcgatccacggcaacaagagccagggccagcgcgagcgcgcgctgaaagcgttcaaatcgggcgaaatcaccgtgcttgtggccaccgatgtggccgcgcgcgggcttgatattcccgatgtgaaatacgtctacaactacgagctgcccaatgtgccggatgcctatgtgcaccgcatcggtcgcaccgcacgtgcaggcaaagacggtcaggccgtcgccttctgtgcgccggatgagattggcgatctgaaggcgatccagaaaaccatgggcatcaccatccccgtggcctctggtcgcgcctgggaagagctgccggaccccgcagccaaacccgcacgcggtggcggacgcggtcgccccggcggcggcggcggtggccgtggcaaaggcggtggcaagcctggcggcggtcgtcgtcgctttggcggtggcaaatccgcagccccctcggggggcgcaggcgaatcccgtggtgccgctggtgcgggtggacggcagcggcgcaagtcctga

SEQ ID NO: 3417 - protein, 445 aa, Silicibacter sp. TM1040
MTEFSSMDLPKHLHTRMEAMGFNTPTPIQARAIPHALNGQDVLGLAQTGTGKTAAFGVPLVAQMLEYGRKPAAGTVRGLILAPTRELANQIAETLRGLTEGSPLKTGLVVGGVSINPQIHRLSKGTDILVATPGRLLDILDRKALDLGSCDFLVLDEADQMLDLGFIHALRKIAALLPEERQTMLFSATMPKQMNEIANAYLKSPVRIEVTPPGKPAAKVTQSVHFIAKAEKLSLLKELLSAHDGERTLVFGRTKHGMEKLMKVLDKAGFKAAAIHGNKSQGQRERALKAFKSGEITVLVATDVAARGLDIPDVKYVYNYELPNVPDAYVHRIGRTARAGKDGQAVAFCAPDEIGDLKAIQKTMGITIPVASGRAWEELPDPAAKPARGGGRGRPGGGGGGRGKGGGKPGGGRRRFGGGKSAAPSGGAGESRGAAGAGGRQRRKS

SEQ ID NO: 3418 - DNA, 1395 bp, Hyphomonas neptunium ATCC 15444
  CDS (1)..(1395): transl_table=11
ttgacgaaagtaatcatgtccgatttccaatccctcggccttacgggccgtattctcacgtctttgaccaaagccggctacacagcccctacccccattcaggaacaggccatacctctggtcatccagggccgcgacattgtcggcctcgcccagaccggtacaggcaagacccttgccttcgcagccccgatccttgaccgcctcagccgcaacgccagccctgcacctgtgcgcggcacccgcgttctggtgcttgcaccaacgcgcgaactggccggccagatcgccacctccttcggcacctatggcgcgggcctcaacctccgtgtcgtgatggtgtgcggcggcgcaaagattggcggccagatccgtcagctcgagcgcggcgcgcatatcctggtggcaacacccggccgcctgatcgacctgatggaacagcgcgctgtttcactcgacaaggtggaaaccctgatcctcgacgaagccgaccagatgctggaccttggcttcattcacgcccttcgtgccatcgcgaagaatgtgccgtccaagcgccagacgctgttcttctcggccaccatgccgaaagccgtcgaatcgctggcggcgaccttcctgcgtaatccggcagaagtctccgttgcgccgccagccactacggcaggtcgcattgaacagcgcgtctgctttgtggagcagcccgaaaaggcttcacttctgatcgaaaaaatccgcgatccggaactgcgctcagcgatcgtctttacccgcaccaagcatggcgcagacggcgttgtgaaacgccttgccaaagcggacatcgactccgttgccatccatggcaacaagagccagtcccagcgggagaaagccctcgaggccttcaaggcgggccgcgtgccgatcctggtggcgaccgacattgccgcccgcggcattcacgttgacgccctcacgcacgtcatcaactatgacctgccggatgtgcccgaacagttcgtacaccgcatcggccgcaccgcccgtgccggcaactcgggcgtggcgatctccttctgctcgcgcgatgagcgcccgacgctccgcgccatcgaaaaactcacgggcctgaagctggcaccaaacggcgtcagcctgccggacgagcctctgcgcaagcccggcaagcctcagggcaaccgttcgggcaatggcggcggccgtggcggcgcgcgcagcggcggcggctatcaaggccagtcatccggttcacagtcgggcggctcgcactctggccgtccgcatcgcaaaggcccgcccggcggcggcgccaatgcttctggccagaattcccagcgctcttccaatggcgcggcccgtccccgccgcttcaaggaacgtgcggacgcctga

SEQ ID NO: 3419 - protein, 464 aa, Hyphomonas neptunium ATCC 15444
MTKVIMSDFQSLGLTGRILTSLTKAGYTAPTPIQEQAIPLVIQGRDIVGLAQTGTGKTLAFAAPILDRLSRNASPAPVRGTRVLVLAPTRELAGQIATSFGTYGAGLNLRVVMVCGGAKIGGQIRQLERGAHILVATPGRLIDLMEQRAVSLDKVETLILDEADQMLDLGFIHALRAIAKNVPSKRQTLFFSATMPKAVESLAATFLRNPAEVSVAPPATTAGRIEQRVCFVEQPEKASLLIEKIRDPELRSAIVFTRTKHGADGVVKRLAKADIDSVAIHGNKSQSQREKALEAFKAGRVPILVATDIAARGIHVDALTHVINYDLPDVPEQFVHRIGRTARAGNSGVAISFCSRDERPTLRAIEKLTGLKLAPNGVSLPDEPLRKPGKPQGNRSGNGGGRGGARSGGGYQGQSSGSQSGGSHSGRPHRKGPPGGGANASGQNSQRSSNGAARPRRFKERADA

SEQ ID NO: 3420 - DNA, 1731 bp, Rhizobium leguminosarum bv. viciae 3841
  CDS (1)..(1731): transl_table=11
gtgcgttccggcgatagtcgttgtggcgccccgaaaggttttgccttgactaattttgaatcgcttggtgtctccaagccgatcgtcgctactttgttccagctcggcatcgaaacgccgacgccgatccaggaacattcaattcctctcctcctcgaaggccgcgacctgatcggccttgcccagaccggcaccggcaagacggccgctttcggcctgccgctgatcgaaaagctgctcgccgacgaacggcgtcccgacaaccgcacgacgcggacgctgatccttgcgccgacccgcgaactggtgaaccagatcgccgagagcctgaagaagttcatccgcaagtcgtcgctgcgcatcaatgtcgtcgtcggcggggtctcgatcaacaagcagcagcttcagcttgaaaagggcaccgacattctcgtcgccacgccgggccgcctgctcgaccttatcaatcgccgcgcgatcacgctgactgcggttcgctatctcgtgctcgacgaagccgaccagatgctcgacctcggcttcgtccacgatctgcgcaagatcgccaagatggtgccgaaaaagcgtcagaccatgctgttctcggccaccatgccgaaggcaatcgccgatcttgccggcgaatatctcgtcgatcccgtcaaggtcgaagtcacgccccccggcaaggctgccgataaggtcgaacagtacgtccattttgtcggcggcaagaacgacaagacggaactgctccgcaagtcgctgaccgaaaatcctgatggccgcgcgatggtcttcctgcgcaccaagcacggtgcggagaagctgatgaagcatctcgagaatatcggctattccgtcgcctcgatccacggcaacaagagccagggccagcgcgaacgggcgctgaaggccttccgcgacggcagcatcaagacgctgattgccacagacgtcgccgcccgcggcatcgacatccccgctgtcagccacgtctacaactacgacctgcctgaggtgcctgacgcctatgtccaccgcatcggccgcacggcgcgcgccggccgcgacggtatcgccatcgctttctgcgctcctgacgaagccaagctactgcgtgatatcgagcgcctgatgggcatcgacatcactgtcgcaagcggcgaagcgccggcaaatatcggcggcggaccccgccgtgccaacggcaatggtaacaaccgtaatcgcaatggcggccagggtcgcgaaggccagggtcgtggcgaaggccgtggcgaccagaaccgttcggagcatcgcggcagccgtcaggaacgccgcccgcgccgcgaaggtgaaggcagcgaagtccgcgccggcggcgaggagcgtcgtccgcgtccggagcgcccgaccagccgcaacgaggacttccgcggtcagcgccgcggtgaagcgaccccggatctcggccctgacaacgatctggcctcgacctccgacttccgtgcctctgcaaagccacagcgtccggctcatcacggcgcccatgccaatggtgagccgagcggtcatcaccgcggcaacagccgccatgcacacggccgcccggcccgcaagcatggcgaggaccgcggcccgcagcaggcccaggccggcgaaccgcgccgcgacggcaacggcggcaaccgccgcggtggctccggctcccgcaacggcggcggccagcggcgcgaacgcgcctga

SEQ ID NO: 3421 - protein, 576 aa, Rhizobium leguminosarum bv. viciae 3841
MRSGDSRCGAPKGFALTNFESLGVSKPIVATLFQLGIETPTPIQEHSIPLLLEGRDLIGLAQTGTGKTAAFGLPLIEKLLADERRPDNRTTRTLILAPTRELVNQIAESLKKFIRKSSLRINVVVGGVSINKQQLQLEKGTDILVATPGRLLDLINRRAITLTAVRYLVLDEADQMLDLGFVHDLRKIAKMVPKKRQTMLFSATMPKAIADLAGEYLVDPVKVEVTPPGKAADKVEQYVHFVGGKNDKTELLRKSLTENPDGRAMVFLRTKHGAEKLMKHLENIGYSVASIHGNKSQGQRERALKAFRDGSIKTLIATDVAARGIDIPAVSHVYNYDLPEVPDAYVHRIGRTARAGRDGIAIAFCAPDEAKLLRDIERLMGIDITVASGEAPANIGGGPRRANGNGNNRNRNGGQGREGQGRGEGRGDQNRSEHRGSRQERRPRREGEGSEVRAGGEERRPRPERPTSRNEDFRGQRRGEATPDLGPDNDLASTSDFRASAKPQRPAHHGAHANGEPSGHHRGNSRHAHGRPARKHGEDRGPQQAQAGEPRRDGNGGNRRGGSGSRNGGGQRRERA

SEQ ID NO: 3422 - DNA, 1320 bp, Magnetococcus sp. MC-1
  CDS (1)..(1320): transl_table=11
gtgtctgattttgcttcgttgaatcttgttaaacccctccttaatgccttaactcaagctggttacaccaccccaacccccattcaagcacaggctattccgcatctgttggcaggtcgggatctgctgggcattgcccagaccgggacaggtaaaaccgcagcttttgcactacccatactcaataagttgagccaaattaaaggtcgccccgcgcccaatgcgccccgcgccttgatccttaccccaacccgtgagctcgcttcacaaatcggcaacagcatcgccgtttatggtaagcatgtgccaaccacccacaccgttgtatttggtggcgtgggcaaacagccacagattcgcgccctctcccgtggcgttgatattttggtcgctacccctggccgcttactggatcttatgggggagcgccatgttcgcctggatcagattcaggtttttgtactggatgaggccgaccgcatgctggacatgggctttatccatgatatccgtcgcatcattaaggtgatcccagctaagcgccatacgctgctcttttctgccaccatgcccaaggatattgcagagctggcagagggcttattgaccaatcccgccaaggttgaggtcacgccagaatccacgacggttgagcgtattacgcaaaaggtgctgtttgtcgataaacagaacaagcgttctttgctcaaaaatgtgcttgagcatgagtctattgagcaggttttggtctttacccgcaccaagcatggggccaaccgggtggcggagtatcttgacaaacaccgcattgcctctgcggcgattcatggcaacaaatcccaaagcgcccgcgaaaaggcactggatggctttcgcaaaggcaagttaaaggttttggtagcgacagatattgcggcgcggggaattgatgtggcgggcattagccacgtgatcaattttgacctgcccaatgagtcggaaagctacgtgcaccgcataggccgcacagcgcgcgctgggcgggatggcaatgccatctctttttgcgatgctgaagagcgcggctatctgctggatattgaaaagaccatccgccagaccgtgccggttgatattgaccatgaattccattgcgaagtggttgccaacgcagccccaatcaaacccagccgcaaacgcagcagcggccatggtgccggtggtggcaatccccatggtgggggacatcgtcgcggcaaccccagtaccgccagcaaaccacgtcagcatagcggacgtcgcaccccatccagcaagggtcgtagcggtagcgtagcgtaa

SEQ ID NO: 3423 - protein, 439 aa, Magnetococcus sp. MC-1
MSDFASLNLVKPLLNALTQAGYTTPTPIQAQAIPHLLAGRDLLGIAQTGTGKTAAFALPILNKLSQIKGRPAPNAPRALILTPTRELASQIGNSIAVYGKHVPTTHTVVFGGVGKQPQIRALSRGVDILVATPGRLLDLMGERHVRLDQIQVFVLDEADRMLDMGFIHDIRRIIKVIPAKRHTLLFSATMPKDIAELAEGLLTNPAKVEVTPESTTVERITQKVLFVDKQNKRSLLKNVLEHESIEQVLVFTRTKHGANRVAEYLDKHRIASAAIHGNKSQSAREKALDGFRKGKLKVLVATDIAARGIDVAGISHVINFDLPNESESYVHRIGRTARAGRDGNAISFCDAEERGYLLDIEKTIRQTVPVDIDHEFHCEVVANAAPIKPSRKRSSGHGAGGGNPHGGGHRRGNPSTASKPRQHSGRRTPSSKGRSGSVA

SEQ ID NO: 3424 - DNA, 1656 bp, Magnetospirillum magnetotacticum MS-1
  CDS (1)..(1656): transl_table=11
atgcaccccaggctgctccatcacgcgggccgcctcccggaccgtcggacccatcatattcccgtgcgagtcgtctcgccggccttcgggttccgctgcctcgaaagtaacgacttgacccagtttaccgatttcggcctcgccgagcccatcctgcgcgcgcttggcgaggctggctacgtgtcgccgacgccgatccagacgcaggccctgccgccggcgatggaggggcgcgacctctgcggcatcgcccagaccggcaccggcaagaccgccgccttcgctttgccgatcctgcaccgcctctcgctcgagaaccgccgggcgccgcgccgcggttgccgcgtgctcgtgctctcgccgacccgtgagctggcgagccagatcgccgagagcttctcggattacggccggcacctgccctataccagcaccgtcgtgttcggcggcgtgaacatcagccgccaggagcgcgcgatcgcgccgggcgtcgacatcctcgtcgccactcccggccggttgatcgacctcgtcgaccgccgggcgctgacgctggagggcgtcgagatcctcgtcctcgacgaggccgaccagatgctcgacctcggcttcatccacgcgctgaagcgcatcgtgaagatgctgccggcgcggcgccagagcctgttcttctcggccaccatgccgaagaacatcgccggcctcgccgaccagtatctctccaacccggtgcaggtcgcggtgactccggtggccactaccgccgagcgcgtcgatcagcaggtcatcttctgccataccggtgccaagcaggcgctgctcaaccacgtcctgcgcgatccgaagatcgagcgcgtcctcgtcttcacccgcaccaagcatggggcggaccgggtggtgcgcggcctcgacaaggtcggcatcgtcggcgcggcgatccacggcaacaagagccagccgcagcgtgagcgggcgctggccgccttccgcgacggctcctgccgcgtgctcgtggcgaccgatatcgcggcgcgcggtatcgacgtcgagggcgtcacccatgtggtgaactacgacctgccgaacgtgccggaatcctacgtccaccgcatcggccgcacggcccgcgccggcgcggaggggcaggcgatctcgttctgcaacgacgaggagcgcgcctacctgcgcgacatcgagcggaccacgcgccagaaggtcccggtggtcggcttccccgagggcttccagccgccgagccgccaggaggcgcaggagaccgccgccgaggaggcgcgccgcccgccgcgtcagccgcagggtcgtccgggccagcgccagggccgtccgggcggtcgtggccaggaaggtcgcggcgagggtcgcggcgagcaccgcgcccacgaggcccgcggcggtcgccccggcggccagccgggccatcgccaggaccagcgtcaggacagccgtgggccgcgtcccgatggccagcgctccgaccagcgccgcccggagcgggccggcgagggccggccgcagggcgcgcgtccccagggcgggcgcccgaatgacggtcgtcgcggtgatgcacggcccgcccgctccggcgccgagggcggccgggcgatcggctggctcgaccgttccccgcgttcctga

SEQ ID NO: 3425 - protein, 551 aa, Magnetospirillum magnetotacticum MS-1
MHPRLLHHAGRLPDRRTHHIPVRVVSPAFGFRCLESNDLTQFTDFGLAEPILRALGEAGYVSPTPIQTQALPPAMEGRDLCGIAQTGTGKTAAFALPILHRLSLENRRAPRRGCRVLVLSPTRELASQIAESFSDYGRHLPYTSTVVFGGVNISRQERAIAPGVDILVATPGRLIDLVDRRALTLEGVEILVLDEADQMLDLGFIHALKRIVKMLPARRQSLFFSATMPKNIAGLADQYLSNPVQVAVTPVATTAERVDQQVIFCHTGAKQALLNHVLRDPKIERVLVFTRTKHGADRVVRGLDKVGIVGAAIHGNKSQPQRERALAAFRDGSCRVLVATDIAARGIDVEGVTHVVNYDLPNVPESYVHRIGRTARAGAEGQAISFCNDEERAYLRDIERTTRQKVPVVGFPEGFQPPSRQEAQETAAEEARRPPRQPQGRPGQRQGRPGGRGQEGRGEGRGEHRAHEARGGRPGGQPGHRQDQRQDSRGPRPDGQRSDQRRPERAGEGRPQGARPQGGRPNDGRRGDARPARSGAEGGRAIGWLDRSPRS

SEQ ID NO: 3426 - DNA, 1569 bp, Listeria monocytogenes str. 1/2a F6854
  CDS (1)..(1569): transl_table=11
atgacattgacaaaattttcggagttcggactggacgaaaaaattgtaaaatcagtaaatcggatggggtttgaagaagcaacaccaatccaagaaaagacaattccactaggattagaaggtaaagacttaatcgggcaagcacaaacaggtactggtaaaacagccgcttttggtcttccaatgattcacaaaattgaccaaaagagtaacaacgtacaagctttaattattgctccaacacgtgaacttgcaatccaagtttcagaagagctttataaacttagctatgataaacatgtacgtgtgctagcggtttacggtggtagtgatatcagccgtcaaatccgttcacttaagaaaaacccacaaatcgtagttggtacgccaggacgtattttggatcatattaaccgtcgcacactgaaactagatcacgtggaaacacttgtactagatgaagcagacgaaatgctaaacatgggcttcattgatgatatcgaaactattctaaaagaagtaccagcagaacgtcaaactttactattttctgcaacaatgcccgatccaattcgccgtatcggtgaacgtttcatgcatagcccagaacttattcgtattaaagcaaaagaaatgactgcactattaatcgaacaattcttcgtaaaagtgcatgaaaaagaaaaatttgacgtattatctcgtttattagatgttcaagcaccagaattagcaattgtttttggtcgtacaaaacgtcgtgtagacgaactatctcgcgcgcttgatatgcgtggttacgtggctgaaggtatccacggtgacttaacgcaagcaaaacgtatgagcgtactacgcaaatttaaagaaggaaaaattgatgttctagttgcaacagacgtagcagcacgtggacttgatatttccggtgtaacacatgtatataactatgatattccacaagatccagaaagctatgttcaccgtattggtcgtactggtcgtgctggtaaagaaggtatggcgattacattcgtacaacctcgtgaaatgggttatttacgtattgtggaagaaactacgaaaaaacgtatgcaaccacttcaagctcctacatgggacgaagcatttgcaggccaattacgcgtagcaactgaaaaaattcaagaagcaattacagaagaaaacttagctgactacaaaacgtttgctaacgaacttcttgaaaaatacgatgcaactgacatcgcagcagcaatgcttaaaatgttagcgaaagaaccagataaaactcctgtccatattactgaagagcgtccattaccatcccgtggtggcggtggctacaaaggtaaaaatggtaaaggcggcaaaggtggcggctatcgcggcggaagcggcaaaggcggaagctaccgtgatcgtaacaacagcggtaaaggtcgtcgtagcggcggcggttccggtggtggaagcggctctggcggtggcggcaatcgtgatcgtcgtggcggcggagaacaacgcagcggcggcaacaaaggcaactactcacaaaaatctaaataa

SEQ ID NO: 3427 - protein, 522 aa, Listeria monocytogenes str. 1/2a F6854
MTLTKFSEFGLDEKIVKSVNRMGFEEATPIQEKTIPLGLEGKDLIGQAQTGTGKTAAFGLPMIHKIDQKSNNVQALIIAPTRELAIQVSEELYKLSYDKHVRVLAVYGGSDISRQIRSLKKNPQIVVGTPGRILDHINRRTLKLDHVETLVLDEADEMLNMGFIDDIETILKEVPAERQTLLFSATMPDPIRRIGERFMHSPELIRIKAKEMTALLIEQFFVKVHEKEKFDVLSRLLDVQAPELAIVFGRTKRRVDELSRALDMRGYVAEGIHGDLTQAKRMSVLRKFKEGKIDVLVATDVAARGLDISGVTHVYNYDIPQDPESYVHRIGRTGRAGKEGMAITFVQPREMGYLRIVEETTKKRMQPLQAPTWDEAFAGQLRVATEKIQEAITEENLADYKTFANELLEKYDATDIAAAMLKMLAKEPDKTPVHITEERPLPSRGGGGYKGKNGKGGKGGGYRGGSGKGGSYRDRNNSGKGRRSGGGSGGGSGSGGGGNRDRRGGGEQRSGGNKGNYSQKSK

SEQ ID NO: 3428 - DNA, 1341 bp, Xylella fastidiosa Ann-1
  CDS (1)..(1341): transl_table=11
atgaacttcgaaactttgggattgttgccttccttacttcgtgctcttagcgagcaaggttacgaaataccgaccccaattcagcagcaggcgattccattggcattagctggccacgatttgcttgctgccgcgcaaacagggacaggtaagacggctgcgttcggcttgcctgtattgcaacgattgatggccgcttcatctaatgttggtgccggtaagccgcgtgctttggtgctgacaccgacccgtgagctggcgactcaggtccacgacagcctacgtggttacgccaagtatcaacgtgtatcaagtgcggtgatttatggtggtgtggggatggggaatcagttggatgtgctgcgccgtggcgtagatttgttgattgcctgcccgggtcgtttgattgatcatattgaacgtcgcagtgtggatttgtcaggcgtcgggattttggtattagatgaggctgatcgcatgcttgacatgggtttcctcccctcaattaaacgtatcctcggcaaactaccgcggcagaatcgccaaactctgctgttctctgcgacatttgctgagccgattaaacagttggcgttagagtttatgtgccgcccacgcgaggtgatggtggcgtcgcataacaccgttgctgagaccattacgcatcgtgtgcatcctgtcgatgttagccgcaagcgtgaattgttgttgtatctgttggctcaagatagcagggagcagacactggtgttcgtgcggaccaagcatggcagtgacaagcttgctacgttcttggagaaatacggaatcaagacagcagcgattcacggtaataagactcagggccagcgtctgcgtgcattaaacagtttcaaagcagggcgagttaccgtgctggtggccactgacattgctgcgcgcggaattgatattgaccaattgccaaaggtgatcaattacgatttgcctatggtggctgaggattatgtgcatcgcatcgggcgtactggacgcaatggtgtgcagggagaggcaatttcattagtcactcaggaggacgctaagttattgcgtcagatcgtgcgtttgcttgatcgtgatatggatattcgcgatgtaccggatttcgaacctcaagtcccgatccgttggggtaacagtgctccgggaaagagtaagcagcctgctggacagcacccaccacgtaagagtcaacatcggcgagcattcggcaaagcatctgtgcatacgacgcctgctttaaaaaaacaatcaggtgtacaacatagcaatgggtcccgtaatcgtgatggaatgttcccggttcatcagcgtggttga

SEQ ID NO: 3429 - protein, 446 aa, Xylella fastidiosa Ann-1
MNFETLGLLPSLLRALSEQGYEIPTPIQQQAIPLALAGHDLLAAAQTGTGKTAAFGLPVLQRLMAASSNVGAGKPRALVLTPTRELATQVHDSLRGYAKYQRVSSAVIYGGVGMGNQLDVLRRGVDLLIACPGRLIDHIERRSVDLSGVGILVLDEADRMLDMGFLPSIKRILGKLPRQNRQTLLFSATFAEPIKQLALEFMCRPREVMVASHNTVAETITHRVHPVDVSRKRELLLYLLAQDSREQTLVFVRTKHGSDKLATFLEKYGIKTAAIHGNKTQGQRLRALNSFKAGRVTVLVATDIAARGIDIDQLPKVINYDLPMVAEDYVHRIGRTGRNGVQGEAISLVTQEDAKLLRQIVRLLDRDMDIRDVPDFEPQVPIRWGNSAPGKSKQPAGQHPPRKSQHRRAFGKASVHTTPALKKQSGVQHSNGSRNRDGMFPVHQRG

SEQ ID NO: 3430 - DNA, 1296 bp, Roseovarius nubinhibens ISM
  CDS (1)..(1296): transl_table=11
ttgttcgattttgacatgctcggtctcgcaccggccctcaacgaggcgctgacccgcgccggtttctctgaacccaccccgatccagaaccaggcgatcccgcttgcgctcgaaggtcacgacattctcggcctcgcccagaccggcactggcaagacgctggcctttggcctgccgctgatcaaccacctgctcgcagagcccggcaaaccggcgcccaaaaccgccaaggcgctgatcctcgcgccgacccgcgaactggtcaaccagatcgccgacagcctgcgcaacctcaccgacggcaccagactgcgcgtcgccacggtcgttggcggccagtcgatcaaccgtcagatcaccttcctcgcccgtggcaccgacatcctcgtcgccaccccgggccggctcatcgacctgatggaccgccgcgccgtcgatctcggctcggtgcgccacctggtgctcgacgaggccgaccagatgctcgacctcggcttcatccacgccctgcgcaagatcgcgccgcgcctcggcaccccgcgtcagacgatgctgttctcggccaccatgccgaaacagatggaagagctgagccgcgcctatctcgagaacccgcgcaaagtgcaggtctctcccccgggcaaggccgccgacaagatcacccaatcggtgcatttcctcgaaaaacccgccaaaccgtcgaaactgcgcgaaatcctgtcgcgcgacatggacgcgctgacgctggtcttttcgcgcaccaaacatggcgcggaaaagctgatgaaaggcctcgtggccgacggctataacgccgcctcgatccatggcaacaagagccagggccaacgcgaccgcgccatcaaggccttccgcgcgggcgagatcaacgtgctggtggcgaccgatgtcgcggcccgtggcatcgacatccccggcgtcgcctatgtgatcaactacgacctgcccgacgtgcccgacaactacgtgcaccgcatcggccgcaccgcccgggctggccgcgaaggcgaggccattgccttttgctcgtcagaagaggccgatctcctgcgtcaaattcagcgcctgatgaaaatcgacatccccgtcgccagcggcaccctgccgcaaggcgcggccgatgaggcgcgcggcgcgaaacccggtggcaatcgccgtcgtggcggccgtggcggcccccctgccgccaaccgtggcggcaaacccgcccataccaagcccggcggccagtccaagggccgacgcccccgccgccgcagcgctgctgccagctaa

SEQ ID NO: 3431 - protein, 431 aa, Roseovarius nubinhibens ISM
MFDFDMLGLAPALNEALTRAGFSEPTPIQNQAIPLALEGHDILGLAQTGTGKTLAFGLPLINHLLAEPGKPAPKTAKALILAPTRELVNQIADSLRNLTDGTRLRVATVVGGQSINRQITFLARGTDILVATPGRLIDLMDRRAVDLGSVRHLVLDEADQMLDLGFIHALRKIAPRLGTPRQTMLFSATMPKQMEELSRAYLENPRKVQVSPPGKAADKITQSVHFLEKPAKPSKLREILSRDMDALTLVFSRTKHGAEKLMKGLVADGYNAASIHGNKSQGQRDRAIKAFRAGEINVLVATDVAARGIDIPGVAYVINYDLPDVPDNYVHRIGRTARAGREGEAIAFCSSEEADLLRQIQRLMKIDIPVASGTLPQGAADEARGAKPGGNRRRGGRGGPPAANRGGKPAHTKPGGQSKGRRPRRRSAAAS

SEQ ID NO: 3432 - DNA, 1290 bp, Synechococcus sp. WH 7805
  CDS (1)..(1290): transl_table=11
gtggcttgcggcggcatcacaatcagcgcagtttctgtctccattgatcctcaggctttgttttcggatctgggattaggtgaacccctgctggaggcactccaggacaagggttatacccatccatcaccgattcaggcgcaggcgattcctgcagtgattgatggcagggatgtgatggcagctgcgcaaaccggtacagggaaaacagctggtttcacgttgccggtgctggagagacttcggcacggcaaaccggctggacgaggccagattcgcgctcttgtcctcacgcccaccagggaactcgccgcccaggtccttgagaatgtgagggcttacagcagtcacttgcctctccgcagcgatgttgtgttcggcggcgtgaaggccaacccacagatcaatcgccttcgtgggggagtggatctgctggtggccacgcccggacggttgcttgatcttcatcagcagggggccctgcactttgatcagctggagtgtctggttcttgatgaagctgatcgcatgctcgatatgggtttcattcatgacatccgtcgcttgatcaggttgatgcctgtgaagcgtcaaacacttctgttttccgccacgttcagtgcaccaattcgcaagttggcgtcgggccttctccacgatccagtgcatcttcaagtcacgccagaaaatcagacggcgcgatcggtggagcaagtggtgcatccttgtgacatggcgcgcaaaagtgatttgctcagccatctcattcgtgcgggtgactggcgtcaggtgctcgtgttctcgcgcaccaagcacggagccaatcgggttgctgaccgtctcagcaaggaaggcctttccgcggcggccatccatggcaacaagagtcagggggccagaacccgtgcccttcagggtttcaagcaaggaaacatccgggtgctcgtcgctacggatatcgccgccagaggcatcgatattcagcagcttccccatgtggtgaatctggatctgccgaatgtggcggaagattacgtgcaccgcatcggtcgtacgggtcgtgcgggggaaacggggcatgcagtgtccctggttgccgctgaagaagcgcttctcctcaaagcgatcgagcggctgacgggtgaagagctgacgcgtcagaccgtggacgggtttgagcccactgtgctcaaggctccccccctggatctcagcggtggtcgcaagcgcccacctggcaaacccagagcgcgcagcgcaccctcacccgtacgcggccgtcatcgctaa

SEQ ID NO: 3433 - protein, 429 aa, Synechococcus sp. WH 7805
MACGGITISAVSVSIDPQALFSDLGLGEPLLEALQDKGYTHPSPIQAQAIPAVIDGRDVMAAAQTGTGKTAGFTLPVLERLRHGKPAGRGQIRALVLTPTRELAAQVLENVRAYSSHLPLRSDVVFGGVKANPQINRLRGGVDLLVATPGRLLDLHQQGALHFDQLECLVLDEADRMLDMGFIHDIRRLIRLMPVKRQTLLFSATFSAPIRKLASGLLHDPVHLQVTPENQTARSVEQVVHPCDMARKSDLLSHLIRAGDWRQVLVFSRTKHGANRVADRLSKEGLSAAAIHGNKSQGARTRALQGFKQGNIRVLVATDIAARGIDIQQLPHVVNLDLPNVAEDYVHRIGRTGRAGETGHAVSLVAAEEALLLKAIERLTGEELTRQTVDGFEPTVLKAPPLDLSGGRKRPPGKPRARSAPSPVRGRHR

SEQ ID NO: 3434 - DNA, 1569 bp, Vibrio sp. Ex25
  CDS (1)..(1569): transl_table=11
atgggttttacctctttaggtctatctgctccaatccttaaagctattcaagaaaaaggctacgacaccccttcgccaattcaggcaaaagcaattcctgctattttggaagggaaagacgtaatggcagcagcgcagactggtacaggtaaaactgcaggctttacgctaccgattcttgagcgtttatcgaacggctctcgcgttcgtgctaaccaagttcgagcacttatcctgacgccaacgcgtgaacttgcagctcaggtgcaagaaaacgtgtttatgtacggccgtcaccttccactaagcagtgcagttgtttttggtggtgtgaagatcaacccgcaaatgcagcgtcttcgcaaaggtgcggatgtgctggtagcaacaccaggccgcctgatggatttgtacaaccaaaatgcagtgaagttcgaccaactggaagtgctagtactggacgaagcagaccgcatgctggatatgggctttatccgcgatattcgcaaaatcctagccctgctaccaaaacaacgtcagaacctacttttctcggcgactttctcggatgaaatccgcgaccttgcgaaaggtttggtgaacaacccggttgagatttccgttaacccggcaaactcgacggcgagaacggttgagcaaagcatctacccagcagacgtgaagaagaaagcaccgatgttggttaaattgatcaaagacggcgattggaagcaagtgctggtgtttacgaaaacgaaacacggcgcaaaccgtctggcgaagttcctgatcgaacaaaacctaccggctgctgccatccacggcaacaagagccaaggcgcgcgtactaaagcactggcggattttaaatcgggtgaaattcgtgtgttggtcgcgacggacattgctgcgcgcggtatcgatattcctcaattaccacaagtggtgaactttgagctacctaaagtggcagaagactacgttcaccgtattggtcgtactggccgcgcgggcgaagtaggtaaagcgatttcactcgtgtgtgcgctagaagcatctgagttgtttgcgattgaacgtttgattcaagaagtgctaccacgtaaagagttggaaggttttgcgccaaccaatgtagtgccagaatctaaactggatactcgaccaatcaaaccaaaaaaacctaagaagccgaaaaaaccaaaagcgccaaatgctgcgggtgaaaacgctccagcaaccgaaaagaaagcaggcaatggtgcaaacaaacctaaacgtcgcttcaacggtggtaacaacggcaacaaaaacagcaccaatcaaggtggtgcgggcaagcctaaaagcaacagtgaaggccaaggtcgtacaaacagtaaaccagatgaccgtaaacctaacggcaacaagccaaatggcaataaaccgaatggaaataaaccaaacggtagtaagagtggcaacgctggtaaaccgtcaggtaaccgcaagccaaacaatgctaagcctgcaggaaacaaaccgtcaggtcagcgccgtaagcctcgtccgcaaactgcaaactaa

SEQ ID NO: 3435 - protein, 522 aa, Vibrio sp. Ex25
MGFTSLGLSAPILKAIQEKGYDTPSPIQAKAIPAILEGKDVMAAAQTGTGKTAGFTLPILERLSNGSRVRANQVRALILTPTRELAAQVQENVFMYGRHLPLSSAVVFGGVKINPQMQRLRKGADVLVATPGRLMDLYNQNAVKFDQLEVLVLDEADRMLDMGFIRDIRKILALLPKQRQNLLFSATFSDEIRDLAKGLVNNPVEISVNPANSTARTVEQSIYPADVKKKAPMLVKLIKDGDWKQVLVFTKTKHGANRLAKFLIEQNLPAAAIHGNKSQGARTKALADFKSGEIRVLVATDIAARGIDIPQLPQVVNFELPKVAEDYVHRIGRTGRAGEVGKAISLVCALEASELFAIERLIQEVLPRKELEGFAPTNVVPESKLDTRPIKPKKPKKPKKPKAPNAAGENAPATEKKAGNGANKPKRRFNGGNNGNKNSTNQGGAGKPKSNSEGQGRTNSKPDDRKPNGNKPNGNKPNGNKPNGSKSGNAGKPSGNRKPNNAKPAGNKPSGQRRKPRPQTAN

SEQ ID NO: 3436 - DNA, 1398 bp, Alteromonadales bacterium TW-7
  CDS (1)..(1398): transl_table=11
atgagttttgaaggtctaggtttatcacagtctttagttaatgcggttttagaaaagggctatgaaacgccaacgccaattcaggctcaagcaattcctgcaattatagagcgtcgcgatgtaatggcggcagcacaaactggcacaggtaaaacagcgggttttacgcttccacttatcgaacgtttatctacgggcccaaaagcaaaaagtaaccatgtacgtgcgcttattttagcgcctacacgtgaacttgcacttcaggtaagcgaaaacgttgaagagtacgctaagcattcaaacgtgagttcgtttgttgtgtatggtggggttaaaattaacccgcaaatgcagcgcttgcgtaaaggtgtcgatattttagtggcaacgcctgggcgtttaattgatttacataatcaaaatgccgttaagtttgatagcgtagaagtgctcgttttagatgaagccgaccgcatgctcgacatggggtttattcacgacattaaacgccttattgctaaaatgcctgctaagcgccaaaacctcatgttttcggctacgttttcagatgatattcgagcgttagctaaaggattaataaacgatccggttgaaatttcagtcgctgcaaaaaacaccacagctaaaagtgtaacgcaaagcgtttacgcggtagataaaggccgtaaaacagctttactaagtcatttaattcgtagtaacgattggcagcaagttttagtatttagccgcactaaacacggtgcaaaccgattggttaaacaacttgagcgcgacgatatcgtaggcgcagctattcatggtaataaatcgcaaggcgcacgtgtaaaagcgttagatggttttaaaagtggcgaagtacgtgtacttgtagccactgatattgtggcacgtggccttgatattgttgagcttccgcatgttgttaactacgacttaccaaatgtgtatgaagattatgttcaccgtattggccgtacaggacgtgcgggtgcatcgggccatgcaatttcgtttgttacagttgatgatgcagtcgatttatacggtattgaacgctttattggtgagcttattcctcgtgctgaagaagagggctttgaaccagtaaacccagtagcagaacgcgcattagatgcacgcccattacctgctaaaaagccaaagaaaaagcaaccttttaacaaacctaaatctgatagcagtaaaccaaatagtaaaaagccaaataatggcggcaacggtactggccctcgtcgtggtggctctaaaaagcctgcaactaaaaaagatgataacgcacaaaacccttgggcaaagcgtcagtcggtaggcggaaacggtcagcgccgtcgccgtccaaataataatgactaa

SEQ ID NO: 3437 - protein, 465 aa, Alteromonadales bacterium TW-7
MSFEGLGLSQSLVNAVLEKGYETPTPIQAQAIPAIIERRDVMAAAQTGTGKTAGFTLPLIERLSTGPKAKSNHVRALILAPTRELALQVSENVEEYAKHSNVSSFVVYGGVKINPQMQRLRKGVDILVATPGRLIDLHNQNAVKFDSVEVLVLDEADRMLDMGFIHDIKRLIAKMPAKRQNLMFSATFSDDIRALAKGLINDPVEISVAAKNTTAKSVTQSVYAVDKGRKTALLSHLIRSNDWQQVLVFSRTKHGANRLVKQLERDDIVGAAIHGNKSQGARVKALDGFKSGEVRVLVATDIVARGLDIVELPHVVNYDLPNVYEDYVHRIGRTGRAGASGHAISFVTVDDAVDLYGIERFIGELIPRAEEEGFEPVNPVAERALDARPLPAKKPKKKQPFNKPKSDSSKPNSKKPNNGGNGTGPRRGGSKKPATKKDDNAQNPWAKRQSVGGNGQRRRRPNNND

SEQ ID NO: 3438 - DNA, 1296 bp, Moritella sp. PE36
  CDS (1)..(1296): transl_table=11
atgggtttttctgctttaaatctgaatcaaaatttaattaatactgttaccaagttaggctatgaaacgccgacaccaattcaagctcaggctattccagctattctggaagggcgtgacatcatgggtggtgcacagacgggtacaggtaaaactgctgcgtttgcattgcccatcattcaccagttaatggccgagcagttaacagctaacgcaacagaaccaacagcgaaaaaacaaattcgtgctttaatattaacgccaacgcgtgagttatcacagcaagtacacaaaagctttgtgacctatagcgaagacagtgaattaacgtctgaacttgtttacggtggcgttagcattaacccacaagtaaaagcactggtacaaggtgctgacattttagttgcaacaccaggccgtttacttgatctattagatcgtgaaacgctaacacttgagtttgttgaaaagatcgtattcgatgaagctgaccgtatgctcgatatgggctttatggaagaaattcgtcgtatcttaaaacacttaccgaaaaaacgtcaaactatgttgttctcggcaacatttgatgatgcgatctttaaactaagcaagagcttgttaaacgatccattattagtcgaagtcgatactcgtaatgcagcagctgagcaagttgaacaaattgtttatgcggtagataatgatcgtaaacgtgagttaacgtcttacctaattggttctcgtaactggcatcaagttcttatctttactcgtactaagcagggcgcagatagtcttgcaaaagaaatgtgtaaagatggtattaagacaatcgcagtacacggggacaaatcacagggcgcacgtgaacgtggtcttgaagatttcaaaaatggtaaagttcgcgcattagtggcgacagatgttgctgcacgtggtcttgatatcgaacagcttaagcatgtgatcaactttgaattaccgtttaaagcagaagactacattcaccgtatcggtcgtaccggtcgtgctggtttatctggtactgctacgtcgttagtaagcattggtgaaaactggttattagaagaaatcgaaacactgcttgatacccgtttagttgcacagtggttaccgggttatgaaccagacctaagcaaacctgttgatgatggtcgtggtaaaggcggcggtaaaggtaatggtcgtacagatgacaaacgccgtgctaagaatcgctcttacggtaagaaaaccaataatcgcgcgaaaaaagacacaaaaccaagtcgttaa

SEQ ID NO: 3439 - protein, 431 aa, Moritella sp. PE36
MGFSALNLNQNLINTVTKLGYETPTPIQAQAIPAILEGRDIMGGAQTGTGKTAAFALPIIHQLMAEQLTANATEPTAKKQIRALILTPTRELSQQVHKSFVTYSEDSELTSELVYGGVSINPQVKALVQGADILVATPGRLLDLLDRETLTLEFVEKIVFDEADRMLDMGFMEEIRRILKHLPKKRQTMLFSATFDDAIFKLSKSLLNDPLLVEVDTRNAAAEQVEQIVYAVDNDRKRELTSYLIGSRNWHQVLIFTRTKQGADSLAKEMCKDGIKTIAVHGDKSQGARERGLEDFKNGKVRALVATDVAARGLDIEQLKHVINFELPFKAEDYIHRIGRTGRAGLSGTATSLVSIGENWLLEEIETLLDTRLVAQWLPGYEPDLSKPVDDGRGKGGGKGNGRTDDKRRAKNRSYGKKTNNRAKKDTKPSR

SEQ ID NO: 3440 - DNA, 2103 bp, Oryza sativa subsp
  CDS (1)..(2103)
  misc_feature (551)..(551): n is a, g, c or t
atgcaggccacctcacgccacacgctgtatcgcgcccatagtttagcgtggtttaggtggtggcccatagtatacaacgtcatacaaaaagcttccgtacccgggccgcttccggatccggcccataccgggcccatcaacggggccaccgtcatagagcgcgcaagaggcgtgacgtgtcccgtcgcgtcgcgggccaagtcagatatttccgttgcgaacgccgaggaatcggcgcccgcgactggtgctgctcccacccctgttgctaatcaccagaactcacgccccactcgcagcgcatacgtgcctcctcacctccgtggccaggcaccaaccacaactgcagctccagctccagctccaggaccagctgctgtccagccctcagcttctgtacagccttctggttacgcagctattgttggtggctctcgctgggctggccctgccagtggtgatggtactggcgctgtatgtggcccacgccagagcgttggtggtcgtggtgggggtgggggtgggggtgggggttggaactcccgccctgngtgggaccggagagaccgtgaacctaacccttttgccaatagcgaggcagaggaagccacagaggttgattttgatacggcaaacactggcatcaactttgatgcctatgaggacattcctgtggaaacaagtggccatgatgtgccaccgccagtcaatactttcgcagagattgatttgggtgatgcgctgaatgagaacatacggaggtgcaaatatgtgaaacctacgccagtgcagcggtatgccattccaatctccattgcagggcgggatctcatggcttgtgctcagacagggtctggaaagacagccgccttttgtttccctatcattagtgggattatgagctctaggccaccacagaggccaaggggatcgaggactgcataccctcttgcattgattttatcccccactcgcgaattatcagtccaaattcatgaagaagcaaggaaattcgcataccagactggtgttagggtggttgttgcgtatggtggagcaccaatacatcaacagttgagggaattggaaaggggcgttgaaatccttgtggcaactcctggtcggttgatggatctgctggagagggctagagtatcactgcaaatggtgaagtacttagctcttgatgaagctgatcgaatgcttgacatggggttcgagccgcaaattcgtaaaattgttgagcagatggacatgccccctcgcggtgtgaggcagacaatgttgtttagtgctacttttccaaaagaaatacagcgcatggcttcagatttccttgcggactacatcttccttgctgtaggaagagttggttcaagtactgacttgattgctcaaagggtagagtttgtccttgaagcggataaaagaagttacctcatggatctcctccatgcccaaaaagcgaatggtactcatgggaagcaagcgcttactctggtctttgtggagacaaagaggggagctgatgctttggagaactggctttacacaaacgggttccctgcaacaagtattcatggcgaccgaacacaacaggaaagagagtacgcgcttagatcattcaagagtggagcaacacccatccttgttgcgactgatgtagctgcccgtggacttgacatacctcatgttgcccatgtcatcaattttgacctcccaaatgacatagatgactatgttcatcgtatcggacgaacaggacgagcagggaagtctggcttggcaactgcatttttcaacgagggcaatctatccctggcgaggccgttatgtgagctaatgcaggaagcaaaccaggaggttcctcaatggcttgaacgatactcggcccgttcttcgttcggaggtggtggtggcagaaaccgccgatcaggcggtgcccgttttggtggccgtgacttccgccgcgacaataggggtggaggcggcggcggttatggtggtggcggtggtggctatggaggcggcggttatggagggggcggtggatatggcggtggctatggtggtggtcaaggctcaactagttcgtgggactga

SEQ ID NO: 3441 - protein, 700 aa, Oryza sativa subsp
  misc_feature (184)..(184): The Xaa at location 184 stands for Ala, Glu, Gly, or Val.
MQATSRHTLYRAHSLAWFRWWPIVYNVIQKASVPGPLPDPAHTGPINGATVIERARGVTCPVASRAKSDISVANAEESAPATGAAPTPVANHQNSRPTRSAYVPPHLRGQAPTTTAAPAPAPGPAAVQPSASVQPSGYAAIVGGSRWAGPASGDGTGAVCGPRQSVGGRGGGGGGGGGWNSRPXWDRRDREPNPFANSEAEEATEVDFDTANTGINFDAYEDIPVETSGHDVPPPVNTFAEIDLGDALNENIRRCKYVKPTPVQRYAIPISIAGRDLMACAQTGSGKTAAFCFPIISGIMSSRPPQRPRGSRTAYPLALILSPTRELSVQIHEEARKFAYQTGVRVVVAYGGAPIHQQLRELERGVEILVATPGRLMDLLERARVSLQMVKYLALDEADRMLDMGFEPQIRKIVEQMDMPPRGVRQTMLFSATFPKEIQRMASDFLADYIFLAVGRVGSSTDLIAQRVEFVLEADKRSYLMDLLHAQKANGTHGKQALTLVFVETKRGADALENWLYTNGFPATSIHGDRTQQEREYALRSFKSGATPILVATDVAARGLDIPHVAHVINFDLPNDIDDYVHRIGRTGRAGKSGLATAFFNEGNLSLARPLCELMQEANQEVPQWLERYSARSSFGGGGGRNRRSGGARFGGRDFRRDNRGGGGGGYGGGGGGYGGGGYGGGGGYGGGYGGGQGSTSSWD

SEQ ID NO: 3442 - DNA, 1947 bp, Oryza sativa subsp
  CDS (1)..(1947)
atgcgatcttcatgggctgactcagctgcgaacgccgaggaatcggcgcccgcggctgctgctaaccacggcaactcgcgcctcccgcgcagctcatacgttcccccgcacctccgcggccaagcggctcctgcagcgccggcgcaagctggcgcgctgccctcggccgccgcccccgccgcgcagccttctgttggccagcctggtgtggttggtggccctcgctgggcgggcattgtgaatggtggtggtggtggtggtggtgggagcgtaggtggttctcgccagggctttggtgttggtggccgcggtggaggaggtggtggtggcggtggtgcatggaactcccgccctgggggttgggaccgaagagaccgtgaaccggatccttttgccaatagtgaggctgcggaagttgactttgagggcgagaacactggcatcaattttgaagcctatgaagacatccctgttgagacaagtggccatgatgtgcccccaccagccaatacatttgcggagattgatttgggtgacgcgctgaatgagaatatcagaaggtgcaaatatgtgaagccgacaccagtgcagcgttatgccatcccaatctccattgcaggacgggatctcatggcctgtgcacaaacaggatctggaaagacagcagccttttgtttccctatcatcagtggaatcatgaggtcaaggccaccccccaggtcacggggttccaggaccgcatatcctcttgcactaatcctatctcccactcgtgagctttcggtccaaatccatgaagaagcaaggaagtttgcataccagactggtgttaaagtggtcgttgcatacggaggagcgccaattactcagcagctgagggagttagaaagaggtgttgaaatccttgtggcaactcctggccgcttaatggatttgttggagagggctagagtctcactgcagatgataaagtatttagctcttgatgaagctgatcgaatgcttgatatgggatttgagccccagatacgtaaaatagttgagcagatggacatgcctccacgtggagagaggcagacgatgttgtttagtgctacatttccaaaggagatacagagaatggcttcagatttcctcgccgattacatatttcttgctgtcgggagagttggttcaagtactgatttaattgtccagagggttgagtttgtccttgatgctgacaaaagaagctacctcatggaccttcttcatgcacaaagggcaaatggtacacatgggaagcaagctcttaccttggtctttgtggagacaaagaggggagctgatgccctggagaactggctttataacaatgggttcccagcaactagcattcatggagacagaacacaacagggtatctcaaaatatgtaatgaaaaaggaaagagagtatgccctgagatccttcaagagtggagcaactcccatcctcgtggcaactgatgttgctgctcgtggactggatatacctcatgttgcccacgtcattaattttgacctcccaaatgatatagacgactatgtccatcggataggaaggacagggcgtgcagggaaatctggtctggcaactgcatttttcaacgagagcaacaccccactggcaaggccgctgagtgagctcatgcaggaggctaaccaggaggttcctcaatggcttgagaggtatgctgcccgttcatcgtttggaggcggcggcgggagaaaccgcaggtcaggtggtggtgctaggtttggtggccgggacttccgacgagacagaggcagtggtggtggagggtatggtggtggaggtggaggttatggaggtggcggatatggtggtggtggcggtggaggcggctatggtggcggtagcagctacggaggtggcgggcaaggtttttctagtgcttgggactga

SEQ ID NO: 3443 - protein, 648 aa, Oryza sativa subsp
MRSSWADSAANAEESAPAAAANHGNSRLPRSSYVPPHLRGQAAPAAPAQAGALPSAAAPAAQPSVGQPGVVGGPRWAGIVNGGGGGGGGSVGGSRQGFGVGGRGGGGGGGGGAWNSRPGGWDRRDREPDPFANSEAAEVDFEGENTGINFEAYEDIPVETSGHDVPPPANTFAEIDLGDALNENIRRCKYVKPTPVQRYAIPISIAGRDLMACAQTGSGKTAAFCFPIISGIMRSRPPPRSRGSRTAYPLALILSPTRELSVQIHEEARKFAYQTGVKVVVAYGGAPITQQLRELERGVEILVATPGRLMDLLERARVSLQMIKYLALDEADRMLDMGFEPQIRKIVEQMDMPPRGERQTMLFSATFPKEIQRMASDFLADYIFLAVGRVGSSTDLIVQRVEFVLDADKRSYLMDLLHAQRANGTHGKQALTLVFVETKRGADALENWLYNNGFPATSIHGDRTQQGISKYVMKKEREYALRSFKSGATPILVATDVAARGLDIPHVAHVINFDLPNDIDDYVHRIGRTGRAGKSGLATAFFNESNTPLARPLSELMQEANQEVPQWLERYAARSSFGGGGGRNRRSGGGARFGGRDFRRDRGSGGGGYGGGGGGYGGGGYGGGGGGGGYGGGSSYGGGGQGFSSAWD

SEQ ID NO: 3444 - DNA, 1764 bp, Oryza sativa subsp
  CDS (1)..(1764)
  misc_feature (1014)..(1014): n is a, g, c or t
atggcgaccccctcccgcacctcctgggccgacgtcgccgacgccgaccccgccccggcccccgcccccgccgccaacggccccgcccgccccgaccggagctcctacgtgcccccccacctccgcaaccgcggggcttcgtcgggatgggcggcggcggtggcggcggaggattcggtgggccaaggaggtgggacacgggagccgaacccgttcgggaacgacggcgacgccgcggcgggggcgggggacgagccggaggtgttcgacgcgcaccagaacaccgggatcaacttcgacgcgtacgaggacatccccgtggagacgagcgggagggaggtgccgccgccggtgggcacgttcgccgagatcgacctgggccaggcgctcaacgacaacatccgccggtgcaagaacgtgcgccccacgcccgtgcagcggtacgccatcccgatctcgctcgcggggagggacctcatggcgtgcgcgcagaccgggtccgggaagacggccgccttctgcttccccatcatcagcggcatcatgcgcggcccgcccgcgcaaaggccccagcgcggcgggatgaggaccgcctgccccctcgcgctcatcctctccccgaccagggagctctccatgcagattcatgaggaggcgagaaaattttcctatcagaccggtgtcagggtggttgttgcatatggaggagcacctattaatcagcagttgagagatcttgagaggggtgttgacattcttgtggctactcctggccgtttggttgatttattggagagggcaagagtatctttgcaatctatcagatatcttgcccttgatgaggcagatagaatgcttgatatgggttttgaaccgcaagttaggagaattgttgagcaaatggacatgcctcccccaggtgccaggcagacaatgttgttcagcgccacgttcccaaaagaaatccagagaatggcatctgacttcctggagaactacatattcctggctgtnggaagagttgggtcaagtacagatttgattgtacagagagttgagtttgtgcaggaggcagacaaaagaagccacttgatggatctgcttcatgcacaaagagacagtgctactccaggaaagccaactcttacacttgtcttcgtggaaaccaaaaggggtgctgattcgttggagcactggttgtgtatgaatggatttccagctacttctattcacggtgatagaaaccagcaggaaagagagtatgctttgagatccttcaaaagtggacatactcctattctagttgcaactgatgtggcagcccggggccttgacattcctcatgttgctcatgttgtgaactttgatcttcccaatgatatagatgattacgtccacaggattgggaggacagggagggcaggaaaaagtggtcttgcaactgctttcttcaatgagaataactcttccatggcaaggtctttggctgagctaatgcaagaatctaatcaagaggtacctgcgtggttgtctcgctatgctgctcgcccatcttatggtggcggtggtgggaggaacagaaggtccggtggtgggagccgcttcggtggccgtgacttccgcagggattcttcctctggaagaggtggcggtgactactatggtggaggcagcagcggtggagctggtggatatggtggttcctctgcatatgggggtggcggctatggtggcggcgcgggtgctccaagtgcctgggattaa

SEQ ID NO: 3445 - protein, 587 aa, Oryza sativa subsp
MATPSRTSWADVADADPAPAPAPAANGPARPDRSSYVPPHLRNRGASSGWAAAVAAEDSVGQGGGTREPNPFGNDGDAAAGAGDEPEVFDAHQNTGINFDAYEDIPVETSGREVPPPVGTFAEIDLGQALNDNIRRCKNVRPTPVQRYAIPISLAGRDLMACAQTGSGKTAAFCFPIISGIMRGPPAQRPQRGGMRTACPLALILSPTRELSMQIHEEARKFSYQTGVRVVVAYGGAPINQQLRDLERGVDILVATPGRLVDLLERARVSLQSIRYLALDEADRMLDMGFEPQVRRIVEQMDMPPPGARQTMLFSATFPKEIQRMASDFLENYIFLAVGRVGSSTDLIVQRVEFVQEADKRSHLMDLLHAQRDSATPGKPTLTLVFVETKRGADSLEHWLCMNGFPATSIHGDRNQQEREYALRSFKSGHTPILVATDVAARGLDIPHVAHVVNFDLPNDIDDYVHRIGRTGRAGKSGLATAFFNENNSSMARSLAELMQESNQEVPAWLSRYAARPSYGGGGGRNRRSGGGSRFGGRDFRRDSSSGRGGGDYYGGGSSGGAGGYGGSSAYGGGGYGGGAGAPSAWD

SEQ ID NO: 3446 - DNA, 2103 bp, Oryza sativa subsp
  CDS (1)..(2103)
atgcaggccacctcacgccacacgctgtatcgcgcccatagtttagcgtggtttaggtggtggcccatagtatacaacgtcatacaaaaagcttccgtacccgggccgcttccggatccggcccataccgggcccatcaacggggccaccgtcatagagcgcgcaagaggcgtgacgtgtcccgtcgcgtcgcgggccaagtcagatatttccgttgcgaacgccgaggaatcggcgcccgcgactggtgctgctcccacccctgttgctaatcaccagaactcacgccccactcgcagcgcatacgtgcctcctcacctccgtggccaggcaccaaccacaactgcagctccagctccagctccaggaccagctgctgtccagccctcagcttctgtacagccttctggttacgcagctattgttggtggctctcgctgggctggccctgccagtggtgatggtactggcgctgtaggtggcccacgccagagcgttggtggtcgtggtgggggtgggggtgggggtgggggttggaactcccgccctgggtgggaccggagagaccgtgaacctaacccttttgccaatagcgaggcagaggaagccacagaggttgattttgatacggcaaacactggcatcaactttgatgcctatgaggacattcctgtggaaacaagtggccatgatgtgccaccgccagtcaatactttcgcagagattgatttgggtgatgcgctgaatgagaacatacggaggtgcaaatatgtgaaacctacgccagtgcagcggtatgccattccaatctccattgcagggcgggatctcatggcttgtgctcagacagggtctggaaagacagccgccttttgtttccctatcattagtgggattatgagctctaggccaccacagaggccaaggggatcgaggactgcataccctcttgcattgattttatcccccactcgcgaattatcagtccaaattcatgaagaagcaaggaaattcgcataccagactggtgttagggtggttgttgcgtatggtggagcaccaatacatcaacagttgagggaattggaaaggggcgttgaaatccttgtggcaactcctggtcggttgatggatctgctggagagggctagagtatcactgcaaatggtgaagtacttagctcttgatgaagctgatcgaatgcttgacatggggttcgagccgcaaattcgtaaaattgttgagcagatggacatgccccctcgcggtgtgaggcagacaatgttgtttagtgctacttttccaaaagaaatacagcgcatggcttcagatttccttgcggactacatcttccttgctgtaggaagagttggttcaagtactgacttgattgctcaaagggtagagtttgtccttgaagcggataaaagaagttacctcatggatctcctccatgcccaaaaagcgaatggtactcatgggaagcaagcgcttactctggtctttgtggagacaaagaggggagctgatgctttggagaactggctttacacaaacgggttccctgcaacaagtattcatggcgaccgaacacaacaggaaagagagtacgcgcttagatcattcaagagtggagcaacacccatccttgttgcgactgatgtagctgcccgtggacttgacatacctcatgttgcccatgtcatcaattttgacctcccaaatgacatagatgactatgttcatcgtatcggacgaacaggacgagcagggaagtctggcttggcaactgcatttttcaacgagggcaatctatccctggcgaggccgttatgtgagctaatgcaggaagcaaaccaggaggttcctcaatggcttgaacgatactcggcccgttcttcgttcggaggtggtggtggcagaaaccgccgatcaggcggtgcccgttttggtggccgtgacttccgccgcgacaataggggtggaggcggcggcggttatggtggtggcggtggtggctatggaggcggcggttatggagggggcggtggatatggcggtggctatggtggtggtcaaggctcaactagttcgtgggactga

SEQ ID NO: 3447 - protein, 700 aa, Oryza sativa subsp
MQATSRHTLYRAHSLAWFRWWPIVYNVIQKASVPGPLPDPAHTGPINGATVIERARGVTCPVASRAKSDISVANAEESAPATGAAPTPVANHQNSRPTRSAYVPPHLRGQAPTTTAAPAPAPGPAAVQPSASVQPSGYAAIVGGSRWAGPASGDGTGAVGGPRQSVGGRGGGGGGGGGWNSRPGWDRRDREPNPFANSEAEEATEVDFDTANTGINFDAYEDIPVETSGHDVPPPVNTFAEIDLGDALNENIRRCKYVKPTPVQRYAIPISIAGRDLMACAQTGSGKTAAFCFPIISGIMSSRPPQRPRGSRTAYPLALILSPTRELSVQIHEEARKFAYQTGVRVVVAYGGAPIHQQLRELERGVEILVATPGRLMDLLERARVSLQMVKYLALDEADRMLDMGFEPQIRKIVEQMDMPPRGVRQTMLFSATFPKEIQRMASDFLADYIFLAVGRVGSSTDLIAQRVEFVLEADKRSYLMDLLHAQKANGTHGKQALTLVFVETKRGADALENWLYTNGFPATSIHGDRTQQEREYALRSFKSGATPILVATDVAARGLDIPHVAHVINFDLPNDIDDYVHRIGRTGRAGKSGLATAFFNEGNLSLARPLCELMQEANQEVPQWLERYSARSSFGGGGGRNRRSGGARFGGRDFRRDNRGGGGGGYGGGGGGYGGGGYGGGGGYGGGYGGGQGSTSSWD

SEQ ID NO: 3448 - DNA, 2406 bp, Oryza sativa subsp
  CDS (1)..(2406)
atgtcgtacctgctgccgcacctgcactccgggtgggcggtagaccaggccatcctcgccgaggaggagcgcctcgtcatcatccgcttcggccacgactgggacgagacctgcatgcagggtatgatggatgaggtgttggcagcagtggctgagaccataaagaacttcgcggtcatctacctggttgacatcactgaggttcctgacttcaacaccatgtacgagctgtatgatccatcaacagtcatgttctttttccgaaacaagcacatcatgattgatcttgggactggaaacaacaacaaaatcaactgggccctgaaggacaagcaggagttcatcgacattgtggagactgtctacaggggtgctcggaaggggcggggtctgtgggccccacttcctccacctcactctatcttctcgagctcttcgtcgggcaccaccgttgtggatgacgacacaccaaaaggacagaggagatctgcgaacgccgaggaatcggcgcccgcggctgctgctaaccacggcaactcgcgcctcccgcgcagctcatacgttcccccgcacctccgcggccaagcggctcctgcagcgccggcgcaagctggcgcgctgccctcggccgccgccgccgcgcagccttctgttggccagcctggtgtggttggtggccctcgctgggcgggcattgtgaatggtggtggtggtggtggtggtgggagcgtaggtggttctcgccagggctttggtgctggtggccgcggtggaggaggtggtggtggcggtggtgcatggaactcccgccctgggggttgggaccgaagagaccgtgaaccggatccttttgccaatagtgaggctgcggaagttgactttgagggcgagaacactggcatcaattttgaagcctatgaagacatccctgttgagacaagtggccatgatgtgcccccaccagccaatacatttgcggagattgatttgggtgacgcgctgaatgagaatatcagaaggtgcaaatatgtgaagccgacaccagtgcagcgttatgccatcccaatctccattgcaggacgggatctcatggcctgtgcacaaacaggatctggaaagacagcagccttttgtttccctatcatcagtggaatcatgaggtcaaggccaccccccaggtcacggggttccaggaccgcatatcctcttgcactaatcctatctcccactcgtgagctttcggtccaaatccatgaagaagcaaggaagtttgcataccagactggtgttaaagtggtcgttgcatacggaggagcgccaattactcagcagctgagggagttagaaagaggtgttgaaatccttgtggcaactcctggccgcttaatggatttgttggagagggctagagtctcactgcagatgataaagtatttagctcttgatgaagctgatcgaatgcttgatatgggatttgagccccagatacgtaaaatagttgagcagatggacatgcctccacgtggagagaggcagacgatgttgtttagtgctacatttccaaaggagatacagagaatggcttcagatttcctcgccgattacatatttcttgctgtcgggagagttggttcaagtactgatttaattgtccagagggttgagtttgtccttgatgctgacaaaagaagctacctcatggaccttcttcatgcacaaagggcaaatggtacacatgggaagcaagctcttaccttggtctttgtggagacaaagaggggagctgatgccctggagaactggctttataacaatgggttcccagcaactagcattcatggagacagaacacaacagggtatctcaaaatatgtaatgaaaaaggaaagagagtatgccctgagatccttcaagagtggagcaactcccatcctcgtggcaactgatgttgctgctcgtggactggatatacctcatgttgcccacgtcattaattttgacctcccaaatgatatagacgactatgtccatcggataggaaggacagggcgtgcagggaaatctggtctggcaactgcatttttcaacgagagcaacaccccactggcaaggccgctgagtgagctcatgcaggaggctaaccaggaggttcctcaatggcttgagaggtatgctgcccgttcatcgtttggaggcggcggcgggagaaaccgcaggtcaggtggtggtgctaggtttggtggccgggacttccgacgagacagaggcagtggtggtggagggtatggtggtggaggtggaggttatggaggtggcggatatggtggtggtggcggtggaggcggctatggtggcggtagcagctacggaggtggcgggcaaggtttttctagtgcttgggactga

SEQ ID NO: 3449 - protein, 801 aa, Oryza sativa subsp
MSYLLPHLHSGWAVDQAILAEEERLVIIRFGHDWDETCMQGMMDEVLAAVAETIKNFAVIYLVDITEVPDFNTMYELYDPSTVMFFFRNKHIMIDLGTGNNNKINWALKDKQEFIDIVETVYRGARKGRGLWAPLPPPHSIFSSSSSGTTVVDDDTPKGQRRSANAEESAPAAAANHGNSRLPRSSYVPPHLRGQAAPAAPAQAGALPSAAAAAQPSVGQPGVVGGPRWAGIVNGGGGGGGGSVGGSRQGFGAGGRGGGGGGGGGAWNSRPGGWDRRDREPDPFANSEAAEVDFEGENTGINFEAYEDIPVETSGHDVPPPANTFAEIDLGDALNENIRRCKYVKPTPVQRYAIPISIAGRDLMACAQTGSGKTAAFCFPIISGIMRSRPPPRSRGSRTAYPLALILSPTRELSVQIHEEARKFAYQTGVKVVVAYGGAPITQQLRELERGVEILVATPGRLMDLLERARVSLQMIKYLALDEADRMLDMGFEPQIRKIVEQMDMPPRGERQTMLFSATFPKEIQRMASDFLADYIFLAVGRVGSSTDLIVQRVEFVLDADKRSYLMDLLHAQRANGTHGKQALTLVFVETKRGADALENWLYNNGFPATSIHGDRTQQGISKYVMKKEREYALRSFKSGATPILVATDVAARGLDIPHVAHVINFDLPNDIDDYVHRIGRTGRAGKSGLATAFFNESNTPLARPLSELMQEANQEVPQWLERYAARSSFGGGGGRNRRSGGGARFGGRDFRRDRGSGGGGYGGGGGGYGGGGYGGGGGGGGYGGGSSYGGGGQGFSSAWD

SEQ ID NO: 3450 - DNA, 1872 bp, Oryza sativa subsp
  CDS (247)..(1872)
atggcgaccccctcccgcacctcctgggccgacgtcgccgacgccgaccccgccccggcccccgcccccgccgccaacggccccgcccgccccgaccggagctcctacgtgcccccccacctccgcaaccgcggggcttcgtcgggtgggggcgcggcggcgcctccgccctcatcatcctcctcctccgcgccgccccctcgcgccgcccctggcctcctcgccccccgccccgccgccgccggcatggggaggatgggcggcggcggtggcggcggaggattcggtgggccaaggaggtgggaccgggagccgaacccgttcgggaacgacggcgacgccgcggcgggggcgggggacgagccggaggtgttcgacgcgcaccagaacaccgggatcaacttcgacgcgtacgaggacatccccgtggagacgagcgggagggaggtgccgccgccggtgggcacgttcgccgagatcgacctgggccaggcgctcaacgacaacatccgccggtgcaagtacgtgcgccccacgcccgtgcagcggtacgccatcccgatctcgctcgcggggagggacctcatggcgtgcgcgcagaccgggtccgggaagacggccgccttctgcttccccatcatcagcggcatcatgcgcggcccgcccgcgcaaaggccccagcgcggcgggatgaggaccgcctgccccctcgcgctcatcctctcccccaccagggagctctccatgcagattcatgaggaggcgagaaaattttcctatcagaccggtgtcagggtggttgttgcatatggaggagcacctattaatcagcagttgagagatcttgagaggggtgttgacattcttgtggctactcctggccgtttggttgatttattggagagggcaagagtatctttgcaatctatcagatatcttgcccttgatgaggcagatagaatgcttgatatgggttttgaaccgcaagttaggagaattgttgagcaaatggacatgcctccgccaggtgccaggcagacaatgttgttcagcgccacgttcccaaaagaaatccagagaatggcatctgacttcctggagaactacatattcctggctgttggaagagttgggtcaagtacagatttgattgtacagagagttgagtttgtgcaggaggcagacaaaagaagccacttgatggatctgcttcatgcacaaagagacagtgctactccaggaaagccaactcttacacttgtctttgtggaaaccaaaaggggtgctgattcgttggagcactggttgtgtatgaatggatttccagctacttctattcacggtgatagaaaccagcaggaaagagagtatgctttgagatccttcaaaagtggacatactcctattctagttgcaactgatgtggcagcccggggccttgacattcctcatgttgctcatgttgtgaactttgatcttcccaatgatatagatgattacgtccacaggattgggaggacagggagggcaggaaaaagtggtcttgcaactgctttcttcaatgagaataactcttccatggcaaggtctttggctgagctaatgcaagaatctaatcaagaggtacctgcgtggttgtctcgctatgctgctcgcccatcttatggtgggggtggtgggaggaacagaaggtccggtggtgggagccgcttcggtggccgtgacttccgcagggattcttcctctggaagaggtggcggtgactactatggtggaggcagcagcggtggagctggtggatatggtggttcctctgcatatgggggtggcggctatggtggcggcgcgggtgctccaagtgcctgggattaa

SEQ ID NO: 3451 - protein, 541 aa, Oryza sativa subsp
MGRMGGGGGGGGFGGPRRWDREPNPFGNDGDAAAGAGDEPEVFDAHQNTGINFDAYEDIPVETSGREVPPPVGTFAEIDLGQALNDNIRRCKYVRPTPVQRYAIPISLAGRDLMACAQTGSGKTAAFCFPIISGIMRGPPAQRPQRGGMRTACPLALILSPTRELSMQIHEEARKFSYQTGVRVVVAYGGAPINQQLRDLERGVDILVATPGRLVDLLERARVSLQSIRYLALDEADRMLDMGFEPQVRRIVEQMDMPPPGARQTMLFSATFPKEIQRMASDFLENYIFLAVGRVGSSTDLIVQRVEFVQEADKRSHLMDLLHAQRDSATPGKPTLTLVFVETKRGADSLEHWLCMNGFPATSIHGDRNQQEREYALRSFKSGHTPILVATDVAARGLDIPHVAHVVNFDLPNDIDDYVHRIGRTGRAGKSGLATAFFNENNSSMARSLAELMQESNQEVPAWLSRYAARPSYGGGGGRNRRSGGGSRFGGRDFRRDSSSGRGGGDYYGGGSSGGAGGYGGSSAYGGGGYGGGAGAPSAWD

SEQ ID NO: 3452 - DNA, 1839 bp, Vitis vinifera
  CDS (1)..(1839)
  misc_feature (1383)..(1383): y is t or c
atgcgaagttcttgggcggattctgttgtgaactctgcagctgagaatgtagctgctggttcttctgctagtaacggggttgctactgctgctaagcctaccagaggtgcatacattcctcctcatctccgcaaccttacaccctcatcagagccaccagcaccagcttacagtggcccatcttctgcaaatgatcgatctggatatagtggaaatcggtggggtggtcccaggaatgactctaatcagactggttacagtagtggtggccgcacaggtggttggaataataaaagtggtgggtgggatcgcgggagagagcgggaagtaaacccttttggggatgatgttgatacagaaaaggtatttagtgagcaagagaatacgggtattaactttgatgcctatgaagatattccagtggagactagtggggataatgtgcctcctccagtgaatacctttgcagagattgacttgggtgaagcactcaatcaaaatatcaagaggtgcaagtatgtgaagccgacacctgtgcagcggcatgccattccaatttccctggcagggcgagatctgatggcatgtgcccagactggatccggaaagacagcagcattttgctttccgattatcagtgggattatgaaggggcaggcttcacagagaccaccgcggggggcacgtacagtatacccacttgctctcattctttctcctacaagggagctctcttgccagatacatgatgaagctaagaaattttcatatcaaactggagtgaaggtggttgttgcttatggaggagcaccaattagtcaacagctgcgggatctagaaagaggtgttgatattctggtggcgactcctggacggttggtagatttgctcgagagggcaagagtttcattacagatgataaggtatttagctctagatgaggcagatcgaatgctggatatggggtttgaaccgcaaataaggaaaattgtggaacaaatggatatgcctccgcagggtgtaagacagacaatgctgttcagtgccacctttccaaaagagatacagaaactagcctctgatttcctttcaaattatgtttttctggctgttggaagagttggttcgagtactgacttaattgtccaaagagttgagtttgttcatgatactgacaagagaagtcatctcatggatcttcttcatgcgcagagggcaaatggtgtccatggaaagcaatatctgactttagtctttgtggagactaagaaaggtgctgattcgctggaacattggttgtgtatgaatggttttcctgcaactactattcatggtgacagaacacaacaggaaagagaacaggcattgaggtcatttaaaagyggtgtcaccccaattttggttgctacagatgtggcagcccgtggtcttgatattccccatgttgcgcatgttgtcaactttgacctaccaaatgacattgatgattatgtccaccgaattgggaggacaggacgtgctgggaaaacaggtttagcgactgcattcttcaatgacaacaattcgtcattggcaaaggctttatctgagctaatgcaagaagcaaatcaagaagtacctgcttggctgtcacgttatgcagctcgatctccttatgttggaaggaaccgtcgttctgggggaggaggccggtttggtggccgtgactttcgaagagatgcctcttttaataggggtggcacagattactatagcggaggcaacagcagcactggatatgggactgctggcggatatggaggaggatatggttcaggggtgaccagcgcgtgggactaa

SEQ ID NO: 3453 - protein, 612 aa, Vitis vinifera
MRSSWADSVVNSAAENVAAGSSASNGVATAAKPTRGAYIPPHLRNLTPSSEPPAPAYSGPSSANDRSGYSGNRWGGPRNDSNQTGYSSGGRTGGWNNKSGGWDRGREREVNPFGDDVDTEKVFSEQENTGINFDAYEDIPVETSGDNVPPPVNTFAEIDLGEALNQNIKRCKYVKPTPVQRHAIPISLAGRDLMACAQTGSGKTAAFCFPIISGIMKGQASQRPPRGARTVYPLALILSPTRELSCQIHDEAKKFSYQTGVKVVVAYGGAPISQQLRDLERGVDILVATPGRLVDLLERARVSLQMIRYLALDEADRMLDMGFEPQIRKIVEQMDMPPQGVRQTMLFSATFPKEIQKLASDFLSNYVFLAVGRVGSSTDLIVQRVEFVHDTDKRSHLMDLLHAQRANGVHGKQYLTLVFVETKKGADSLEHWLCMNGFPATTIHGDRTQQEREQALRSFKSGVTPILVATDVAARGLDIPHVAHVVNFDLPNDIDDYVHRIGRTGRAGKTGLATAFFNDNNSSLAKALSELMQEANQEVPAWLSRYAARSPYVGRNRRSGGGGRFGGRDFRRDASFNRGGTDYYSGGNSSTGYGTAGGYGGGYGSGVTSAWD

SEQ ID NO: 3454 - DNA, 1830 bp, Vitis vinifera
  CDS (1)..(1830)
atgtcgtgggctgatgtctccactgacacacccaccaacccaactcgccttgctcgccccactcgccccacatacgtgcccccacatctccggcatggtgctgcggttgccaccaccaacggcgccactccaatcggttccgactgccctccagaacaaggccggactgctaccagccggggccgtggccagagccggggacgtggacgtgggcaaggatggggtcaggggagagaggcttctgaggcaaatgctagcccattcgacggttctgagaaatttgatgaattggaagaggtagaagacactaatggtggtttgagtataaatttcgatgcgtacgaggacataccagttgaggccagtggctccgatatacccccacctgtcagtgcatttgcagagattcatctgggtgagggtttgaaccaaaatatcagaaggtgcaagtacgtgaaaccgacgccgatacaacgccatgccattccgattgcaatggcgggtcgagatttgatggcctgtgcccagacgggttcgggcaaaacggcggcgttttgtttcccgatcatatgtggtattttgaggaaccagttatcgcggggtggtgccaggcttgcttgtccaactgctcttatcctatctccgacgcgggaattgtcttgtcagatacacgaggaagctaagaagttctcttataaaaccggtttgaaggtggtagtagcttatggaggagcaccaatatctcagcagttccgtaatttggaaagaggtgtggacatcttagttgctacacctggtcgccttgtggatatgattgagagagcaagagtttctcttagaatgataaaatatttggctttggatgaggctgatagaatgttggatatgggctttgagcctcagatcaggaagattgtcgagcagatggatatgccaccaccaggtgcgagacagacaatgcttttcagtgctacgtttcctaatgagatacagaggcttgctgcggattttttatcaaactacatatttctatctgtaggacgagttggttcaagcactgatcttatcgtgcagagagttgaatttgttgaagatacagacaaacgttaccatctgatggatcttcttcaatctcaaatgacaaatagaacccccaaaaaggtattttttgtggagacgaagagaggagtagatgcattagaacagtggttgtgcatgaatggtctggcagcaacagcaatacatggtgacaaagtgcaaatggaaagggaacgggccttgaaatcattcaaaagtggagccactccgataatggtagcaactgatgttgctgcacgaggcctggatattccacatgtagcacatgtcatcaactttgatctgccaaaagccatagatgactatgttcacagaataggccggacaggtcgtgccggtaaatcaggtctagcaacagcatttttcaatgatgggaacctttcccttgcaaaatcacttgtggagctaatgcaggaatcaaaccaagaggttccttcttggttgaaccaatatgctgagagaccatcatatggtggtggtcggtcccgatacgggggtggcaggtttggtggacatgattttcgaagtagttctcaattgaaaagggaagactactactctccaagtccatatggtgatgtgactcagactgacgtttttgttgcccctgcttctggtgaaggttactattcaatcccttatggtgaagcagctccacctgactcttatgctgctggatcagacagatatggatttgatcatggttcaattgtggcaagtggttgggactaa

SEQ ID NO: 3455 - protein, 609 aa, Vitis vinifera
MSWADVSTDTPTNPTRLARPTRPTYVPPHLRHGAAVATTNGATPIGSDCPPEQGRTATSRGRGQSRGRGRGQGWGQGREASEANASPFDGSEKFDELEEVEDTNGGLSINFDAYEDIPVEASGSDIPPPVSAFAEIHLGEGLNQNIRRCKYVKPTPIQRHAIPIAMAGRDLMACAQTGSGKTAAFCFPIICGILRNQLSRGGARLACPTALILSPTRELSCQIHEEAKKFSYKTGLKVVVAYGGAPISQQFRNLERGVDILVATPGRLVDMIERARVSLRMIKYLALDEADRMLDMGFEPQIRKIVEQMDMPPPGARQTMLFSATFPNEIQRLAADFLSNYIFLSVGRVGSSTDLIVQRVEFVEDTDKRYHLMDLLQSQMTNRTPKKVFFVETKRGVDALEQWLCMNGLAATAIHGDKVQMERERALKSFKSGATPIMVATDVAARGLDIPHVAHVINFDLPKAIDDYVHRIGRTGRAGKSGLATAFFNDGNLSLAKSLVELMQESNQEVPSWLNQYAERPSYGGGRSRYGGGRFGGHDFRSSSQLKREDYYSPSPYGDVTQTDVFVAPASGEGYYSIPYGEAAPPDSYAAGSDRYGFDHGSIVASGWD

SEQ ID NO: 3456 - DNA, 1830 bp, Vitis vinifera
  CDS (1)..(1830)
atgcgtacatcttgggccgattcggaagaagctgaagccgcagcagtaccttccaccatcatcaacaatggagtagtaccaaacagtggcgccgccgccgccgccgccgtttccggcaactctcgtcccgcccgatcagcatacgttccgccacatcttcgcaaccgccctccttcttcaactcctccccctccggcggtcagtgctccccctgctgccaacactcgttggggcggtggcggcggcggcggcggccgctccggaggcagcttcgggggagctgcttccaacacgagaactggtggttgggaccgcgggagggaaagggaagttaatccttttggggacgatgttgatgtcgaacccccattcgttcagcaggagaactccgggattaattttgacgcatacgaggatattccggtggacactagtggggataatgttccgccggcggtcaattctttttcggagattgatttaggcgatgcgcttaatctcaatattaggaggtgcaaatatgtgaagccaacgccagtgcagcgccacgccattcctatttcgattgctggcagggatttgatggcttgtgctcagactggctctggaaagactgctgctttttgctttcccattatcagtggtattatgaagggccagtatgcgcagaggccacggggctcccggactgcttaccctcttgctcttattttatcccccaccagagagctgtcatgccagatacatgatgaagcaaaaaagttttcgtatcaaactggtgtaagggtggttgttgcttatggaggagctccaattaatcagcagctaagggatctggaaagaggtgttgacattcttgttgcaacaccaggaagattggttgatttgctagaaagggctagaatttctcttcagatggtccagtacctggctctagatgaggcagatcgaatgctggatatgggttttgaacctcaaattagaaggattgtagaacagatggatatgcctccacgaggcgtaagacaaactatgctattcagcgccacctttccaaaagaaatacagagattggcctctgattttctcgcaaattacattttcctggctgttggaaggagaagccaccttatggatcttcttcatgcacagagagaaaatggaactcatggaaaggtaatgctggaagaaaaaaccattgattcgttggttcaagccttgactttagtttttgtcgagacaaagaaaggagctgatgctttggaacattggctatgcataaatgggtttccagctacttctattcatggtgatagatcgcagcaggaaagagaacacgctttgagattattcaaaagtggtgcaactccaattctggtggcaactgatgtggcagcacggggtcttgatattcctcatgttgctcatgtggtaaattttgaccttcccaatgacatcgatgactatgtccatcggataggacgaactggccgagctggtaaaacaggattggccactgcattcttcaatgaaaataattcgtcattggctcggggccttgctgaactaatgcaagaatcaaaccaagaagtgcctgcttggctttcacgttatgcagctcggtcttcttatggcggagggggaagaaaccgtcgatcaggtgggggtcgtttcggtggccgggatttccgaagggatacttcttttaatagatctggaggcggtggcgattactatggtggaggtagaagtaacagcggatatggagcttctggcagcagttatggaggtggtggatatggtgcaggtgtgactagtgcgtgggactag

SEQ ID NO: 3457 - protein, 609 aa, Vitis vinifera
MRTSWADSEEAEAAAVPSTIINNGVVPNSGAAAAAAVSGNSRPARSAYVPPHLRNRPPSSTPPPPAVSAPPAANTRWGGGGGGGGRSGGSFGGAASNTRTGGWDRGREREVNPFGDDVDVEPPFVQQENSGINFDAYEDIPVDTSGDNVPPAVNSFSEIDLGDALNLNIRRCKYVKPTPVQRHAIPISIAGRDLMACAQTGSGKTAAFCFPIISGIMKGQYAQRPRGSRTAYPLALILSPTRELSCQIHDEAKKFSYQTGVRVVVAYGGAPINQQLRDLERGVDILVATPGRLVDLLERARISLQMVQYLALDEADRMLDMGFEPQIRRIVEQMDMPPRGVRQTMLFSATFPKEIQRLASDFLANYIFLAVGRRSHLMDLLHAQRENGTHGKVMLEEKTIDSLVQALTLVFVETKKGADALEHWLCINGFPATSIHGDRSQQEREHALRLFKSGATPILVATDVAARGLDIPHVAHVVNFDLPNDIDDYVHRIGRTGRAGKTGLATAFFNENNSSLARGLAELMQESNQEVPAWLSRYAARSSYGGGGRNRRSGGGRFGGRDFRRDTSFNRSGGGGDYYGGGRSNSGYGASGSSYGGGGYGAGVTSAWD

SEQ ID NO: 3458 - DNA, 2139 bp, Fenneropenaeus chinensis
  CDS (1)..(2139)
atgtcagatgattgggatgaatctgatgcagcccctgcatctgattggaatatagagtcctttgggctgccaacaagttttggaagctcaaagaaagcatttgagacaggcaatgcttttggtaatggagaagggggctttggtgaaggttctcagaacaactttgatgatgcctttgggagtggaggtggaggctttgggggcagaggaagatccaggggaggtggtagaggaggaggtagaggtggatcaagagcatgttttaagtgtggagatgagggccacatggcaagagattgcccctcagcatcagatagtagggggaatagaactaacaacaggaggcaagacaactggggaggcggcagttcatccaagcaggccaatggagagtcctttgggtttggatcagcttttggtcaagatcaagatagtgacccttttggtgctgctgaatcttccggctttggctttggctctgggtctggttccaggggaggtagaaggaatgatggtggcaaaggatgctttaagtgtggacaggaaggccacatgtctagggattgtccatctggtggaggacgtagtaagggctgtttcaagtgtagccaggaaggccacagtgcccgtgactgcccaaacccaggtgcgggagatgagaaaaagccaagagctccaatttatatcccagaggatgtaaatgaagatgagctctttgttatgggcattgaagctggctccaacttcgatgcatatgctaacattcaggtcaatgtaactggagatgatccaattcaagctccagctgcaagtttccaatccatgaatctacgtcctttgcttctggagaacatagtaaaagctggttatggttgtccaacgccagttcagaagtacaccattccgaatgtgatgaatggtcgagatattatgggctgtgctcaaacagggagtgggaagacagctgctttcctgctgccaatgctacaccatattcttgacaataactgcccaagcaatgcatttgaggaacctgctcaaccaacgggactggtgatctgcccaaccagagagttggctatccagatcatgcgagaggctcgaaagttttctcacagctcagttgcaaagtgctgtgtggcctatggtggtgctgcaggattccaccatttgaagaccattcatagtggatgccatattttagtagcaacaccaggaagattactggacttcgttgagaagggcaaaattgtcttcagcagtcttaagtatctggttcttgatgaagcagatagaatgctggatatgggttttttgtctagcatcaaaaccgtgataaatcacaagacaatgaccccaactgcagatcgtataacattaatgttcagtgctacattccccaatgagattcaagaacttgcatcagcatttttgaacaactatttgtttgttgttgttggaagtgttggagcagcaaacactgatgtcaaacaagaggttttgtgtgtgcccaagtttgagaagaaggcaaagttggtagagatgtgtgaagaaattttaatcaatgctgatgatgagaagatcttggtatttgttgagcaaaagcgagtggctgattttgttggtacttacctctgtgaaaagaacttccgggccaccactatgcatggggatcgttaccaagcacagcgtgaacaagcattaacagactttaggacaggtgtcttcaatatcttggtagctacagctgttgcagcacgtggtcttgatattaagggcattggtgtggtagtcaattatgatttaccaaaggaaattgatgaatatgtacaccgcattggccgcactggacgtcttgggaatcgaggcttgtccattagtttctatgatgaagaagcagacgtttgcctaacaaaggatttagtgaaggtcctgagtgaggccaaacaaaccgtcccagactggctgacacaaaaggcaaatacaagtggatattcacagacttaccatggcagtggcctgtttgcttcctctgatataagaacaaagaatgggggaggaagtgactgggagaaaaaccaaggtagcagctttttgggaggacctagtgaaaacaatgtggatgaagaatgggactaa

SEQ ID NO: 3459 - protein, 712 aa, Fenneropenaeus chinensis
MSDDWDESDAAPASDWNIESFGLPTSFGSSKKAFETGNAFGNGEGGFGEGSQNNFDDAFGSGGGGFGGRGRSRGGGRGGGRGGSRACFKCGDEGHMARDCPSASDSRGNRTNNRRQDNWGGGSSSKQANGESFGFGSAFGQDQDSDPFGAAESSGFGFGSGSGSRGGRRNDGGKGCFKCGQEGHMSRDCPSGGGRSKGCFKCSQEGHSARDCPNPGAGDEKKPRAPIYIPEDVNEDELFVMGIEAGSNFDAYANIQVNVTGDDPIQAPAASFQSMNLRPLLLENIVKAGYGCPTPVQKYTIPNVMNGRDIMGCAQTGSGKTAAFLLPMLHHILDNNCPSNAFEEPAQPTGLVICPTRELAIQIMREARKFSHSSVAKCCVAYGGAAGFHHLKTIHSGCHILVATPGRLLDFVEKGKIVFSSLKYLVLDEADRMLDMGFLSSIKTVINHKTMTPTADRITLMFSATFPNEIQELASAFLNNYLFVVVGSVGAANTDVKQEVLCVPKFEKKAKLVEMCEEILINADDEKILVFVEQKRVADFVGTYLCEKNFRATTMHGDRYQAQREQALTDFRTGVFNILVATAVAARGLDIKGIGVVVNYDLPKEIDEYVHRIGRTGRLGNRGLSISFYDEEADVCLTKDLVKVLSEAKQTVPDWLTQKANTSGYSQTYHGSGLFASSDIRTKNGGGSDWEKNQGSSFLGGPSENNVDEEWD

SEQ ID NO: 3460 - DNA, 1983 bp, Fenneropenaeus chinensis
  CDS (1)..(1983)
atgagtaatgtacccacccacaatggagtaggtctagagcagcagtttgctggtctaggcttggaggggcgagaccacattggtcaacgtggaggcgggcggggcagtggcagtaggggaggtggccgctacgtcccaccccacttaaggaatcgcctagaggacgctccacccccaggtggacggaggaacggggacttccagccaagttatcagcagagggataacagaggaggcggaggaggaggaggtggtggtggtggtggtggctacaggagcaatgatggtcagcgcttcagggagcatgatgaccgctggaggggaggacgaggagacaaccgcagggatgaccgccggggttacgaagaccgtcgtgaggtaggagggagtggccctccacgcaacaatagatggatcgaagatgatcgtgaccgctcttcgggtggtggcggcggcggtggcggtggcggcggcggccagggaggtggccgatggcaggaccgtggaaatgatagagacgactggtcacagcctcttgccaggaatgaggtccttgaggcagaactcttcaataataccaacagtggaatcaattttgataagtatgatgacattcctgtggaggcaactggcgaagacattcctacttgtatcaataccttcgccgatatcaaactcacagagatcatcaaacagaacattagtatggctcggtatgacaggcccacaccagtccagaaatatgccctgcccttcatacttgcaaagagagatctgatggcatgtgctcaaacagggtcgggaaagactgctgcattcttggtccccatccttaaccagatatatgaacagggtccagtccaggttaaaaacaacaaccctagaggacgtaataagcaataccctctgtctctgattttggcccccactcgtgagttggccacccagatctacgaggaagctcgcaagttctcttatcgggcccgagttcgtccatgtgtggtgtatggtggtgctgatgtcgtgtcacagatgagagatctgtcccgtggctgccacctcttagttgctacccctggacgtctggctgacatgattgaccgtggaaagattggtcttgattattgcaagtacctggtactcgatgaggctgaccgcatgctggacatgggttttgagcctcaaattcgccgtattgttgaggaggacaacatgcctcccactggccagcgccagactctcatgttctccgctaccttccccaaagaaatccagcgacttgcccaggatttcttggacaactacattttcttggctgttggacgtgttggttccacttctgagaatattacacaaaagattgtctgggtgtcagaggacgacaagcgatccttccttcttgatatccttaatgctgctgggttagaccgtgcaactgaggccaataaagatgaaaaaatggccatgggtgtaccccctcgcagagaagaatccctgacgttagtgttcgttgagaccaaaaagggtgcagatgcccttgaggagttcttgtaccgtcatggataccccgtgacgagcattcatggcgaccgaagccaacgtgagcgagaggacgctcttcgtgtcttccgctctggccagtgccccatacttgtggcaactgctgtggctgctcgtggtttggacattccacatgttaagcatgtcattaattttgatttgccatcagacattgaggagtatgttcaccgtatcggtcgaactggtcgtatgggtaaccttggccttgccactagtttcttcaatgacaagaatcgcaacatggtacgtgacttggtagaactcttacaagaggccaagcaggagcttcccaagtggctagaggctattgcctctgaggcacgctttggaggtggaggaggaagaggccgcgcaggagccaagcgcttcggtggaggttttggatcccgagagcttgattag

SEQ ID NO: 3461 - protein, 660 aa, Fenneropenaeus chinensis
MSNVPTHNGVGLEQQFAGLGLEGRDHIGQRGGGRGSGSRGGGRYVPPHLRNRLEDAPPPGGRRNGDFQPSYQQRDNRGGGGGGGGGGGGGYRSNDGQRFREHDDRWRGGRGDNRRDDRRGYEDRREVGGSGPPRNNRWIEDDRDRSSGGGGGGGGGGGGQGGGRWQDRGNDRDDWSQPLARNEVLEAELFNNTNSGINFDKYDDIPVEATGEDIPTCINTFADIKLTEIIKQNISMARYDRPTPVQKYALPFILAKRDLMACAQTGSGKTAAFLVPILNQIYEQGPVQVKNNNPRGRNKQYPLSLILAPTRELATQIYEEARKFSYRARVRPCVVYGGADVVSQMRDLSRGCHLLVATPGRLADMIDRGKIGLDYCKYLVLDEADRMLDMGFEPQIRRIVEEDNMPPTGQRQTLMFSATFPKEIQRLAQDFLDNYIFLAVGRVGSTSENITQKIVWVSEDDKRSFLLDILNAAGLDRATEANKDEKMAMGVPPRREESLTLVFVETKKGADALEEFLYRHGYPVTSIHGDRSQREREDALRVFRSGQCPILVATAVAARGLDIPHVKHVINFDLPSDIEEYVHRIGRTGRMGNLGLATSFFNDKNRNMVRDLVELLQEAKQELPKWLEAIASEARFGGGGGRGRAGAKRFGGGFGSRELD

SEQ ID NO: 3462 - DNA, 2010 bp, Ciona intestinalis
  CDS (1)..(2010)
atgtttgacgacgattgggaaccagcacctttaaccgcccttggaaacacagattttcgaggtgcaagttcttttgataacccgtattccaagaaagatgatggtggttttggttcaggttttggtgatagccgtggaggtgcacgcagcaaaggttgttttaaatgtggagaagaaggtcatatgtccagagaatgcccgcagaacactggatcaggttttggtgatagccgtggaggtgcacgcagcaaaggttgttttaaatgtggagaagaaggtcatatgtccagagaatgcccgcagaacactggatcaggttttggtgatagccgtggaggtgcacgcagcaaaggttgttttaaatgtggagaagaaggtcatatgtccagagaatgcccgcagaacactggatcaggtgacagacattcaaacgcatattttaaaggtggagatcacgctgctcaggaatatcataaggctggagacggagataaacctcgtcctcctctgtacattccccccccacctcctgaggatgaggttgaaatgtttgctagcatgcagcgaggaattaactttgggaagtacgatgccatccctgtggaggtgagcggactcaacgctccgaagtgcatttcaactttcgagatggcaaacctccaagaaacaatcctggtaaatgtgcagaaagcaggttatgacagacctacacctgtgcaaaaatacagcattcccattattaatgctgatcgtgacttgatggcatgtgcacagacaggatctggcaaaacggctgcgtttttgcttccggtccttactaagctggttgaatcgggtgtaaagtcgtctgaattcagtgaaaagaaaactccacaagcgattataattggcccaacaagagaacttgtaaaccagatttttctggaagcccgtaaattctcacgtagcaccattattcatccagtggttgtatatgggggcaccagtgttggttaccaaataagagctgtacaaaaaggttgtgacgtattgatcgcaacccctggtcgtctgatggattttattaaccgtggcttgattggtctggagaatgttcggttcattatcctcgatgaagcagatcggatgttggatatggggttcgaatctgagatcaggaagcttgtatctttaccagggatgccacagaagaacaatcgtcacacgcttatgttcagcgcgacatttccagatgaaatacaaaaacttgctcacgactttctccgggaggacttcctgttcctcacagtaggaagagtagggggagcatgctccgatgtcacgcaaacagtgatctccgtggagtggaaagacaaacgctccaaactactcgagcttattgcagatgttaatgaaaccaagagtcgtactcttgttttcgtagaaaccaagagaggagctgatttcctcgcttgtgttttatgccaagaagatttcccaaccacaagcatccatggagatcgtttacaacaagatagagagcaagcactccgtgatttcaaattagcagtttgtccaatacttgttgctacttcagttgctgcaagaggattagacataccaaaggtagagcatgtgattaactatgacatgccgagagaaatagatgaatatgtgcatcgaatcggacgtactggtcgttgtggtaacctgggacgcgcaactacattttttgacaacaaaaaagacgcaaatctggctcgctcacttgttaaaattctttccgaggctcaacaagaagttccaggttggttgggggaatgtgcagagtctgctgttggttcgaatttcggagcagaaaaaggaagatttggtggaaaagaccttcgggagagaggtggagaaggaattactggtttcggatcaatgggtggtggaagtggagcaaggagcactgctgattatgattataatgatggtggtggtttcgactgtgttggtgtgaatgacgatgatgactcgtgggattaa

SEQ ID NO: 3463 - protein, 669 aa, Ciona intestinalis
MFDDDWEPAPLTALGNTDFRGASSFDNPYSKKDDGGFGSGFGDSRGGARSKGCFKCGEEGHMSRECPQNTGSGFGDSRGGARSKGCFKCGEEGHMSRECPQNTGSGFGDSRGGARSKGCFKCGEEGHMSRECPQNTGSGDRHSNAYFKGGDHAAQEYHKAGDGDKPRPPLYIPPPPPEDEVEMFASMQRGINFGKYDAIPVEVSGLNAPKCISTFEMANLQETILVNVQKAGYDRPTPVQKYSIPIINADRDLMACAQTGSGKTAAFLLPVLTKLVESGVKSSEFSEKKTPQAIIIGPTRELVNQIFLEARKFSRSTIIHPVVVYGGTSVGYQIRAVQKGCDVLIATPGRLMDFINRGLIGLENVRFIILDEADRMLDMGFESEIRKLVSLPGMPQKNNRHTLMFSATFPDEIQKLAHDFLREDFLFLTVGRVGGACSDVTQTVISVEWKDKRSKLLELIADVNETKSRTLVFVETKRGADFLACVLCQEDFPTTSIHGDRLQQDREQALRDFKLAVCPILVATSVAARGLDIPKVEHVINYDMPREIDEYVHRIGRTGRCGNLGRATTFFDNKKDANLARSLVKILSEAQQEVPGWLGECAESAVGSNFGAEKGRFGGKDLRERGGEGITGFGSMGGGSGARSTADYDYNDGGGFDCVGVNDDDDSWD

SEQ ID NO: 3464 - DNA, 2205 bp, Ostreococcus tauri
  CDS (1)..(2205)
atgtcggccagagacacgacgtgtaaatttgcgctcgcatccaaatcgctgaactcatcgtacagagaatcgttcagcacgcacgttagaatcgaccccaaggagctcagggcgtactccacgccttccgaccccgccccgcccggtcccgcaccaacgttcgggcgaacgccgctcgctgctgcgagcgctttggtcagacccgagacgactcccggaagaaaaaaagcgagcgcgtccgcatcgttcaccgttcgtatcagtccatccagcgtctccagcgcgatcgcgcgcagggctttgctccccgacatcgtctcctcgtgtgcgatcgatatgagcgtcgacatgacgaacccgagcgtgggcgccgtctccgttttccgcagggcgtctcgcgtccccgacgcgcctaaagcgcacgccgagcgcagcgcccgcacggcctccgtggtcaccccctcgtgtgctcctcgtctcggcagcgtgagcacgccagcgatcgtctctacacatgttcgaccgtcgcgctcgctctcgatctcgaacccatcaccgaacgcatccaccaacgcgcgctccaaggtgtcccgcgcgcgcgccaacgccgtgggattactcctctgttcgtccgtctggcgccccacgaccgcgaaggagaagaaggagaagaaggagaagaaggagaagcgagagaagaaggagaagtcggcgaagcgtgaccgagacggaggtgctgagaagaagacgagcgatggcggacacaaaaagagcaaagtctcgtcttcgaacgagtacgccgccgtgggcgatcgcgagctcgcgtcgacgtcgagcgcttttcagagagtgttctacgaaccgccgaaaaagctagcttcgatgtcggccaaggacgtggcggccgcgagggaaacgctcgccatcacgcaggtggagggactggacgtcgatttggcgcccgtgagcacgttcgaggacgcgggattctccaaggaactcctcagagtgacggcgaactttcagaaaccgtcgccgattcaggctcaatcgtggccgatcgtcatgagcggaagagacatggttggtatcgcggcgactggctcggggaagacgctcgcgttcgggatgccggctctgacgcaaattcgctctcaaccgccgtgcaagccgggtcagcccatctgtttggtgcttgcgcccacgcgtgagttagcgcagcaaacggcaaaggttttcgacgacgctggtgaagcttcgggcgttcgttgcgtgtgtgtgtacggtggtgctccgaaatacgagcaaaagaacgcaatgaaagctggaggaggcgccgcggtcatcgtcgccacgccgggtcgacttcgcgactttatggaagaaggtgtgattaaactggatcgcgttacgatgctggtgctcgatgaagcggatcgtatgctcgatttgggtttcgaacctgaaattcgcgccatcgccggagccactcgcgctgataggcagactgtcatgttttccgcgacgtggccgatgagcgtgcaaagcctcgcctcggagttcatgtgcaatcctgttagagtacgaatcggttcggagggcttgaaggcgtctcaaagcatcactcaaatagtcgaagttgtcgagccgcaagacaaggatagacacttggctcgtgtcatgaagcaatatctgggcagtcccaaggattgcccaagaacactcatttttggtctttacaagaaggaatgcgcgaaccttcatcagcgattgtctcgtgaatggccggcggtgtgcattcatggtgacatgtcccaggctgaccgtgaaagatctgtcgaggcgttcaagaagggaacttcgcgaattttgattgccacggatgtcgcggcgcgcggtctcgacatcaagggagtcgaatacgtcatcaactacacatttcctctcacaactgaggattatgtccacagaatcggtcgaactggccgcgctggcgccacaggtctggcccacactttcttcactcagcatgacaaagcgcgagccggcgaactcgtgaacgtgttgcgcaaagcaggagccgaagttcccgaagatctcacgaagtttggtacccacgtaaaaaagaaggaaagcaagctttacggtgctcacttcaaggaagttgacatgaccgtgaaggctacgaaaatcacgttcgactaa

SEQ ID NO: 3465 - protein, 734 aa, Ostreococcus tauri
MSARDTTCKFALASKSLNSSYRESFSTHVRIDPKELRAYSTPSDPAPPGPAPTFGRTPLAAASALVRPETTPGRKKASASASFTVRISPSSVSSAIARRALLPDIVSSCAIDMSVDMTNPSVGAVSVFRRASRVPDAPKAHAERSARTASVVTPSCAPRLGSVSTPAIVSTHVRPSRSLSISNPSPNASTNARSKVSRARANAVGLLLCSSVWRPTTAKEKKEKKEKKEKREKKEKSAKRDRDGGAEKKTSDGGHKKSKVSSSNEYAAVGDRELASTSSAFQRVFYEPPKKLASMSAKDVAAARETLAITQVEGLDVDLAPVSTFEDAGFSKELLRVTANFQKPSPIQAQSWPIVMSGRDMVGIAATGSGKTLAFGMPALTQIRSQPPCKPGQPICLVLAPTRELAQQTAKVFDDAGEASGVRCVCVYGGAPKYEQKNAMKAGGGAAVIVATPGRLRDFMEEGVIKLDRVTMLVLDEADRMLDLGFEPEIRAIAGATRADRQTVMFSATWPMSVQSLASEFMCNPVRVRIGSEGLKASQSITQIVEVVEPQDKDRHLARVMKQYLGSPKDCPRTLIFGLYKKECANLHQRLSREWPAVCIHGDMSQADRERSVEAFKKGTSRILIATDVAARGLDIKGVEYVINYTFPLTTEDYVHRIGRTGRAGATGLAHTFFTQHDKARAGELVNVLRKAGAEVPEDLTKFGTHVKKKESKLYGAHFKEVDMTVKATKITFD

SEQ ID NO: 3466 - DNA, 1716 bp, Ostreococcus tauri
  CDS (1)..(1716)
atgggatacgtgcccccgcacctgcgaggcggcggcgacgcgaacgcgaacgcgagcgcgggcgacgggcgagaccacggacgcgggagtgggcatcgggacgaccgagggccgccgccgggtcgacggctcgacgaccgcgacgccgcgcgcggcgatggacgcggcggtggggcggcacgcggtggggcgcacgcgccggtgttcgcggcgtggcgaccgagcgcccgggcggaggcgctcacgacggcgcaggcgacggagattcgcgaacgcttgggggtgaccgtggacgtcgaggacggcgagccggaggcgccgagcgcgatcgaatctttcgaggacatggagttgaagagggatattctggcggacattaagttcagagagtacgataagccgtcgccgattcaggcgcaggcgattccggtgatcctgagcggtcgggacgtcttggggtgcgcggagacggggagcggtaagacggcggcgttttcgattccgatgattcaacacgcgctgaatcaagcgccgctgaggcaaggggacgggccgttcgcgatcgtgatggcgccgacgcgggagttggcgcagcaaatcgagacggaggcgaagacgttcacgcgaagctccaaggggtttagaacggccattatcgtcggtgggacgaacatgagcgagcaacgaagcatgttgcgaggcggagtgcagatcgtcgtcgccaccccgggtcgcttgatcgatcacttgcagcaagggaatacaaacctagcccgagtgtcctttgtcgtcctcgacgaagccgatcgcatgctcgacatgggtttcgagccgcagatccgcgaggtactgatgaacttgcccaagccgcatcaaacgcttctattctcggcgacgatgccagtcgaagtcgaggctttggccgctgactacctgaataagcctgtcaaggtgaaggtgggccaaacgagcgctcccacggcaaacgtgtcccagcaactcgaaaaggttgtggacgccgaaaaggtggatagactcgtcaccatgctgataagtgagcagcgcgaggcgcagaagctcggccacagcatgcccatgactgtggtgttcgttgagcgtaagcaccgcgctgacgagatcgccgagctcctgaacgcggagaatgtgtccgccgctgcgcttcacggcggtcgctcgcagggtgagcgtgaggcggcacttcacgattacaaaacgggtcgatgctccgtgctcgtcgccaccgatgttgccgctcgcggtttggatgtgaagggcgtcgcccacgtcgtcaacctcgatttaccgcgtaactttgaagactacgtccaccgcatcggtcgtaccggtcgcgccggtatgtctgggcgatcgacatccttctacaccgaccgtgactcgttcatcgtggctcaaatcaagcgcgcgctgatggagctcgaggctggcaacgctttcgcctttgccaccggtcgcgaggctcgcgccaaggaacgcgaggaggccagggcctggcgcgagggcaagcagcacgaggctgccgtcgtcgagaccgagggcggggtcaccatcaccgtcgaggacaagttcaagcacatgatggtaagcgcgcccgtcgccgcaccgggcgccgccgcgcccgccgccggcgtcgccgacgacgcctggggcgatggatccgacgacgacgcctggtaa

SEQ ID NO: 3467 - protein, 571 aa, Ostreococcus tauri
MGYVPPHLRGGGDANANASAGDGRDHGRGSGHRDDRGPPPGRRLDDRDAARGDGRGGGAARGGAHAPVFAAWRPSARAEALTTAQATEIRERLGVTVDVEDGEPEAPSAIESFEDMELKRDILADIKFREYDKPSPIQAQAIPVILSGRDVLGCAETGSGKTAAFSIPMIQHALNQAPLRQGDGPFAIVMAPTRELAQQIETEAKTFTRSSKGFRTAIIVGGTNMSEQRSMLRGGVQIVVATPGRLIDHLQQGNTNLARVSFVVLDEADRMLDMGFEPQIREVLMNLPKPHQTLLFSATMPVEVEALAADYLNKPVKVKVGQTSAPTANVSQQLEKVVDAEKVDRLVTMLISEQREAQKLGHSMPMTVVFVERKHRADEIAELLNAENVSAAALHGGRSQGEREAALHDYKTGRCSVLVATDVAARGLDVKGVAHVVNLDLPRNFEDYVHRIGRTGRAGMSGRSTSFYTDRDSFIVAQIKRALMELEAGNAFAFATGREARAKEREEARAWREGKQHEAAVVETEGGVTITVEDKFKHMMVSAPVAAPGAAAPAAGVADDAWGDGSDDDAW

SEQ ID NO: 3468 - DNA, 2331 bp, Chironomus tentans
  CDS (1)..(2331)
atgaataattatgcaaacgaaaatggcacgggtctagaacagcaggttgctggtctggacttgaatgaacgaaaaagttcaacaaagtatattcctcctcatttaagaggcgaaatttctgattcgttatcgtccaattctaacgataatcaaggagaaaacctcagggataattacaacaatcgtagcggaggtgaacgcgattttaataatcgaaataataataatcgtcgctacaacaataataacggtaacaatttcaatcaacgagacaattatcctccacgtcaaggagcaggaggaagtgactttaacagcggctataataataactcgaattacagcaacaacaactataataataatcgttatcaaaacggagagtcaggagaacgcggtggatcaaataattggggtggccgcggaggatcgcgtacatttaatcgctcacaaggagccgattcgcgttttagcggtccgccgccaacgcaacagccaccacaacaacaacaacaaaaactcgatcaacaagatagtcaagatgaacccgtcaatacacgttggcaagaaccgccacaacagcaacaagatgatcgtttcggaagatcaaacaataatggcggcggatttggtggaaaatggaatcaacgtgctccagagattgattacactataccgttaccacgtgatgaacgtgttgaacaggagttgtttggtaccgcgaatacgggtatcaattttagcaaatacgaagacattcccgtggaggcgacgggacagcaagttcctgaacacattacgtcttttgatgacatcaagttgacggaaattatacgcacgaatataaagatggcaagatacgacaaaccaactccggtacaaaaatatgccataccaatcatactgtctggacgtgatctcatgtcatgcgctcaaactggctctggcaaaacggctgcatttctcgttccgatattaaatcgaatgttagaacaaggagcaagcatgaatcctgcttcaaatcgtccttatcagcgtcgtaagcaatatcctttgggcttggttcttgcacctacgcgcgagttggctacacaaatttatgaagaagcgaaaaagttttcttatcgttcacgcatgcgtccagctgttttgtatggcggtaataatactagcgagcaaatgcgtgaacttgaccgtggatgtcatttgattgttgcaacgcccggtcgtcttgatgacattattaaccgtggaaaaattggattggagaatttacgttttctcgttttggatgaagcagatcgtatgttggacatgggtttcgagccacagattcgtcatattattgagaatcgagacatgccaccaactggacaacgtcaaacattgatgttctcggcaacatttccgaaaaatatccaagaattggcaagtgatttcctgtcaaattacattttcttggccgtcggacgtgtcggatcgacatccgagaatattacacaaacaattttgtgggttaatgagaatgaaaagcgctcatatttattagacttgttgagtcgattacgtgaaggatcaccagactattctcccgatagcttaacattgatctttgttgagacaaagaaaggtgctgatgcactcgaggaatttttgtatcagaataagcatcctgttacatcaattcatggcgatcgtagtcaacgtgaacgtgaagatgcattaaaatgcttccgttcaggtgattgtcctatattggttgctacagctgttgccgctcgtggacttgatattccacatgttaagcacgtcattaattatgatttgccatcggatgttgaagaatatgttcacagaattggacgtactggtcgtatgggaaatttgggaattgctacaagcttctttaacgaaaagaatcgaaatattgtctcggatttggttgaattattaattgagacgaatcaagaattgccgagtttcctagaagaaatggctaatgatcgttatggaggtcctagacgaagtaataattctcgtggcggtggaaatcgttatggaggtggaactgcatttggctcacgtgattatcgtcagcctcaaagcaatcaacgttatggaggaaatagtggtggcggcggaagaggaggaagcgatagtggtagtggaaatagtggcggaaatcgatatggaggaggtggaaataatcgttcaagtggatatggaaacagtgacggtggatatcgcaatggaggcggaaattatggtggaaattataacagttatggaaacaatcatgcaagttccggaccagattggtgggaagattaa

SEQ ID NO: 3469 - protein, 776 aa, Chironomus tentans
MNNYANENGTGLEQQVAGLDLNERKSSTKYIPPHLRGEISDSLSSNSNDNQGENLRDNYNNRSGGERDFNNRNNNNRRYNNNNGNNFNQRDNYPPRQGAGGSDFNSGYNNNSNYSNNNYNNNRYQNGESGERGGSNNWGGRGGSRTFNRSQGADSRFSGPPPTQQPPQQQQQKLDQQDSQDEPVNTRWQEPPQQQQDDRFGRSNNNGGGFGGKWNQRAPEIDYTIPLPRDERVEQELFGTANTGINFSKYEDIPVEATGQQVPEHITSFDDIKLTEIIRTNIKMARYDKPTPVQKYAIPIILSGRDLMSCAQTGSGKTAAFLVPILNRMLEQGASMNPASNRPYQRRKQYPLGLVLAPTRELATQIYEEAKKFSYRSRMRPAVLYGGNNTSEQMRELDRGCHLIVATPGRLDDIINRGKIGLENLRFLVLDEADRMLDMGFEPQIRHIIENRDMPPTGQRQTLMFSATFPKNIQELASDFLSNYIFLAVGRVGSTSENITQTILWVNENEKRSYLLDLLSRLREGSPDYSPDSLTLIFVETKKGADALEEFLYQNKHPVTSIHGDRSQREREDALKCFRSGDCPILVATAVAARGLDIPHVKHVINYDLPSDVEEYVHRIGRTGRMGNLGIATSFFNEKNRNIVSDLVELLIETNQELPSFLEEMANDRYGGPRRSNNSRGGGNRYGGGTAFGSRDYRQPQSNQRYGGNSGGGGRGGSDSGSGNSGGNRYGGGGNNRSSGYGNSDGGYRNGGGNYGGNYNSYGNNHASSGPDWWED

SEQ ID NO: 3470 - DNA, 2199 bp, Platynereis dumerilii
  CDS (1)..(2199)
  misc_feature (1803)..(1803): r is g or a
atgtcagactggagtgatgatgaggggacgaccaatggatttgggggcacgacaaatgggaatttcaactttggaagaggccgtggcatggcgaaaggcggtgacgactcgcaagggggcttcggaagcaagagcagtggatttggcagcaaatttggctcccgggatgagaattcaaatgagagtggaggatttggcggtcgtagtaacggatttggatcaagaggtgctggaggagatgatgagccaaggggtggtggattcggaggaaagcgaggaggtggtggcggtggcagcagcggttgttacaaatgtggtggcgagggtcacatagcccgtgattgcccggatgctggaggcagtggaggcggcggcggaggaggtggcagtagggcatgtttcaagtgtggagaggagggccatttctcccgcgaatgtcccaacggaggaagttccggaggcggtggtggatttggtggttccagaggcggtggattcggaagctctggcggtggtggtggatttggaggcggcggcagtggaggaggcaagggatgcttcaagtgtggggaagagggacatttctctcgtgaatgccctaatggcggtggtgattccggtggtaactccggagattcaaataagggaaaaggatgtttcaagtgcggagaggaagggcacttttcacgagaatgcccgaataatgaaggaggagatggcgaaaagaaaactgagatctatgttcccccgcctcccccggagagtgaagaagaaatgttccagtccatcacagccggaatcaactttgacaaatacgagtctattcctgttgaagtgtcaggcactaatgcaccaaagaacggcattttaaattttgatcaagcagacctatcggaaactgtccgctccaatgtacgtaaagccaagtacgatcggccgacccctatccagaagtgggctatccctatcgtcctctcaggcaaagacttgatgggctgtgctcaaacaggatccggaaaaacagctgctttcttgctacccgtgctgactggaattatcaagaatgatctcatcgaaggaggttctggttttggaggaccccaataccctgccgctattatcgttggacccaccagagagttggtcaaccagatctatctcgaagcaaggaagtttgcttcttcaacttgcgtcagaccagtcgtcgtttacggtggaacttcagttggataccaagccagagaactggagaagggcgcccacgttgtcgttggtacccccggtcgattgctcgacttcattggaaagggcaagattaacttgtcgaaggtgaagtacctcatcctggatgaagccgatcgtatgttggacatgggtttcgagcccgagatcagaaagctcgtcacaaccttcgatatgcccgagaaaggccagagacagaccctcatgttcagcgcaaccttcgctgccgagatccagcagcttgccaaggagttcttgagcgagtatgtgtttgtgactgtcggacgagtgggtggtgccaactccgacattactcaggaagtccaccaagtcaccaagtacgagaagagggagaagctcgtggagatcttgaaccaagcaggaaccgacagaaccctggtattcctggaaaccaagcgcagtgctgatttccttgctgcgtatctgtcccaagaacagtaccctgccacaagtattcacggagatcgtttgcagagggaaagagaagaggccttgttggacttcaaaacaggccgagctccgatcttgattgctacctcrgtggctgccagaggtcttgatattcctggcgtcaagcacgtcataaactacgatctccccagtggcattgatgagtacgtccacagaattggtcgaaccggtcgttgcggtaatcttggaaaggccacatcattcttcgatccggatgttaaccaagacaaagaacttgctcgatccctcgtcaaaactctcggcgacgcacaacaagttgtcccaccatggcttgaggagatcgcggagggagccatttctagtggattccagggaggcgacagatttggcgccaaggacacccgtagaggaatgaggaaaaccacagaagatgctggattcggcggaagttccaatggattcggaggcgatgctggcggtggtgatgacgaggactgggattaa

SEQ ID NO: 3471 - protein, 732 aa, Platynereis dumerilii
MSDWSDDEGTTNGFGGTTNGNFNFGRGRGMAKGGDDSQGGFGSKSSGFGSKFGSRDENSNESGGFGGRSNGFGSRGAGGDDEPRGGGFGGKRGGGGGGSSGCYKCGGEGHIARDCPDAGGSGGGGGGGGSRACFKCGEEGHFSRECPNGGSSGGGGGFGGSRGGGFGSSGGGGGFGGGGSGGGKGCFKCGEEGHFSRECPNGGGDSGGNSGDSNKGKGCFKCGEEGHFSRECPNNEGGDGEKKTEIYVPPPPPESEEEMFQSITAGINFDKYESIPVEVSGTNAPKNGILNFDQADLSETVRSNVRKAKYDRPTPIQKWAIPIVLSGKDLMGCAQTGSGKTAAFLLPVLTGIIKNDLIEGGSGFGGPQYPAAIIVGPTRELVNQIYLEARKFASSTCVRPVVVYGGTSVGYQARELEKGAHVVVGTPGRLLDFIGKGKINLSKVKYLILDEADRMLDMGFEPEIRKLVTTFDMPEKGQRQTLMFSATFAAEIQQLAKEFLSEYVFVTVGRVGGANSDITQEVHQVTKYEKREKLVEILNQAGTDRTLVFLETKRSADFLAAYLSQEQYPATSIHGDRLQREREEALLDFKTGRAPILIATSVAARGLDIPGVKHVINYDLPSGIDEYVHRIGRTGRCGNLGKATSFFDPDVNQDKELARSLVKTLGDAQQVVPPWLEEIAEGAISSGFQGGDRFGAKDTRRGMRKTTEDAGFGGSSNGFGGDAGGGDDEDWD

SEQ ID NO: 3472 - DNA, 2064 bp, Botryllus primigenus
  CDS (1)..(2064)
atgtttgaggatgacaactgggacgatggtgattttgggggtgtaacaaccagcaataagcaatcatcaggatcgtttggtgggggattcggatcttacaatggtgctggtgactcgaattactctcagagtcgatcaggtggaaatcgctcgtcaagctgttacaagtgtggtgaagagggtcacatgtcgcgggattgccccaatggtggaggcagttctcgtccgaagggctgtttcaagtgtggagaggaaggccatatgtcccgggattgcccaaatggaggaggggattctcgtcctaaaggctgtttcaagtgtggggaagaaggccatatgtcgcgggattgccctaacggtggaggggattctcgtccaaagggctgtttcaagtgtggagaggaaggtcacatgtcacgtgattgccctaatggtggagagggcgggtctagaagtcagggggatcggcagaaaggatctggttgtttcaagtgtggggaggaggggcatttttcacgggaatgtccaaaggctgatggagaggaaggagtccggcctgagccctacatcccaccaccacctcctgaagatgaggaggcgatttatgcttcgactcaaactggtatcaacttcagtaaatatgatgccattcctgttgaggtgtctggtgaaaatcctccggacggcattgcctcatttgacagtgctaacttgccggagactattcgagaaaatgtgaataaagctcggtacacgaagcctaccccagtgcaaaagtacagcattccaatcattaacgcgggtcgtgatttgatggcgtgcgctcagactggatcgggaaagaccgctgcctttttgctacctgtccttgctggaatattccgaagtggtctgaaagcagacagcttttcagaaaagcaaactccgcaggcaattgttgtcggaccgacaagggaattggtcagtcaaattttcactgaggctaggaaatttgctcgaaacagcgtcgttcaacctgtagttgcgtatggtggtacctccgtgcaaagtcagcttcgagatttgagccgcggatgcaatatcctgatcgcaacgccagggagattgttggatttcatcaatcgaggaaaagtaggctgtgactgcgtcgaatatttgatcctagatgaagcggatcgcatgttggatatgggctttgaaccggagatccgaaagctgttgggatcaccaggaatgccagataaaaactccaggcatactctgatgtttagcgctactttccctgacgagattcagaaattggcgcatgaattcatgagggaagacttcctgtttcttactgttggacgagtgggtggagcttgttcggatgtcactcaaactcttctccaagtggagaatgctgataaacgtgagaaactgatggagctccttgttgatgttccggaaacagcagcaaggactttggtttttgttgatacgaagagaaatgcggattttctcgcgacttttttgtcacaagaaggtctgcctactactagtatccatggagacaggcagcagagagaaagggaaatagcattgactgatttcaagaagggcaaatgcccgatattgattgcaacttctgtggctgctcggggtctcgatattcccaaagtggaacacgtgataaattacgatttgccgtcagaaattgatgaatatgttcatcgcattggacgcacgggacgatgcggcaatcttggatctgcgacctctttctacagcgatgacaagaacgcggcgttggcaaggtcgttggtgaaggtattgtctgacgcgcaacaggaggtacccgattggctagaatcttgtgcggaaggagctgtcgggactcactttggacccaaaggcgggaaatttggtgcaagagataccagatccggcggtggtgggggtggacaagcgtctcgtcaaatgggtgattatgattacaatgatggcagttctaaagtgaacggcggggggtcccaagctcctgcttcaggcggcttcgatgatgatgatgatagctgggattag

SEQ ID NO: 3473 - protein, 687 aa, Botryllus primigenus
MFEDDNWDDGDFGGVTTSNKQSSGSFGGGFGSYNGAGDSNYSQSRSGGNRSSSCYKCGEEGHMSRDCPNGGGSSRPKGCFKCGEEGHMSRDCPNGGGDSRPKGCFKCGEEGHMSRDCPNGGGDSRPKGCFKCGEEGHMSRDCPNGGEGGSRSQGDRQKGSGCFKCGEEGHFSRECPKADGEEGVRPEPYIPPPPPEDEEAIYASTQTGINFSKYDAIPVEVSGENPPDGIASFDSANLPETIRENVNKARYTKPTPVQKYSIPIINAGRDLMACAQTGSGKTAAFLLPVLAGIFRSGLKADSFSEKQTPQAIVVGPTRELVSQIFTEARKFARNSVVQPVVAYGGTSVQSQLRDLSRGCNILIATPGRLLDFINRGKVGCDCVEYLILDEADRMLDMGFEPEIRKLLGSPGMPDKNSRHTLMFSATFPDEIQKLAHEFMREDFLFLTVGRVGGACSDVTQTLLQVENADKREKLMELLVDVPETAARTLVFVDTKRNADFLATFLSQEGLPTTSIHGDRQQREREIALTDFKKGKCPILIATSVAARGLDIPKVEHVINYDLPSEIDEYVHRIGRTGRCGNLGSATSFYSDDKNAALARSLVKVLSDAQQEVPDWLESCAEGAVGTHFGPKGGKFGARDTRSGGGGGGQASRQMGDYDYNDGSSKVNGGGSQAPASGGFDDDDDSWD

SEQ ID NO: 3474 - DNA, 1791 bp, Anopheles gambiae
  CDS (1)..(1791)
atgagcggagacggtgaatgggacgattgtgacgagggacgtagcttcgatcagcccaagtacgatgctaccgaaaatagtgttcaggacaacgatactaacgggttcgacaactatcagtccaacaatgctttcggtgacgagtatcaaagcaacgacaacggtggatatggaggcggtgacgatggatacggcggcggtggtcgtggaggccgtggaggccgaggtggcggacgaggtcgtggtcggggccgtggcgggcgcgatggtggcggtggcttcggtggcggtggctacggtgatcgaaacggcgatggcggccgacctgcctattctggcaacagcgatccaagcatggaccaggtgaagacggacaagccgagggagctgtacattccgccacttccgaccgaggacgaatcgctgatcttcgggtccggcatcagctctgggatcaattttgacaagttcgaggaaatccaggtgcgcgtgtcgggcgaaaatccaccggatcacgtggagagcttcgagcgctccggtttgcgcgaggaggtgatgacgaacgtgcgcaagtcgagctacacgaaaccgacgcccatccagcggtacgccatcccgatcatcctgaacgggcgcgacctgatggcctgcgcccagaccggttcgggcaagacggccgccttcatgctgccgatgatccaccatctgctggacaaggaggattcgctggagctgcgcacgcgcaacccgtacatcgtgatcgtagccccgacccgtgagctcgcgattcaaatccacgacgaggggcgcaagttcgcgcacggcaccaagctgaaggtctgcgtatcgtacggcggcacagccgtacagcaccagctgcagctgatgcgcggtggctgccacgtgctggtggcaacgcccggtcggctgctggacttcatcgaccgggggtacgtgacgtttgagaacgtgaacttcgtggtgctcgacgaagccgatcggatgctggacatgggctttctgccctcgatcgagaaggtgatgggacacgcgacgatgccggaaaagcagcagcggcagacgctcatgttttcggctacgttcccggccgaaatccaggagctggcgggcaagttcctgcacaactacatctgcgtgttcgtgggcatcgtcggcggagcgtgtgccgatgtggagcagacgatccatctggtggaaaagttcaagaagcgcaagaagctggaggagatcctgaacggcggcaatcccaagggtacgctcgtgttcgtggagacgaagcgcaatgcggactatctggcatcgctgatgtccgagacgcagttcccgaccacctccatccatggcgatcggttgcagcgggagcgcgagatggcgctgtacgatttcaagtccgggcggatggacgtgctgatcgcgacgtcggtagcggcccgcgggctggacattaaaaatgtgaaccacgtggtgaactacgatctgccgaagagcatcgatgattacgtgcaccgtatcgggcgaaccgggcgcgtcggcaacaagggccgagcgactagcttctacgacccggaggcggaccgggctatggcgagcgatctggtgaagattctcacccaggccgggcagtcggtgccggactttttgaaggatgctggcggctccggatcgtacatgggatcgtcccagttcggtggcaaggatatccgcgactcgtacggttcgcgtgtcgatgcccagccggttgccctcgagccggaggaagagtgggagtaa

SEQ ID NO: 3475 - protein, 596 aa, Anopheles gambiae
MSGDGEWDDCDEGRSFDQPKYDATENSVQDNDTNGFDNYQSNNAFGDEYQSNDNGGYGGGDDGYGGGGRGGRGGRGGGRGRGRGRGGRDGGGGFGGGGYGDRNGDGGRPAYSGNSDPSMDQVKTDKPRELYIPPLPTEDESLIFGSGISSGINFDKFEEIQVRVSGENPPDHVESFERSGLREEVMTNVRKSSYTKPTPIQRYAIPIILNGRDLMACAQTGSGKTAAFMLPMIHHLLDKEDSLELRTRNPYIVIVAPTRELAIQIHDEGRKFAHGTKLKVCVSYGGTAVQHQLQLMRGGCHVLVATPGRLLDFIDRGYVTFENVNFVVLDEADRMLDMGFLPSIEKVMGHATMPEKQQRQTLMFSATFPAEIQELAGKFLHNYICVFVGIVGGACADVEQTIHLVEKFKKRKKLEEILNGGNPKGTLVFVETKRNADYLASLMSETQFPTTSIHGDRLQREREMALYDFKSGRMDVLIATSVAARGLDIKNVNHVVNYDLPKSIDDYVHRIGRTGRVGNKGRATSFYDPEADRAMASDLVKILTQAGQSVPDFLKDAGGSGSYMGSSQFGGKDIRDSYGSRVDAQPVALEPEEEWE

SEQ ID NO: 3476 - DNA, 2451 bp, Platynereis dumerilii
  CDS (1)..(2451)
atgcctaatgattccatccaaaatggcaaaagtctagaacagcaggttgctgggctagacttgaactctgcaccccctttcaggggcggaggacgagacggttttaaccctggctacatgcgcggaggcaacacacgtggctttcatcatggtccgtaccaggtccctcccccgccaccccagtttttcgctggaccgccgggccctggaggcaaccctgccatgtactttccgtttcccactggacggtacatccctccacacctacggggacgtggcggaggtgtccctggccctagtgcagaccgacaaaacggagcaggaagaggcgctggaccccctggccctccgatagaccaaaacggcgggaactggaatagcctaccaagaggttcatcggcccaaggggactacaacagctacaacaactcgagggggggaagatcagggtctgagggacccagggatggccctggacggggaggaagcgcggaccgagacttcgacggaggcagaggtggcggcacctgggggccatcaaacagacgaggcagccaggacagtcagggcggaggccggcgctgggataaccgaagcagcgaccgtggaggtggctggggatggcggcaacaaccgctgggacaaccgtggcggcagcgaaggcccccggcggtcgctacaacaaccgtggcggccagagatggggacaacagagacaacaaccgcggattcgacgacggcacccagaggtggggtaacagccgctggaacaacagtggtggcggcggaggtggtcgaaacacatgggacaacaatgaccagaacggctctcgctggaatcggctgagagaggagggacctgctgattggtctaaactactgccgcctaatgagcgcctggagaaggagctcttcggcaacagcaacacaggaatcaacttcgacaagtacgaggacattcccgtcgaggcaacgggagaagactgccctgcaaacgtggagtcgtttgccgagttagaacttggtgagatcgtagacagcaacatcgtcctgtccaagtacaccaagccgacccctgtgcagaagcacgctatgcctatcatcaaaaagaagagggatctgatggcctgcgctcagacggggtctggcaagacggcctccttccttgttcctgtgctatctcagatgtttttggacggccagcccgagttcattcgggaacagaataaccgcaacaataggaagcagtacccaattgcactggttcttgcgccaaccagagagttggcctctcagatctacgaggaggctagaaagtttgcgtaccgttctcacgtgcgaccatgtgtagtttacggaggagcagacatcggagcacagatgagagatctgcccgaacgggggtgccacttgctggtggcgacacctggaagactcgtggacatgctggagagaggaaagatcggtctggaccacatcagatttgtggttcttgacgaggcagatcgtatgttggacatgggtttcgaaccccagatccgtcgaatcgttgagaaagacactatgcccccaaccggagatagacgaacgcttatgttcagtgccacttttcccaaggagatccagatcttagcaagagatttcctgcacaactacattttcttggctgtcggccgagtgggaagtacaagcgaaaacatcacccagaaggttgtctgggtggaggagcccgacaagaggtcgttcttactcgatctgcttaatgcttctggtccggattcactgaccctggttttcgtggagaccaagaagggagcggacgcccttgacaacttcctgtacaacgaggggtacccgtccgcctgtatccatggtgacagatctcagaaggagcgagaggaggccctcaggaacttcaggagtggaaagacccccgtgctggtcgctactgctgtggcagccagaggtctggatatccctaacgtgaaacacgtcattaacttcgatctgccgagtgacattgaggagtacgtccacaggattgggcgtaccgggcgtgtgggaaatcttggtcttgccacttctttcttcaacgacaagaacaagaacatcgtccgtgacatggtggatcttctcatagaagccaaacaggaggttcccccatggatcgagagcatcgcttacgaagccagaaccatgggaggaggacgacgaccccagaataagaggttcggaggcagcttcggcagtcgcgattaccgtcaaatgggcggccagggtggcggacgaggaggaagcactcagatgaggagcaaccccgtccctcaagcgttcggaggagccccgatgggctacggattccaccagggaggaggaggctacggaggaagctacggaggaccctaccagcaaccccaggcccatcacgctcacgactggtggggcaactag

SEQ ID NO: 3477 - protein, 816 aa, Platynereis dumerilii
MPNDSIQNGKSLEQQVAGLDLNSAPPFRGGGRDGFNPGYMRGGNTRGFHHGPYQVPPPPPQFFAGPPGPGGNPAMYFPFPTGRYIPPHLRGRGGGVPGPSADRQNGAGRGAGPPGPPIDQNGGNWNSLPRGSSAQGDYNSYNNSRGGRSGSEGPRDGPGRGGSADRDFDGGRGGGTWGPSNRRGSQDSQGGGRRWDNRSSDRGGGWGWRQQPLGQPWRQRRPPAVATTTVAARDGDNRDNNRGFDDGTQRWGNSRWNNSGGGGGGRNTWDNNDQNGSRWNRLREEGPADWSKLLPPNERLEKELFGNSNTGINFDKYEDIPVEATGEDCPANVESFAELELGEIVDSNIVLSKYTKPTPVQKHAMPIIKKKRDLMACAQTGSGKTASFLVPVLSQMFLDGQPEFIREQNNRNNRKQYPIALVLAPTRELASQIYEEARKFAYRSHVRPCVVYGGADIGAQMRDLPERGCHLLVATPGRLVDMLERGKIGLDHIRFVVLDEADRMLDMGFEPQIRRIVEKDTMPPTGDRRTLMFSATFPKEIQILARDFLHNYIFLAVGRVGSTSENITQKVVWVEEPDKRSFLLDLLNASGPDSLTLVFVETKKGADALDNFLYNEGYPSACIHGDRSQKEREEALRNFRSGKTPVLVATAVAARGLDIPNVKHVINFDLPSDIEEYVHRIGRTGRVGNLGLATSFFNDKNKNIVRDMVDLLIEAKQEVPPWIESIAYEARTMGGGRRPQNKRFGGSFGSRDYRQMGGQGGGRGGSTQMRSNPVPQAFGGAPMGYGFHQGGGGYGGSYGGPYQQPQAHHAHDWWGN

SEQ ID NO: 3478 - DNA, 2316 bp, Platynereis dumerilii
  CDS (1)..(2316)
atgcctaatgattccatccaaaatggcaaaagtctagaacagcaggttgctgggctagacttgaactctgcaccccctttcaggggcggaggacgagacggttttactggacggtacatccctccacacctacggggacgtggcggaggtgtccctggccctagtgcagaccgacaaaacggagcaggaagaggcgctggaccccctggccctccgatagaccaaaacggcgggaactggataagcctaccaagaggttcatcggcccaaggggactacaacagctacaacaactcgagggggggaagatcagggtctgagggacccagggatggccctggacggggaggaagcgcggaccgagacttcgacggaggcagaggtggcggcacctgggggccatcaaacagacgaggcagccaggacagtcagggcggaggccggcgctgggataaccgaagcagcgaccgtggaggtggctggggatggcggcaacaaccgctgggacaaccgtggcggcagcgaaggcccccggcggtcgctacaacaaccgtggcggccagagatggggacaacagagacaacaaccgcggattcgacgacggcacccagaggtggggtaacagccgctggaacaacagtggtggcggcggaggtggtcgaaacacatgggacaacaatgaccagaacggctctcgctggaatcggctgagagaggagggacctgctgattggtctaaactactgccgcctaatgagcgcctggagaaggagctcttcggcaacagcaacacaggaatcaacttcgacaagtacgaggacattcccgtcgaggcaacgggagaagactgccctgcaaacgtggagtcgtttgccgagttagaacttggtgagatcgtagacagcaacatcgtcctgtccaagtacaccaagccgacccctgtgcagaagcacgctatgcctatcatcaaaaagaagagggatctgatggcctgcgctcagacggggtctggcaagacggcctccttccttgttcctgtgctatctcagatgtttttggacggccagcccgagttcattcgggaacagaataaccgcaacaataggaagcagtacccaattgcactggttcttgcgccaaccagagagttggcctctcagatctacgaggaggctagaaagtttgcgtaccgttctcacgtgcgaccatgtgtagtttacggaggagcagacatcggagcacagatgagagatctgcccgaacgggggtgccacttgctggtggcgacacctggaagactcgtggacatgctggagagaggaaagatcggtctggaccacatcagatttgtggttcttgacgaggcagatcgtatgttggacatgggtttcgaaccccagatccgtcgaatcgttgagaaagacactatgcccccaaccggagatagacgaacgcttatgttcagtgccacttttcccaaggagatccagatcttagcaagagatttcctgcacaactacattttcttggctgtcggccgagtgggaagtacaagcgaaaacatcacccagaaggttgtctgggtggaggagcccgacaagaggtcgttcttactcgatctgcttaatgcttctggtccggattcactgaccctggttttcgtggagaccaagaagggagcggacgcccttgacaacttcctgtacaacgaggggtacccgtccgcctgtatccatggtgacagatctcagaaggagcgagaggaggccctcaggaacttcaggagtggaaagacccccgtgctggtcgctactgctgtggcagccagaggtctggatatccctaacgtgaaacacgtcattaacttcgatctgccgagtgacattgaggagtacgtccacaggattgggcgtaccgggcgtgtgggaaatcttggtcttgccacttctttcttcaacgacaagaacaagaacatcgtccgtgacatggtggatcttctcatagaagccaaacaggaggttcccccatggatcgagagcatcgcttacgaagccagaaccatgggaggaggacgacgaccccagaataagaggttcggaggcagcttcggcagtcgcgattaccgtcaaatgggcggccagggtggcggacgaggaggaagcactcagatgaggagcaaccccgtccctcaagcgttcggaggagccccgatgggctacggattccaccagggaggaggaggctacggaggaagctacggaggaccctaccagcaaccccaggcccatcacgctcacgactggtggggcaactag

SEQ ID NO: 3479 - protein, 771 aa, Platynereis dumerilii
MPNDSIQNGKSLEQQVAGLDLNSAPPFRGGGRDGFTGRYIPPHLRGRGGGVPGPSADRQNGAGRGAGPPGPPIDQNGGNWISLPRGSSAQGDYNSYNNSRGGRSGSEGPRDGPGRGGSADRDFDGGRGGGTWGPSNRRGSQDSQGGGRRWDNRSSDRGGGWGWRQQPLGQPWRQRRPPAVATTTVAARDGDNRDNNRGFDDGTQRWGNSRWNNSGGGGGGRNTWDNNDQNGSRWNRLREEGPADWSKLLPPNERLEKELFGNSNTGINFDKYEDIPVEATGEDCPANVESFAELELGEIVDSNIVLSKYTKPTPVQKHAMPIIKKKRDLMACAQTGSGKTASFLVPVLSQMFLDGQPEFIREQNNRNNRKQYPIALVLAPTRELASQIYEEARKFAYRSHVRPCVVYGGADIGAQMRDLPERGCHLLVATPGRLVDMLERGKIGLDHIRFVVLDEADRMLDMGFEPQIRRIVEKDTMPPTGDRRTLMFSATFPKEIQILARDFLHNYIFLAVGRVGSTSENITQKVVWVEEPDKRSFLLDLLNASGPDSLTLVFVETKKGADALDNFLYNEGYPSACIHGDRSQKEREEALRNFRSGKTPVLVATAVAARGLDIPNVKHVINFDLPSDIEEYVHRIGRTGRVGNLGLATSFFNDKNKNIVRDMVDLLIEAKQEVPPWIESIAYEARTMGGGRRPQNKRFGGSFGSRDYRQMGGQGGGRGGSTQMRSNPVPQAFGGAPMGYGFHQGGGGYGGSYGGPYQQPQAHHAHDWWGN

SEQ ID NO: 3480 - DNA, 2139 bp, Platynereis dumerilii
  CDS (1)..(2139)
atgtcagactggagtgatgatgaggggacgaccaatggatttgggggcacgacaaatgggaatttcaactttggaagaggccgtggcatggcaaaaggcggtgacgactcgcaagggggcttcggaagcaagagcagtggatttggcagcaaatttggctcccgggatgagaattcaaatgagagtggaggatttggcagtcgtagtaacggatttggatcaagaggtgctggaggagatgatgagccaaggggtggtggattcggaggaaagcgaggaggtggtggcggtggcagcagcggttgttacaaatgtggtggcgagggtcacatagcccgtgattgcccggatgctggaggcagtggaggcggcggcggaggaggtggcagtagggcatgtttcaagtgtggagaggagggccatttctcccgtgaatgtcccaacggaggaagttccggaggcggcggtggtggatttggtggttccagaggcggtggattcggaagctctggcggtggtggtggatttggaggcggcggcggcagtggaggaggcaagggatgcttcaagtgcggggaagagggacatttctctcgtgaatgccctaatggcggtggtgattccggtggtaaccccggagattcaaatagaggagatggcgaaaagaaaactgagatctatgttcccccgcctcccccggagagtgaagaagaaatgttccagtccatcacagccggaatcaactttgacaaatacgagtctattcctgttgaagtgtcaggcactaatgcaccaaagaacggcattttaaattttgatcaagcagacctatcggaaactgtccgctccaatgtacgtaaagccaagtacgatcggccgacccctatccagaagtgggctatccctatcgtcctctcaggcaaagacttgatgggctgtgctcaaacaggatccggaaaaacagctgctttcttgctacccgtgctgactggaattatcaagaatgatctcatcgaaggaggttctggttttggaggaccccaataccctgccgctattatcgttggacccaccagagagttggtcaaccagatctatctcgaagcaaggaagtttgcttcttcaacttgcgtcagaccagtcgtcgtttacggtggaacttcagttggataccaagccagagaactggagaagggcgcccacgttgtcgttggtacccccggtcgattgctcgacttcattggaaagggcaagattaacttgtcgaaggtgaagtacctcatcctggatgaagccgatcgtatgttggacatgggtttcgagcccgagatcagaaagctcgtcacaaccttcgatatgcccgagaaaggccagagacagaccctcatgttcagcgcaaccttcgctgccgagatccagcagcttgccaaggagttcttgagcgagtatgtgtttgtgactgtcggacgagtgggtggtgccaactccgacattactcaggaagtccaccaagtcaccaagtacgagaagagggagaagctcgtggagatcttgaaccaagcaggaaccgacagaaccctggtattcctggaaaccaagcgcagtgctgatttccttgctgcgtatctgtcccaagaacagtaccctgccacaagtattcacggagatcgtttgcagagggaaagagaagaggccttgttggacttcaaaacaggccgagctccgatcttgattgctacctcagtggctgccagaggtcttgatattcctggcgtcaagcacgtcataaactacgatctccccagtggcattgatgagtacgtccacagaattggtcgaaccggtcgttgcggtaatcttggaaaggccacatcattcttcgatccggatgttaaccaagacaaagaacttgctcgatccctcgtcaaaactctcggcgacgcacaacaagttgtcccaccatggcttgaggagatcgcggagggagccatttctagtggattccagggaggcgacagatttggcgccaaggacacccgtagaggaatgaggaaaaccacagaagatgctggattcggcggaagttccaatggattcggaggcgatgctggcggtggtgatgacgaggactgggattaa

SEQ ID NO: 3481 - protein, 712 aa, Platynereis dumerilii
MSDWSDDEGTTNGFGGTTNGNFNFGRGRGMAKGGDDSQGGFGSKSSGFGSKFGSRDENSNESGGFGSRSNGFGSRGAGGDDEPRGGGFGGKRGGGGGGSSGCYKCGGEGHIARDCPDAGGSGGGGGGGGSRACFKCGEEGHFSRECPNGGSSGGGGGGFGGSRGGGFGSSGGGGGFGGGGGSGGGKGCFKCGEEGHFSRECPNGGGDSGGNPGDSNRGDGEKKTEIYVPPPPPESEEEMFQSITAGINFDKYESIPVEVSGTNAPKNGILNFDQADLSETVRSNVRKAKYDRPTPIQKWAIPIVLSGKDLMGCAQTGSGKTAAFLLPVLTGIIKNDLIEGGSGFGGPQYPAAIIVGPTRELVNQIYLEARKFASSTCVRPVVVYGGTSVGYQARELEKGAHVVVGTPGRLLDFIGKGKINLSKVKYLILDEADRMLDMGFEPEIRKLVTTFDMPEKGQRQTLMFSATFAAEIQQLAKEFLSEYVFVTVGRVGGANSDITQEVHQVTKYEKREKLVEILNQAGTDRTLVFLETKRSADFLAAYLSQEQYPATSIHGDRLQREREEALLDFKTGRAPILIATSVAARGLDIPGVKHVINYDLPSGIDEYVHRIGRTGRCGNLGKATSFFDPDVNQDKELARSLVKTLGDAQQVVPPWLEEIAEGAISSGFQGGDRFGAKDTRRGMRKTTEDAGFGGSSNGFGGDAGGGDDEDWD

SEQ ID NO: 3482 - DNA, 2112 bp, Penaeus vannamei
  CDS (1)..(2112)
atgtctgatgattgggatgaaactgatgcagcccctgcatctgattggaatatagagtcctttgggctgccaacaagttttggaagtacaaagaaaacctgtaacacaggcaatgcctttaatgatggagaagggggctttgatgaaggttctcagagcaactttgatgatccctttaggagtggaggtggtggctttgggggcagaggaagaggaggaccaagagcatgttttaagtgtggagatgaaggtcacatggcaagagattgcccctcagcatcagatagtaggggaaacagaacaaacaacagaaggcaagacaactggggaggcggcagttcatccaagcctgcaaatggagagcccttcgggtttgggtctgcttttggtgacaatcaagaaagtgacccttttggtgctactgaatcatccggcttcggttttggctctggttctggttccaggggtggtagaaggaatgatggtggcaggggatgctttaagtgtggagaggaaggccacatgtcaagggattgtccatctggtggaggacgtaataagggctgcttcaagtgtggtcaggaaggccataatgcccgtgactgcccaaacccgggtgagggaagtgaggaaaaaaagccaagagctccactttatatcccagcggatgtgaatgaagatgagctctttgtcatgggcattgaagctggctccaactttgatgcatatgccaacgttccagccaatgtatcaggagctgagccaattcagcctgcagctgaaagtttccagtccatgaatctacgtcccttgcttctggagaacatagtcaaagctggttatggttgtccaacaccagtccagaagtacaccattccaaatgtgatgaatggacgagatattatggcgtgtgcacaaacggggagtgggaagacagctgctttcctgttgccaatgctacactacatacttgacaataactgcccaagcaatgcatttgaggaaccagcccaaccaactggactggtaatctgcccaaccagagagctggctatccagatcatgcgagaggctcgaaagttttctcacagctcagttgcaaagtgttgtgtggcttacggtggagctgcaggattccaccagttgaagaccattcatagtggatgccatattttagtagcaacaccaggaagattactggacttccttgagaagggcaaaattgtcttcagcagtctgaagtatctggttcttgacgaagccgacaggatgctggacatgggctttttgtcgagcatcaaaacagtgataaatcacaagacaatgacaccaactgcagaacgcataacattgatgttcagtgctacattcccccatgagattcaggaactagcatctgcctttttgaacaactatttgtttgttgttgttggaactgttggagcagcaaacactgatgtcaaacaagaggttttgtgtgtgcccaagtttgagaagaaggcaaagctggtagagatgtgtgaagaaattttaatcagtgctgatgatgagaagatcttggtatttgttgaacaaaagcgagtagctgattttgttggtacttacctctgtgaaaagaaattccgggccaccactatgcatggggatcgttaccaagcacagcgtgaacaagcattatcagaattcaggactggtgttcacaatatcctggtagctacagctgttacagcccgtggtcttgatatcaaggggattggtgtggtagtcaattatgatttaccaaaggacattgatgaatatgtacaccgcattggccggactggacgtcttgggaatcgaggcttgtccatcagtttctatgatgatgaaactgatgcttgcttaacaaaggacttggtgaaggttctgagtgaggccaatcaaactatcccagactggctgacacaaaaggcaaatgcaagtggccatgcccaaacttaccatggcagtggtctgtttgcatcctctgatataaggtcaaagaatgggggaggaagaggctgggagaaaaaccaggctagcagctttctcggaggacctagtgaaagcaatgtagatgaagaatgggactaa

SEQ ID NO: 3483 - protein, 703 aa, Penaeus vannamei
MSDDWDETDAAPASDWNIESFGLPTSFGSTKKTCNTGNAFNDGEGGFDEGSQSNFDDPFRSGGGGFGGRGRGGPRACFKCGDEGHMARDCPSASDSRGNRTNNRRQDNWGGGSSSKPANGEPFGFGSAFGDNQESDPFGATESSGFGFGSGSGSRGGRRNDGGRGCFKCGEEGHMSRDCPSGGGRNKGCFKCGQEGHNARDCPNPGEGSEEKKPRAPLYIPADVNEDELFVMGIEAGSNFDAYANVPANVSGAEPIQPAAESFQSMNLRPLLLENIVKAGYGCPTPVQKYTIPNVMNGRDIMACAQTGSGKTAAFLLPMLHYILDNNCPSNAFEEPAQPTGLVICPTRELAIQIMREARKFSHSSVAKCCVAYGGAAGFHQLKTIHSGCHILVATPGRLLDFLEKGKIVFSSLKYLVLDEADRMLDMGFLSSIKTVINHKTMTPTAERITLMFSATFPHEIQELASAFLNNYLFVVVGTVGAANTDVKQEVLCVPKFEKKAKLVEMCEEILISADDEKILVFVEQKRVADFVGTYLCEKKFRATTMHGDRYQAQREQALSEFRTGVHNILVATAVTARGLDIKGIGVVVNYDLPKDIDEYVHRIGRTGRLGNRGLSISFYDDETDACLTKDLVKVLSEANQTIPDWLTQKANASGHAQTYHGSGLFASSDIRSKNGGGRGWEKNQASSFLGGPSESNVDEEWD

SEQ ID NO: 3484 - DNA, 2181 bp, Artemia sanfranciscana
  CDS (1)..(2181)
atggatgactgggatgatgaagagaagcccacgacttatgtgaaagggaatgctctagaaagtacaactcaagataatggttggaacccagtagaaagtggcggatggaatgacagtggcgctaaagagtcaaatggatgggatgagagtaacaacaacagttggggacgatccaatggtgattcaggattccaaggaagtggaaggggaggcagaggagaaggatcaagtggaaaatgctttaattgtaatcaagaagggcatatgtcacgtgagtgcacacagccaagagctgaaagaggtggcggacgcggaggaggacgcggtggttcaagggcctgttacaattgtaatcaagaaggacatatgtcgcaagaatgcacagagccaagagctgaaagaggtggtggacgtggaggaggacgtggtgggtcaagggcctgtttcaattgtcagcaagaaggccatagagcaagtgattgcactgaacctagggccgaaagaggtcgtggaggaggccgaggtcgtggcggacgtggtggctttggcaggactgaaactactacgtctgattggggtaacaatgaaacagacacagcagcagaatcaggctggaacggtgattcctttgcagagtcagataattttggtaatgatacaagttctggatttcgtggtagaggaggccgtgggggaaggggtcgtggtggtggaagaggaccatcggacgattcggaaccagctggagagacaaccgagccagagcgtgctccagtaacgtacattcccgacgaggaggaagaaacagaggagctcctttttcaccgagggactactgccggaataaattttagtaaattttcaaatgtagcagccaaggtaacaggcgaaggccttcctagtggaattgattcttttgatgctgcagggttgcgtccaaaaatattagataatataaagaaatctggatatactcaacctacacctgttcagaagtgggccattccagtcattatgaagaaaagggacttaatggcatgtgcgcagaccggctctggaaaaaccggtgcttatcttatcccaatcataaatcgcctgatcgaagaaggatgcgctgcctcgtcgtatgacgaaacacaaactccagaagcggttgtcatgtgtccaacccgagaattggctatacagatttttaaggaagccgtcaagttttcttacgataccattattaaaccagttgttgtctatggtggtgttgcgcctcgttatcaatctgacaaagttaagagtggctgtaatatcctagttggcacgcctggccgattgatagattttatgaatcgtggagtattcaacttttctgcttgtaagtttttggttcttgatgaagctgatcgaatgttggacatgggcttcatgggcgaagtcaagaaagttgtataccatggaacgatgccagtaaaggttgaaagaaatacattgatgttctcagcaacttttcctaacgaagttcaagagttggctgcagaatttcttgagaattatatttttgttactgttggcacagtgggtggagcctgcatggacgtacttcaagaagttatagagattgatgctaagagtcgaatcgatcgacttctcgaaattttgacagaaaaagagggcgttaagactctggtttttgcatcttcgaagaagactgccgattttcttgccgcattactctcaacaaaaaaccttcctgccacaagtatacacggagatcgatttcaatatcagagagaagaagtgctgcgtgactttaaatctgggcaccgtaacattcttgttgctactgcagtggctgctcgaggcttagatataaagggcgttggccttgtcatcaactatgaactacctacagatattgatgaatatgtacataggatcggaagaacgggtcgccttggtaatactgggcatgccatatcatttttcaacccggataaggattcagcaattgccgggaagctggttaatgttcttgcggcggcacagcaaactgttcctgtttttcttgagtctatggcaagtggggtatcatttggttctgatgcttcgagccgttttggtggatctgatgttagaaatactgggagagccttagaagtccagatcgaagctgacgaagaatggtcttaa

SEQ ID NO: 3485 - protein, 726 aa, Artemia sanfranciscana
MDDWDDEEKPTTYVKGNALESTTQDNGWNPVESGGWNDSGAKESNGWDESNNNSWGRSNGDSGFQGSGRGGRGEGSSGKCFNCNQEGHMSRECTQPRAERGGGRGGGRGGSRACYNCNQEGHMSQECTEPRAERGGGRGGGRGGSRACFNCQQEGHRASDCTEPRAERGRGGGRGRGGRGGFGRTETTTSDWGNNETDTAAESGWNGDSFAESDNFGNDTSSGFRGRGGRGGRGRGGGRGPSDDSEPAGETTEPERAPVTYIPDEEEETEELLFHRGTTAGINFSKFSNVAAKVTGEGLPSGIDSFDAAGLRPKILDNIKKSGYTQPTPVQKWAIPVIMKKRDLMACAQTGSGKTGAYLIPIINRLIEEGCAASSYDETQTPEAVVMCPTRELAIQIFKEAVKFSYDTIIKPVVVYGGVAPRYQSDKVKSGCNILVGTPGRLIDFMNRGVFNFSACKFLVLDEADRMLDMGFMGEVKKVVYHGTMPVKVERNTLMFSATFPNEVQELAAEFLENYIFVTVGTVGGACMDVLQEVIEIDAKSRIDRLLEILTEKEGVKTLVFASSKKTADFLAALLSTKNLPATSIHGDRFQYQREEVLRDFKSGHRNILVATAVAARGLDIKGVGLVINYELPTDIDEYVHRIGRTGRLGNTGHAISFFNPDKDSAIAGKLVNVLAAAQQTVPVFLESMASGVSFGSDASSRFGGSDVRNTGRALEVQIEADEEWS

SEQ ID NO: 3486 - DNA, 2127 bp, Copidosoma floridanum
  CDS (1)..(2127)
atgacgaatccatggctcctgcggcaccggcgccgaccaacttcagcaaaggtcgcgggtttactccagccaataacaatagttatggtgatggcggtgatcagcgaggaggaagttacggtgacaatgatcgtgggggtcgtagtcggggaggaggacgtggtggccgaggtagccgcggcggtggaggtggaggctacgacaattccaatggtggtggttgggacaacaaaaaaagcaacgacaattggaacgatggtcccaaagaactacctaaagctgaagacgattgggcttgcccaaggaagtggtgggggtgacgattggttagcccaaggaaacggtggaggtggatttggcgacgatgatgatggtggatttggaggtggagacagaagaggagggcgcggtggtcgtggcggtcggggcggtcgaggtggccgtggtggtgatcgcggtggtcgaggtggtcgtggcggaagaaattttggcgacaacaatcgagataacgatgatgataacggttttggaggcgattctggaggctttggagacggtaatggtgatgaaggatttggtggaggcggtagaggccgtggacgcggtcgaggacgtggaggtggtggccgaggtggccgtgatgggggagatgatcgcggaggtcaagaaggtggagaagggggcgaaccagaaaagccacgtgaaatctatattcctcccgataggtctaatgatgacgagactctctttggcagtggtacgaaagctggcattaactttagcaagtatgaatccattgaagtgaaagtaagtggtgaagatgttcccaataagttgaattcttttgatgaagcaaatctgagatctttgcttgtcgataatattaaaaagtctggataccaaattccaacacccattcaaaaacatggtatacccattgttctagctggtagagatttgatgggctgtgcccagacaggctctggaaaaactgctgcctttttaataccaatcatacataatcttttactaaagccaagagaaatcaatgatatgggttctttatctacagttgaaccaagagctttgattttagcccctacaagagaattagccattcagattcacgatgaatgcagaaagttttcgaaagactctgtactaaagtgttgtcttatatacggaggtacagctgttggacatcagctgaagcaaatattttatggctgtgatcttttagtggcgactcctggccgacttaaagactttgttggtagaggaaaagttgtttttagcgcaattgaatacctcgtccttgatgaagctgatcgaatgatagacatgggtttcatcggtgatgtagaaatggtaatacgccacgaaactatgactccccccggagaacgtcaaacgcttatgttctccgctacctttcctcgtgatattcaggagttggcagtaaagttcctgaacaactacatcttcgtagctgtgggaattgttggtagcgcgtgtagcgacatagaacaatcgttcctcgaagtcaagaagtccgataaaagaagtaaattgaaagaaattctcgaagaagagcgcaacaacgataccctcaaaggaattctggtgtttgttgaccaaaagagaactgctgattttatagcagcgtttttgtctgataataacttcccgaccacgagtatccatggtgatcgattgcagcgagagcgagaggaagctctaaatgatttcaaatctggtaggatgtgcatccttgtcgccacagctgtagctgccaggggtttggatatcaaaaacgtgcgatttgtcattaactttgatctgccaaaggaaattgatgagtacattcatcgaattggacgcacaggtcgagtcggaaacaaaggaaaggccgtcagtttttacgatgaatccatcgacaacaggattcagcctgacctagtgaaaatcttggaaatggctaatcaaccgatacctgaatggttggcaagtggagcaggctacagtaatctaggaccatccgactttggtgccgaagatataagagattttccaaactcatcaggtgctcaaggaacacttccggtcgaaaacgatgatgcttggtaa

SEQ ID NO: 3487 - protein, 708 aa, Copidosoma floridanum
MTNPWLLRHRRRPTSAKVAGLLQPITIVMVMAVISEEEVTVTMIVGVVVGEEDVVAEVAAAVEVEATTIPMVVVGTTKKATTIGTMVPKNYLKLKTIGLAQGSGGGDDWLAQGNGGGGFGDDDDGGFGGGDRRGGRGGRGGRGGRGGRGGDRGGRGGRGGRNFGDNNRDNDDDNGFGGDSGGFGDGNGDEGFGGGGRGRGRGRGRGGGGRGGRDGGDDRGGQEGGEGGEPEKPREIYIPPDRSNDDETLFGSGTKAGINFSKYESIEVKVSGEDVPNKLNSFDEANLRSLLVDNIKKSGYQIPTPIQKHGIPIVLAGRDLMGCAQTGSGKTAAFLIPIIHNLLLKPREINDMGSLSTVEPRALILAPTRELAIQIHDECRKFSKDSVLKCCLIYGGTAVGHQLKQIFYGCDLLVATPGRLKDFVGRGKVVFSAIEYLVLDEADRMIDMGFIGDVEMVIRHETMTPPGERQTLMFSATFPRDIQELAVKFLNNYIFVAVGIVGSACSDIEQSFLEVKKSDKRSKLKEILEEERNNDTLKGILVFVDQKRTADFIAAFLSDNNFPTTSIHGDRLQREREEALNDFKSGRMCILVATAVAARGLDIKNVRFVINFDLPKEIDEYIHRIGRTGRVGNKGKAVSFYDESIDNRIQPDLVKILEMANQPIPEWLASGAGYSNLGPSDFGAEDIRDFPNSSGAQGTLPVENDDAW

SEQ ID NO: 3488 - DNA, 1878 bp, Drosophila virilis
  CDS (1)..(1878)
atgtccgactgggatgatgagcctgactgcaccaatcagcctatacacaaaccccacattgatgataagtgggatagcaaaggggaggcatcatccaataagaagacagtgtccgaatggagcgatgaagaagtagctggcgatggcgatggcgatggcattgccaagggctatcgtggcgttggccaaggagctggctatcgcggacgtcgcgatgatggccaaggaggcggcggctatcgtggacgccgggatgacggcgaaggaggaggctatcgtggacgccgggatgacggcgaaggaggaggctatcgcggacgccgggatgatggcgaaggaggaggctatcgtggacgccgtgacaacgacgatggcgaagaacgccgtggcggctttgttcgtaaaagcggtggctttgaacgacgacgacgcgacgacggcgacatgaacaacaatcaggaggatgtgggcgaggatagtgaaaagaaggcaagggagttttatataccacccgagccgaccaatgacgagaccgaaatgtttagcaccggcatctcttcgggcattaactttgccaaatacgataatattcccgtcaaggtgactggcgaaaatgtgccgcaacccattaagaactttgagagtgcgcgattgcgcggcattgtgctggataatgtggttaaatcgggctatgtggtgcccacgcccatacagaaggtatcgataccagtaattgccgaagggcgtgatttgatggcctgcgcccagacgggctccggcaaaacggccgcctttttgctgcccatactcaacaacattctggatgagagtcatgatctagagattggcaagccgcaggcggtgattgtctcgccgacgcgtgagcttgccattcagatctttaacgaggcgcgaaaattttcatataccacatatctgaagatcagcatcgtttatggcggcacctcgttcaaatatcagaacgaatgcattaccaagggttgtcatgtgctgattgccacacccggacgtttgcttgattttgtggatcgcacattcataacattcgatgatacacgtttcattgtgctcgacgaggccgatcgcatgctggacatgggcttctcggatagtatgcgcaagattatgcatcatcagaccatgcgtccggagcatcagacattgatgttctcggctacgttcccggaggaaatccagcgcatggctggtgaatttttgaaaaattatgtctttgttaccattggcgttgtcggcggcgcctgctccgatgtgcagcagaccgtctacgaggtcaacaagtttaacaaacgctccaaattgatggaaatattacgcgagggcgccgatggcaccattgtctttgtggagacaaagcgtggcgctgattttctcgcctcgttcttttcggaaacggaattcccaactacctccatacacggcgatcgcctgcagagtcagcgcgagcaggctttgcgcgactttaagactggcaccatgaaggtgctcattgccacatcggtagcctcgcgtggccttgatattaagaatgtaaagcatgttatcaactatgatatgcccaccaatattgatgattatgtgcatcgcattggacgcacgggtcgtgtgggcaatagtggacgtgctacatcattctttgatccggaacaggatcgcacacttgccgctgatctgatcaagatcttggagggttccggtcaagaggtgccggagtttcttaaggaaattggcggcggcagcagcagctattttggctccaagtttggcggcattgatgttcgcggcggtgctaaaaacgggcacattgaaaacttggaggatgaggaggaatggaattaa

SEQ ID NO: 3489 - protein, 625 aa, Drosophila virilis
MSDWDDEPDCTNQPIHKPHIDDKWDSKGEASSNKKTVSEWSDEEVAGDGDGDGIAKGYRGVGQGAGYRGRRDDGQGGGGYRGRRDDGEGGGYRGRRDDGEGGGYRGRRDDGEGGGYRGRRDNDDGEERRGGFVRKSGGFERRRRDDGDMNNNQEDVGEDSEKKAREFYIPPEPTNDETEMFSTGISSGINFAKYDNIPVKVTGENVPQPIKNFESARLRGIVLDNVVKSGYVVPTPIQKVSIPVIAEGRDLMACAQTGSGKTAAFLLPILNNILDESHDLEIGKPQAVIVSPTRELAIQIFNEARKFSYTTYLKISIVYGGTSFKYQNECITKGCHVLIATPGRLLDFVDRTFITFDDTRFIVLDEADRMLDMGFSDSMRKIMHHQTMRPEHQTLMFSATFPEEIQRMAGEFLKNYVFVTIGVVGGACSDVQQTVYEVNKFNKRSKLMEILREGADGTIVFVETKRGADFLASFFSETEFPTTSIHGDRLQSQREQALRDFKTGTMKVLIATSVASRGLDIKNVKHVINYDMPTNIDDYVHRIGRTGRVGNSGRATSFFDPEQDRTLAADLIKILEGSGQEVPEFLKEIGGGSSSYFGSKFGGIDVRGGAKNGHIENLEDEEEWN

SEQ ID NO: 3490 - DNA, 1869 bp, Pisum sativum
  CDS (1)..(1869)
atgtcgtatgttcctccacacttgagaaacgcgagctcaaccgcggtggctacaaccaccagaccttcagcatcatccggaaccctagaccaccaccaccacaacaccaacctcgcattctcttcctcgtaccctcactccaactcttcttctctagccaatggttctcgtcgtacctctgccgcaacctccgccatctcggaattggtcaccgtccctgacactgtcttccctaactggcaaccttctgaacgcgtttcccgcatgaaccccgaccagattgaagaggtcgtacggcttaatcttgacgttactgtttcatctgactctactgccgcacctggacctatagaatcgtttaatgatatgtgtttgcatccaagtatcatgaaggatattgcttatcatgaatacaccaggccaagctctatccaggcacaggccatgccaattgctctcagtggaagggatcttttgggttgtgcagaaactggtagtgggaagactgcagctttcaccattcctatgttacagcattgcttggtccaacctccaattcgacgtggagatggtcccctggcattagttttggctcctactagagaacttgctcaacaaatagaaaaggaggtccaagcatttagcagatccctcgagtcattaaagaactgcatagttgttggtggaactaacattgaaaagcagaggtctgaactaagagcaggagttgaaatagcagtcgccacccctggaagattcattgaccacttacaacaaggcaacacttctctctctagaatttcttatgttgttctagacgaggcagatagaatgcttgatatggggtttgaaccacaaataagggagatcatgagaagtctacctgagaagcatcaaacactgctgtttagtgcaacgatgcctgtggagatcgaagcattagcaaaggagtacttagctaacccagttcaagttaaggtgggaaaagtgagcagcccaacaactaatgtttcacaaactcttgtaaaggtgtctggaagtgagaagattgaccgactcctagatttgcttgtagaagaggcatcacaagctgaaaagtgtggtcatcgatttccattgactattgtgtttgttgagagaaagacaaggtgcgatgaagtggctgaagcattggttgctcaaggattatctgcagtttctctgcatggtggtcacagtcagaatgaaagagaggctgcattacaaaattttcggagcagctccaccagcattttggttgccactgatgttgcatcacggggcttggatgtcacaggagtgtcacacgtcatcaatcttgaccttccaaagaccacagaagattatatacaccggattggaaggacagggcgtgcaggatcaactggcatagccacttcgttttacactgatcgtgacatgttccttgtgacaaatataaggaaagcaatagctgatgctgaatctgggaatgctgtggcatttgctactggaaaggttgccagaaggaaggagaaagaagcagcagctgcacacaaggaagcaaatattgcttcatctagacaccttggattaggagctgcatcaattaacatcgaagataagtacagattcatgattgctgcctcaaacagtagaggagaaggcgcagagatagtgcatgggatgattgatgaagtttctgatctacctcccatacatttgatctataggtatgttgtttggcagatactggagatggacaagttaagtttgcatgcctacgtactgtttcacacgttgctagctagcaaactggtaaccggtagcttcctagacacaatttgtagaatcagtcatgtttgtaggtaa

SEQ ID NO: 3491 - protein, 622 aa, Pisum sativum
MSYVPPHLRNASSTAVATTTRPSASSGTLDHHHHNTNLAFSSSYPHSNSSSLANGSRRTSAATSAISELVTVPDTVFPNWQPSERVSRMNPDQIEEVVRLNLDVTVSSDSTAAPGPIESFNDMCLHPSIMKDIAYHEYTRPSSIQAQAMPIALSGRDLLGCAETGSGKTAAFTIPMLQHCLVQPPIRRGDGPLALVLAPTRELAQQIEKEVQAFSRSLESLKNCIVVGGTNIEKQRSELRAGVEIAVATPGRFIDHLQQGNTSLSRISYVVLDEADRMLDMGFEPQIREIMRSLPEKHQTLLFSATMPVEIEALAKEYLANPVQVKVGKVSSPTTNVSQTLVKVSGSEKIDRLLDLLVEEASQAEKCGHRFPLTIVFVERKTRCDEVAEALVAQGLSAVSLHGGHSQNEREAALQNFRSSSTSILVATDVASRGLDVTGVSHVINLDLPKTTEDYIHRIGRTGRAGSTGIATSFYTDRDMFLVTNIRKAIADAESGNAVAFATGKVARRKEKEAAAAHKEANIASSRHLGLGAASINIEDKYRFMIAASNSRGEGAEIVHGMIDEVSDLPPIHLIYRYVVWQILEMDKLSLHAYVLFHTLLASKLVTGSFLDTICRISHVCR

SEQ ID NO: 3492 - DNA, 2151 bp, Pisum sativum
  CDS (1)..(2151)
atgcaccagctgatcctacccttcctaaagccatggaagggccttgtggatggcaagacagggtatctttacttttggaatcctgagacaaatgtcacccagtacgagaggcctttgagctcagctgccccaccaaagccttctgctgtgcctagctcttctgtccaggttcaacaatcttctcaagggcgtggtcgcagtcctgatttcagtgataggtatgataggaatggaaatggagggtcagatgaaagtggatcccggagccatcagagctccaaaggtggcactaatagttctcataataatgttgcaaatggaacacatgttactggaaatgttagttctatcaaaggtcttgtagcatcagatacaggacctgcattaactccagaggcttatagacgtcgtcatgagatcactgttacgggagataatgtgcctccacctgttatgtcatttgcgtcttctggctttccatcagagattcataaagaggtacaaaatgctgggttctcagccccaactccaattcaggcacaatcgtggcccattgcccttcaaagtaaagatatagttgccattgctaaaacaggttcagggaaaaccttggggtatttacttccagcatttatcacctcaagcgcactaataataacgccaaaatggggccccactatattggtacttcaccaacaaggggagttggcaacacaaattcaagatgaagctgtgaagttcagtaaaacatcaagaattgcctgcacttgtttgtacggaggagcaccaaagggtcctcaattgagagatattgaccgcggagcagatattgtggtagccacacctggtcgcttgaatgatatccttgagatgaggagaatcagtctacaccaggtctcttacctagtcctagatgaggcagacaggatgctggacatgggttttgaacctcaaattaggaagattgtgaacggcgtgcccgctcgcaggcaaactcttatgtttacggcaacttggcctaaagaggttaggaaaattgcagctgacctgcttgtcaatcctgtccaagtgaacattggcaacgtagatgagcttgttgctaacaagtccattactcagcatattgaagttttggcacatatggagaaacagcggcgactggaaagtattttgcaatcacaggatcaaggatcaaagataattattttttgttctaccaagaaaatgtgtgaccaacttgctcgtaatcttacacgccagtttggagctgctgctatacgtggggataaatctcaggctgatagggatcatgtgttgaatcagtttcgaagtggaaggactcctgtacttgtagctacagatgttgctgctcgtggactggacgtcaaagacattagagtggttgtcaactacaccttccctacaggagtggaggattatcttcataggattggaaggactgggagggccggagccaccggtatagcttacactttcttcggggaccaggatgctaagcatgcttcagatcttatcaaaatcttagagggtgcaaatcagaaagtccctccagaacttcgtgaattgtcatccaggggtggcggtgggtttggcagatccagacgatatggttctggtggtcgtggcgattctggattcggtgcgaagagttatgactctgggtctgggtatggtggaaggggtaatgattcaggatatggtggaaggggtagtgattcaagttatgggaggaagggtggatatgggtcttctgctgcttttggcagaggtggaggccgtggatttgactatgactcacagaggaatgaacgtgatcgaagccctgacaggggatctagctggagtgatcgcttcaaaactcgcgagcgcagccgcagtcctgtcaaggctgcaccatctcaatataatgcccccgtcagctttcatcaagcaatgatggaacgcaatggaggaggcagtgatcgcaacaagagctttaaccgggagcgaagccgtagtcatagtccttatagacatgacaagggaaaacgttcaccatcccccctggcggtggtaggaccaacagtagttcaggtgttggaagaaacggtggttctcatccttacaatggagaattggaggaagggatga

SEQ ID NO: 3493 - protein, 716 aa, Pisum sativum
MHQLILPFLKPWKGLVDGKTGYLYFWNPETNVTQYERPLSSAAPPKPSAVPSSSVQVQQSSQGRGRSPDFSDRYDRNGNGGSDESGSRSHQSSKGGTNSSHNNVANGTHVTGNVSSIKGLVASDTGPALTPEAYRRRHEITVTGDNVPPPVMSFASSGFPSEIHKEVQNAGFSAPTPIQAQSWPIALQSKDIVAIAKTGSGKTLGYLLPAFITSSALIITPKWGPTILVLHQQGELATQIQDEAVKFSKTSRIACTCLYGGAPKGPQLRDIDRGADIVVATPGRLNDILEMRRISLHQVSYLVLDEADRMLDMGFEPQIRKIVNGVPARRQTLMFTATWPKEVRKIAADLLVNPVQVNIGNVDELVANKSITQHIEVLAHMEKQRRLESILQSQDQGSKIIIFCSTKKMCDQLARNLTRQFGAAAIRGDKSQADRDHVLNQFRSGRTPVLVATDVAARGLDVKDIRVVVNYTFPTGVEDYLHRIGRTGRAGATGIAYTFFGDQDAKHASDLIKILEGANQKVPPELRELSSRGGGGFGRSRRYGSGGRGDSGFGAKSYDSGSGYGGRGNDSGYGGRGSDSSYGRKGGYGSSAAFGRGGGRGFDYDSQRNERDRSPDRGSSWSDRFKTRERSRSPVKAAPSQYNAPVSFHQAMMERNGGGSDRNKSFNRERSRSHSPYRHDKGKRSPSPLAVVGPTVVQVLEETVVLILTMENWRKG

SEQ ID NO: 3494 - DNA, 1824 bp, Nicotiana sylvestris
  CDS (1)..(1824)
atggccgttgtaactgcatcttccgctggtccaagttatgcgccagaagaccctaccctccccaaaccatggaaaggcctagttgatggtaccactggattcatctacttctggaatccagagaccaacgatacccaatatgagaggcctgttccctcttcccatgcagtgtctgctccagcacataagtcatctgtatttgtaagttcatctgttgaaaagccttctcaaggtcaacgctatgatgcagacggtggacacaacagaggtagcaataacaagattgcaagaagcagttctgatcgttttcatgatggaacatctgtccatgaaggctatggttctctaggtgtaggaagtgacatatctcaagaatcctactgccgccgcaatgaaatctctgttacgggaggtgatgttcctgcacctttgacatcatttgaagcgactgggtttccttcagagattgtgagggagatgcatcaagctgggttttcggctcctactccaatacaggcacaatcctggcccattgcccttcagggccgtgatatagtggctattgcgaagactgggtctggcaaaactctgggttacttgatgcctgcctttattcatctacaacagcgtcgcaagaatcctcaattaggcccaactattttggtactatcaccaacaagagaattagccacacagatacaagctgaagcagtgaagtttgggaaatcgtcaaggatatcttgcacgtgtctgtatggaggtgcaccaaaaggtcctcaactacgggagcttagtaggggtgtagatattgttgtcgccactcctggtcgtttgaacgacatcttggagatgagaagagttagccttggtcaagtttcttacttggtgttagatgaagcggatcgtatgttggacatgggatttgaacctcagataaggaagattgtgaaggaggtgcctgtgcagaggcaaacattgatgtatacagctacatggccgaagggggttcgtaagattgctgctgatctattggttaattcagttcaagttaatattggaaatgttgacgagcttgttgcaaacaagtctatcacgcagcacattgaagtcgtgctgccgatggagaaacaacggcgagtagaacaaatcttgagatccaaagaaccagggtcaaaaatcattattttctgttcaacaaagaaaatgtgcgaccaactatctcgcaatcttactcgcaattttggagcagctgcaattcatggggataaatctcagggtgagagggattatgtattaagccagtttcgtgcaggcaggtctcctgtgcttgtggctactgatgttgctgcccggggtttggacatcaaagatatcagggtggtgataaactatgacttcccaactggaatagaagattatgttcacagaattggtagaacaggccgggcaggagcatctggtctggcctacacatttttctccgaccaggattctaagcatgctttagatcttgttaaagttttagaaggtgcaaatcaatgtgtgccaactgagctacgtgatatggcttctcgcggtggtggtatgggaagggctaggaatcactggggttctggcccaggtggacgtggaggacgtggtggaccctataattccagctatgttggacggaatggaggacatggttatgaccggggatcacgtgacagtgacagatatggtcatggtacctacaatgcggatgctccacggaagcgcagtcgtagcagaagccccaatataggttcaggatggagtggtaaaaagagccgatttactgattga

SEQ ID NO: 3495 - protein, 607 aa, Nicotiana sylvestris
MAVVTASSAGPSYAPEDPTLPKPWKGLVDGTTGFIYFWNPETNDTQYERPVPSSHAVSAPAHKSSVFVSSSVEKPSQGQRYDADGGHNRGSNNKIARSSSDRFHDGTSVHEGYGSLGVGSDISQESYCRRNEISVTGGDVPAPLTSFEATGFPSEIVREMHQAGFSAPTPIQAQSWPIALQGRDIVAIAKTGSGKTLGYLMPAFIHLQQRRKNPQLGPTILVLSPTRELATQIQAEAVKFGKSSRISCTCLYGGAPKGPQLRELSRGVDIVVATPGRLNDILEMRRVSLGQVSYLVLDEADRMLDMGFEPQIRKIVKEVPVQRQTLMYTATWPKGVRKIAADLLVNSVQVNIGNVDELVANKSITQHIEVVLPMEKQRRVEQILRSKEPGSKIIIFCSTKKMCDQLSRNLTRNFGAAAIHGDKSQGERDYVLSQFRAGRSPVLVATDVAARGLDIKDIRVVINYDFPTGIEDYVHRIGRTGRAGASGLAYTFFSDQDSKHALDLVKVLEGANQCVPTELRDMASRGGGMGRARNHWGSGPGGRGGRGGPYNSSYVGRNGGHGYDRGSRDSDRYGHGTYNADAPRKRSRSRSPNIGSGWSGKKSRFTD

SEQ ID NO: 3496 - DNA, 1815 bp, Candida glabrata
  CDS (1)..(1815)
atgagtgatgggtcaggtagatacgtgcccccacatattagacggggaggtggtaattcgcatgaaagtgctgctgcagatggtttaagcggctctaggtatagtggcaacggatttttctccagtcccaatagaggtaatcataagtcttcaggcgggttttttggatctaggccgttcaacgatagaaggactggtcaaggaagtagggcaagtggctctggtgggttcggtggctctggtggtagatacggatgggtaaacggtaaacatgtaccatacccgaaaaatccaaggttagagatggagttgtttggtaatgcaacggatcacgtaacttctggtataaactttgataactacgatgatatacccgtagaggccagtggtgacaatgttcctgaagcaataacagagttcaagtcaccaccactagatgaactattgcttgaaaatgtcgaactggccaatttctcaaagcctactccggtacagaaatactcgatcccaattgtcaccaagaacagagatctaatggcttgtgcacaaactggatctggtaagacaggtgggtttctgttcccagttttgtcagagttgtttttaaatgggccagcgccgctcccagagcacactagacactcttatatgaggaaatgctatcccagcgcgcttgtgcttgcaccaacaagagaactggcaatacaaatatttgacgaggccaagaaatatacttatagatcgtgggtaaagccctacgtagtatacggtggagctccaatcggtcaacagatgagagacatggaccgcgggtgtaacctactggtagccacacccggtaggttgaatgacttgttggaaagaggtaaaatttctcttgttaatgttaagtatctagtactcgatgaagctgataggatgttagatatggggtttgagcctcaaattaggcatattgtagaggattgcgatatgcctagtgttaatgacagacagacgttaatgttctctgctacatttccgagagaaatacagcaccttgctagagattttttgaaagactacatatttctatcagtcggtagggttggctctacctcggaaaacattcaacagaaggtgctatttgttgaagattacgataagaattctgcacttctggatatattaattaatgaaattgatggattgactctggtttttgtggaaacaaaaagaatggcagatcaattgacggattttctgatagttcagaattttaaagcaacagcaattcacggtgacagaacacaagctgagcgtgaaagagccctacatgcatttagaaacggtatagctaatatacttgttgcaactgcagtggcagctagaggcttggatataccaaatgttactaatgtgataaattatgacttaccaacggatattgatgactatgttcacagaattggtagaactggacgtgctggtaacgtcggtgtcgctacatcctttttcaactcaaatagcatgaatattgccaaggaacttatggatttgttgacagaagccaatcaggaggtccctcagtttttggtcaatatggttcaagatagcatgagatttggtagaggtggacgtaattctagaactggaagtaatagaggaagaggctccaatacaagagattatagacactctaataaagatgactggggtagtctagggtcgtcaagaaggggttttagaagtaatgacaatcgtggttttggtaataactggggatcgtcttctggtgatggttttactaacaaagctgcaaactcgtggtggtaa

SEQ ID NO: 3497 - protein, 604 aa, Candida glabrata
MSDGSGRYVPPHIRRGGGNSHESAAADGLSGSRYSGNGFFSSPNRGNHKSSGGFFGSRPFNDRRTGQGSRASGSGGFGGSGGRYGWVNGKHVPYPKNPRLEMELFGNATDHVTSGINFDNYDDIPVEASGDNVPEAITEFKSPPLDELLLENVELANFSKPTPVQKYSIPIVTKNRDLMACAQTGSGKTGGFLFPVLSELFLNGPAPLPEHTRHSYMRKCYPSALVLAPTRELAIQIFDEAKKYTYRSWVKPYVVYGGAPIGQQMRDMDRGCNLLVATPGRLNDLLERGKISLVNVKYLVLDEADRMLDMGFEPQIRHIVEDCDMPSVNDRQTLMFSATFPREIQHLARDFLKDYIFLSVGRVGSTSENIQQKVLFVEDYDKNSALLDILINEIDGLTLVFVETKRMADQLTDFLIVQNFKATAIHGDRTQAERERALHAFRNGIANILVATAVAARGLDIPNVTNVINYDLPTDIDDYVHRIGRTGRAGNVGVATSFFNSNSMNIAKELMDLLTEANQEVPQFLVNMVQDSMRFGRGGRNSRTGSNRGRGSNTRDYRHSNKDDWGSLGSSRRGFRSNDNRGFGNNWGSSSGDGFTNKAANSWW

SEQ ID NO: 3498 - DNA, 1674 bp, Ashbya gossypii
  CDS (1)..(1674)
atgtcctacgccggtaacagagaccagcagtttaacagaagcaacttcggtggacgcgatggcgaccatcgcggacagcggccttcggatcggaattcgtacggaagggatggtttcgggcgcggcgggcgcggcggcttcgccgggcgtggccgtggccggtccgacgataggttggagttgacgaagcccgactgggatgttgaatcgttgccaaaatttgagaaaaacttctacgtggagcacgaggacgtgcaaaagatgagcacggacgaagtggagcagttccggaaggagaacgagatgaagattgttgggcacgatgttcccaagcccatccggactttcgacgaggcgggctttccggagtacgtgttgaaggaggtcaaggaagagggattcgagaagccaaccgcgattcagtgtcaaggctggccaatggccctatctgggcgcgacatgatcggtgtggctgcgacagggtctggtaagacgctttcgtactgtctaccgggcattgtgcacatcaacgcgcagccgctgctttctcctggtgacgggcctgttgttttggtcctagcacccacaagagagttggctgtgcagattcagaaggaatgctctaagtttggccgctcctcgcggattagaaacacttgtgtttacggtggtgttcctaagtcgcaacagattcgcgacttacagcgcggtgtggagatcttgatcgccaccccaggccgtttgatcgacatgttggagatcggcaagaccaacttaaagcgtgtgacctacttggtcttggacgaggctgatcggatgttggacatgggtttcgagccacaaattcggaagatcgttgaccagatccgtccggaccgtcagacacttatgtggtccgcgacctggcccaaggaggtccagcaactagccagggactacttgcatgaccctattcaggtgaacatcggctcgttggagttggcagcgtctcacacaattactcaacttggtgaggttgtctctgactttgacaagagagacagattggtgaagcacctggaaattggctccaaagacaaggactctaagattattattttgcattcgacgaaaagaacttgtgacgagattacgtcttacttaagacaggatggatggccagctcttgctatacatggtcccacccccctacaggatatagactgtactttgaacgattacagaaccggcagatctcctatcatggttgccactgatgtggttgccagaggtatcgacgttaagggtattaactttgtcatcaactatgacatgcccggtaatatcgaggattacgttcacagaattggtagaactggtagagctggtgcaactggtactgccatctcgtttttcaccgaagccaacaagaccctgggtgctcagttgatttctatcatgagagaagctaagcaggaaattccccaggatttgcttgtgtacgaccgcgccccacgtggtggattccacccaagatatggcggtcgcggcggtcgcggcggtcgtggcggtcgtggtggccgtgggtatggtggatacggcggtggatacggcggctacggtggtggctacggtggtggccacggcggctacggtggtaagccaaaggacagcggctggggcaacagaaactaa

SEQ ID NO: 3499 - protein, 557 aa, Ashbya gossypii
MSYAGNRDQQFNRSNFGGRDGDHRGQRPSDRNSYGRDGFGRGGRGGFAGRGRGRSDDRLELTKPDWDVESLPKFEKNFYVEHEDVQKMSTDEVEQFRKENEMKIVGHDVPKPIRTFDEAGFPEYVLKEVKEEGFEKPTAIQCQGWPMALSGRDMIGVAATGSGKTLSYCLPGIVHINAQPLLSPGDGPVVLVLAPTRELAVQIQKECSKFGRSSRIRNTCVYGGVPKSQQIRDLQRGVEILIATPGRLIDMLEIGKTNLKRVTYLVLDEADRMLDMGFEPQIRKIVDQIRPDRQTLMWSATWPKEVQQLARDYLHDPIQVNIGSLELAASHTITQLGEVVSDFDKRDRLVKHLEIGSKDKDSKIIILHSTKRTCDEITSYLRQDGWPALAIHGPTPLQDIDCTLNDYRTGRSPIMVATDVVARGIDVKGINFVINYDMPGNIEDYVHRIGRTGRAGATGTAISFFTEANKTLGAQLISIMREAKQEIPQDLLVYDRAPRGGFHPRYGGRGGRGGRGGRGGRGYGGYGGGYGGYGGGYGGGHGGYGGKPKDSGWGNRN

SEQ ID NO: 3500 - DNA, 1650 bp, Aspergillus clavatus
  CDS (1)..(1650)
atgtcttcctacggtggcggttatcagcgcgattcttatcgctctagaggcggtcagggtggttattccaacggcaacagctacggaaacggtggtggtggtggtggtggctatggcggtggtggctacggcggtggtggtttcggcggcggcggctatggtcgcggcggcggtgctgccggtggtgaccgcatgtctaacctcggtgctggcttgaagaagcaagaatgggacctggagacccttcctaagttcgagaagtccttctacaaggagcatcccgatgttaccgctcgctcccagcgtgaggtcgatgagttccgtcaggagcacaagatgactgtgcagggaaagaatgtcccccgccccgttgagactttcgatgaggctggtttcccccagtacgtcctgagcgaggtcaagtctcagggattcgagcgccctactgctatccagtctcagggttggcctatggctctttctggacgtgacgtcgttggtattgccgagaccggttccggaaagacccttacctactgtcttcccgctatcgtgcacatcaacgcccagcctcttcttgctcctggtgacggtcctattgttctcgttctcgcccctacccgtgaacttgctgttcagattcagaccgaaatcaccaagttcggaaagtcgtctcgtatccgtaacacctgtgtgtacggtggtgtccctaagggccctcagatccgtgatctgagccgtggtgtcgaagtctgcatcgcgacccccggtcgtctgattgacatgttggaagctggccggaccaatctccgccgtgtcacatatctcgttcttgacgaggctgaccgcatgttggacatgggttttgaacctcagatccgcaagatcatttctcagattcgccccgacagacagacttgcatgtggtccgccacctggcccaaggaagttcgtcagctcgccagcgactttctcaacgactacatccaggtgaacatcggttccatggacttgtctgctaaccacagaatcactcaaatcgtcgaagtcgtctctgacttcgagaagcgcgacaagatgatcaagcacctcgagaagatcatggaggaccgttccaacaaaattcttatcttcaccggtaccaagcgtatcgctgacgaaatcactcgcttccttcgccaggacggatggcctgcgctctctattcacggtgacaagcaacagcaggaaagagattgggtcttgaacgagtttaaggcgggcaagagcccaatcatggtggccaccgatgtggcttcccgtggtatcgatgttcgcgacattactcatgtgctgaactatgactaccccaacaactcggaggattatatccaccgtatcggtcgtaccggtcgtgctggtgccaagggaaccgccattaccttcttcaccactgacaactctaagcaggctcgtgacttggttactatcctcactgaggctaagcagcagattgacccccgtctcgctgagatggttcgctacggtggcggcggtggccatggccacggtggttatggtcgctggggtggccgtggcggtggccgtggccgcggtggtggctcgactgcctccaacgctgcccctctcggaaacaaccgtcgttggtaa

SEQ ID NO: 3501 - protein, 549 aa, Aspergillus clavatus
MSSYGGGYQRDSYRSRGGQGGYSNGNSYGNGGGGGGGYGGGGYGGGGFGGGGYGRGGGAAGGDRMSNLGAGLKKQEWDLETLPKFEKSFYKEHPDVTARSQREVDEFRQEHKMTVQGKNVPRPVETFDEAGFPQYVLSEVKSQGFERPTAIQSQGWPMALSGRDVVGIAETGSGKTLTYCLPAIVHINAQPLLAPGDGPIVLVLAPTRELAVQIQTEITKFGKSSRIRNTCVYGGVPKGPQIRDLSRGVEVCIATPGRLIDMLEAGRTNLRRVTYLVLDEADRMLDMGFEPQIRKIISQIRPDRQTCMWSATWPKEVRQLASDFLNDYIQVNIGSMDLSANHRITQIVEVVSDFEKRDKMIKHLEKIMEDRSNKILIFTGTKRIADEITRFLRQDGWPALSIHGDKQQQERDWVLNEFKAGKSPIMVATDVASRGIDVRDITHVLNYDYPNNSEDYIHRIGRTGRAGAKGTAITFFTTDNSKQARDLVTILTEAKQQIDPRLAEMVRYGGGGGHGHGGYGRWGGRGGGRGRGGGSTASNAAPLGNNRRW

SEQ ID NO: 3502 - DNA, 1698 bp, Aspergillus niger
  CDS (1)..(1698)
atgtcttcctacggcggcggcggcggctaccagcgcgactcctaccgctccagaaacggtggcggcggcggcggctacggtaacggtaacggttactccaacggcggaggctacggtggtggtggtggtggtggtggttacggcggtggtggctatggcggcggcggctacggcggcggcggctatggtggcagaggtggtggtgccggcggtgctggcggagaccgcatgtccaacctgggcgccggtctgaagaagcaggaatgggatcttgactccctgcccaagttcgagaagtccttctacaaggaacacgccgatgtcgccgagcgctctcagcgtgatgttgacgagttccgtaagaagcacgagatggctgttcagggaagaaacgtccctcgccctgtcgagaccttcgacgaggccggtttccctcaatacgttctcagcgaggtcaaggcccagggcttcgaccgccctaccgctattcagtctcagggttggcccatggccctctctggtcgcgacgttgtcggtatcgctgagacgggttccggaaagaccctgacctactgtcttcctgccattgttcacatcaacgcccagcccctcctcgcccccggtgacggccccattgtccttatcctcgcccccacccgtgaattggccgttcagattcaagccgaaatctccaagttcggaaagtcttcccgtatccgcaacacctgtgtctacggtggtgtccccaagggtcctcagatccgtgacctgagccgtggtgtggaagtctgcattgcgactcccggtcgtctgattgacatgctcgaggctggtcgcaccaaccttcgtcgtgtcacctacctcgttctggatgaggccgatcgcatgctggacatgggtttcgagccccagatccgcaagatcatctcccagattcgccctgaccgtcagacctgcatgtggtccgctacatggcccaaggaggtccgtcagcttgcgtctgacttcctcaacgactacatccaggttaacattggttccatggatctgtcggccaaccaccgtatcactcagatcgtcgaggtcgtctcggacttcgagaagcgcgacaagatgatcaagcacctcgagaagatcatggagaaccgtgccaacaagtgccttatcttcaccggcaccaagcgcatcgctgacgaaatcactcgcttcctccgccaggacggatggccggcactttctattcacggtgataagcaacagcaagaaagagattgggtcttgaacgagttcaagacgggcaagagcccaatcatggtggctactgatgtggcttcccgtggtatcgatgtgcgcgacatcacacacgttctcaactatgactaccccaacaactcggaggactacgttcaccgtattggtagaactggtcgtgccggtgctaagggtaccgccatcaccttctttaccactgacaactccaagcaggctcgtgacttggtcaccattctcactgaggccaagcagcagattgacccccgtctcgccgagatggtccgctacagtggcggcggtggtcatggccacggtggctatggccgctggggtggccgtggtggtggccgtggtggtggccgtggccgcggcaaccacttcactgcttccaatgctgctcctcttggtggcaaccgtcgctggtaa

SEQ ID NO: 3503 - protein, 565 aa, Aspergillus niger
MSSYGGGGGYQRDSYRSRNGGGGGGYGNGNGYSNGGGYGGGGGGGGYGGGGYGGGGYGGGGYGGRGGGAGGAGGDRMSNLGAGLKKQEWDLDSLPKFEKSFYKEHADVAERSQRDVDEFRKKHEMAVQGRNVPRPVETFDEAGFPQYVLSEVKAQGFDRPTAIQSQGWPMALSGRDVVGIAETGSGKTLTYCLPAIVHINAQPLLAPGDGPIVLILAPTRELAVQIQAEISKFGKSSRIRNTCVYGGVPKGPQIRDLSRGVEVCIATPGRLIDMLEAGRTNLRRVTYLVLDEADRMLDMGFEPQIRKIISQIRPDRQTCMWSATWPKEVRQLASDFLNDYIQVNIGSMDLSANHRITQIVEVVSDFEKRDKMIKHLEKIMENRANKCLIFTGTKRIADEITRFLRQDGWPALSIHGDKQQQERDWVLNEFKTGKSPIMVATDVASRGIDVRDITHVLNYDYPNNSEDYVHRIGRTGRAGAKGTAITFFTTDNSKQARDLVTILTEAKQQIDPRLAEMVRYSGGGGHGHGGYGRWGGRGGGRGGGRGRGNHFTASNAAPLGGNRRW

SEQ ID NO: 3504 - DNA, 1665 bp, Aspergillus oryzae
  CDS (1)..(1665)
atgtcttacaacggtggctatcagcgcgaccagcgcgactcctaccgaaacggtggtggtggtggatactcgaatggctactccaacggcaacagcaacggctactctggtggtggtagtggtggtggctatggaggtggctacggcggtggtggctacggcggcggctatggcggtagaggtggtggcgccggtggtggtgaccggatgtccaacctcggcgctggcttgaagaagcaagaatgggatctggattctctacccaaatttgagaagtctttctacaaggagcaccccgatgtcgccaaccggtctcagcgcgatgttgatgagttccgtaagaagtttgagatgtctgtgcaaggaaaaaacattcctcgccccgtcgagaccttcgacgaggctggcttcccccaatacgtgctgagcgaggttaaggctcagggtttcgaacgccctaccgctattcagtctcagggatggcccatggctctctctggtcgtgatgtcgttggtattgccgagaccggttccggaaagaccctgtcctactgtcttcctgctattgtccacatcaacgctcagccccttcttgctcctggtgacggccctatcgttctcgtcctcgcccctacccgtgaattggcagtccagatccaggccgaaatcactaagttcggaaagtcgtctcgcattcgcaacacttgtgtgtatggtggtgtccccaagggtccccagatccgtgacttgagccgcggcgtcgaggtctgcattgctactcccggtcgtctcattgatatgctcgaggctggccgcactaacctccgccgtgtcacttaccttgttcttgacgaggccgaccgcatgctggacatgggtttcgagccacagatccgcaagattatctcccagattcgccctgaccgtcagacttgcatgtggtccgccacgtggcccaaggaagtccgtcagcttgcttcggatttcctcaatgattacatccaagtcaacatcggttccatggacctgtccgctaaccaccgtatcacgcaaatcgtcgaggtcgtgtcagactttgaaaagcgcgataagatgatcaagcaccttgagaagattatggagaaccgcggcaacaagtgtctcattttcactggtactaagcgtatcgccgacgaaatcactcgcttcctccgtcaggacggatggccagcactttctattcacggtgacaagcaacaacaagaaagagattgggtcttgaacgagttcaagacgggcaagagcccaatcatggtggctactgatgtggcttcccgtggtatcgatgttcgcgacattactcatgtgctgaactatgactaccccaacaactcggaagactatgttcaccgtatcggtcgaactggtcgtgccggtgccaagggtaccgccatcactttctttaccactgacaactctaagcaggctcgtgacttggtcactatccttactgaggctaagcagcagattgacccccgtctcgccgagatggttcgctacagcggtggtggcggcggtggccgtggcggctatggtcgctggggtggccgtggtggtggtcgtggccgcggcggcaactacactgcttccaatgccgctccccttggaggcaaccgccgttggtaa

SEQ ID NO: 3505 - protein, 554 aa, Aspergillus oryzae
MSYNGGYQRDQRDSYRNGGGGGYSNGYSNGNSNGYSGGGSGGGYGGGYGGGGYGGGYGGRGGGAGGGDRMSNLGAGLKKQEWDLDSLPKFEKSFYKEHPDVANRSQRDVDEFRKKFEMSVQGKNIPRPVETFDEAGFPQYVLSEVKAQGFERPTAIQSQGWPMALSGRDVVGIAETGSGKTLSYCLPAIVHINAQPLLAPGDGPIVLVLAPTRELAVQIQAEITKFGKSSRIRNTCVYGGVPKGPQIRDLSRGVEVCIATPGRLIDMLEAGRTNLRRVTYLVLDEADRMLDMGFEPQIRKIISQIRPDRQTCMWSATWPKEVRQLASDFLNDYIQVNIGSMDLSANHRITQIVEVVSDFEKRDKMIKHLEKIMENRGNKCLIFTGTKRIADEITRFLRQDGWPALSIHGDKQQQERDWVLNEFKTGKSPIMVATDVASRGIDVRDITHVLNYDYPNNSEDYVHRIGRTGRAGAKGTAITFFTTDNSKQARDLVTILTEAKQQIDPRLAEMVRYSGGGGGGRGGYGRWGGRGGGRGRGGNYTASNAAPLGGNRRW

SEQ ID NO: 3506 - DNA, 1635 bp, Candida glabrata
  CDS (1)..(1635)
atgggttacagagacgctttatataacaaaactaactacaactctcgtggtggtgacttccgtggtggtagatcctccgatagaaatgactacaacagagacagaaaccaaggttactcccatggtggtctaagaggtcgtcacgatgatggtccaagagaattaatcaagccagattgggaatccgaacttcctaatctgcctccttttgaaaagaacttttacgttgagcatgaagttgttcgtaacagatctgatcaagaagttgctcaattcagaaaggaatctgaaatgaccattactggtcacgacattccaaagcctatcactacttttgatgaagctggtttcccagactacgttttaaaggaagttaaggctgaaggtttcgacaagccaactagtattcaatgtcaaggttggcctatggctctttctggtagagatatggttggtattgctgctactggttccggtaagactttgtcctactgtttaccaggtattgttcacatcaacgcacagccacttttgagtccaggtgatggtccaattgtcttggttctagctccaaccagagaacttgctgttcaaattcaaaaggaatgttccaagtttggtaagagttctagaattagaaacacatgtgtttacggtggtgttccaagaggtcaacaaatcagagagttgattagaggtgctgaaattgtcattgctaccccaggtagattgattgatatgcttgaagcaggtaagactaacttgaagagagttacttatctggttttggatgaagccgacagaatgttggatatgggttttgaacctcaaatcagaaagattgtagaccaaattagaccagacagacagactttgatgtggtcggctacctggcctaaggaagttcagcaattggctagggactatctaaatgatccaatccaggttcaaattggttctctagaattggctgcttctcacaacattacacaattggttgaagttgtttctgagtttgagaagagagacagattggttaaacatctagacactgcttctcaagacaaggaatccaagattttaatcttcgcttctaccaagagaacttgtgacgaaattacatcttacttgagacaagatggatggccagctcttgccattcatggtgacaaagatcaaagggaaagagactgggttctaaatgaatttagaactggtaactccccaatcatggttgcaacagatgttgctgccagaggtattgatgtcaagggtatcaacttcgttgttaactatgatatgccaggtaacattgaggattatgtgcacagaattggtagaactggtagagctggtgccactggtaccgctatttctttcttcaccgaagataacaaatctctaggtgccagtttgatctcgatcatgagagaagctaagcaaaacattcctgaagaactaatgaagtatgacagaagacctcgtggtcctcacccaagatacggtggtggttacggccgtggtggtcgtggttacggtggtggccgtggtggttacggtggccgtggtggtggtcgtggtggccgcggtggttttaacagatctagagacggtggttggggtaacagaagataa

SEQ ID NO: 3507 - protein, 544 aa, Candida glabrata
MGYRDALYNKTNYNSRGGDFRGGRSSDRNDYNRDRNQGYSHGGLRGRHDDGPRELIKPDWESELPNLPPFEKNFYVEHEVVRNRSDQEVAQFRKESEMTITGHDIPKPITTFDEAGFPDYVLKEVKAEGFDKPTSIQCQGWPMALSGRDMVGIAATGSGKTLSYCLPGIVHINAQPLLSPGDGPIVLVLAPTRELAVQIQKECSKFGKSSRIRNTCVYGGVPRGQQIRELIRGAEIVIATPGRLIDMLEAGKTNLKRVTYLVLDEADRMLDMGFEPQIRKIVDQIRPDRQTLMWSATWPKEVQQLARDYLNDPIQVQIGSLELAASHNITQLVEVVSEFEKRDRLVKHLDTASQDKESKILIFASTKRTCDEITSYLRQDGWPALAIHGDKDQRERDWVLNEFRTGNSPIMVATDVAARGIDVKGINFVVNYDMPGNIEDYVHRIGRTGRAGATGTAISFFTEDNKSLGASLISIMREAKQNIPEELMKYDRRPRGPHPRYGGGYGRGGRGYGGGRGGYGGRGGGRGGRGGFNRSRDGGWGNRR

SEQ ID NO: 3508 - DNA, 1689 bp, Chaetomium globosum
  CDS (1)..(1689)
atgtcttcttacggcggcggcggctacagctctcgtggtggaggcggcggatactctggcggctacgaccgtaacggcggcggcggtggtggttattccggctccaatggctattctggcggcggcggcggctacggcggtggaggctacggtggtggcggtggtggatatggcggtggaggtggtggatatggcggcggctacggcggtggcggtggtgatcgcatgtccaacctcggtgctggcctgcaaaagcagaactgggacttggacacgcttccgaagttcgagaaatcgttctaccaggagcaccccaacgttgccgcccggtcgcaggctgaagtcgacaagttccgtcgcgaccacgctatgaccgtcgctggcaacaatgtcccaagccccgtcgagacgttcgatgaggctggtttcccccgctatgtcatggacgaggtcaaggcccagggtttccccgcgccgaccgccattcagtcccagggatggcctatggcgctctccggacgcgacgtcgttggtatcgccgagaccggttctggcaagaccctgacttactgccttccggccatcgttcacatcaacgcccagcctctcctcgcccctggtgacggccctatcgttttggtccttgcccctacccgtgaactggctgtccagattcagcaagaaatcaccaagtttggcaagtcctcgagaattcgcaacacctgcgtctacggcggcgtcccgaagggccctcaaacccgggacctttctcgcggtgttgaggtgtgcattgccacgccgggccgtctgattgatatgctggagtcgggcaggactaacctccgtcgtgtcacttacctcgttctcgatgaggccgaccgcatgcttgacatgggttttgagccccaaattcgcaagatcattggacagattcggcccgaccgtcaaacctgcatgtggtccgctacttggcctaaggaagtccgcgctttggccagcgacttcctgactgatttcattcaggttaacattggctccatggacctggctgccaaccaccgcatcacccaagttgtggaggttgtgaatgagagcgagaagcgcgacaagatgatcaagcaccttgagaagatcatggaggacaaggagagccagaacaagatcctcatcttcacaggtaccaagcgtgtggctgatgagatcacccgcttccttcgccaggacggctggccggcactttcaatccacggagacaagcaacaaaacgagcgcgattgggtcttggatcagttcaaaactggaaagagccccatcatggttgccaccgacgttgcgtctcgcggtatcgatgtgcgcaacattacccatgtgctcaactatgactaccccaacaactcggaggattacatccatcgtattggtagaactggccgtgccggcgctaaaggcacagccattacgttcttcaccactgacaattcaaagcaggctcgcgacctcgtgggtgttctccaagaggccaagcagcatattgatcctcgtctcgccgaaatggttcggtacggcggtggtggtggcaacagccggtatggcggttatcgtggccgcggcggtggtggattccgtggcggacgttctcaaggcgctaatgggcctaacgccatgcccatgggcaaccgtcggtggtag

SEQ ID NO: 3509 - protein, 562 aa, Chaetomium globosum
MSSYGGGGYSSRGGGGGYSGGYDRNGGGGGGYSGSNGYSGGGGGYGGGGYGGGGGGYGGGGGGYGGGYGGGGGDRMSNLGAGLQKQNWDLDTLPKFEKSFYQEHPNVAARSQAEVDKFRRDHAMTVAGNNVPSPVETFDEAGFPRYVMDEVKAQGFPAPTAIQSQGWPMALSGRDVVGIAETGSGKTLTYCLPAIVHINAQPLLAPGDGPIVLVLAPTRELAVQIQQEITKFGKSSRIRNTCVYGGVPKGPQTRDLSRGVEVCIATPGRLIDMLESGRTNLRRVTYLVLDEADRMLDMGFEPQIRKIIGQIRPDRQTCMWSATWPKEVRALASDFLTDFIQVNIGSMDLAANHRITQVVEVVNESEKRDKMIKHLEKIMEDKESQNKILIFTGTKRVADEITRFLRQDGWPALSIHGDKQQNERDWVLDQFKTGKSPIMVATDVASRGIDVRNITHVLNYDYPNNSEDYIHRIGRTGRAGAKGTAITFFTTDNSKQARDLVGVLQEAKQHIDPRLAEMVRYGGGGGNSRYGGYRGRGGGGFRGGRSQGANGPNAMPMGNRRW

SEQ ID NO: 3510 - DNA, 1629 bp, Coccidioides immitis
  CDS (1)..(1629)
atgtcttacggaggaggttattcctcatctcgcgaccattacggtggcggccatcattctggtggaagaagcggtggctacggtggaagcaatggatattctcatggtaattcgaatggctatggatcctatggtggcaactcccacggtagtggtgtcggctcacatggaggcggccatcacggtgaccggatgtccaatctcggttctggtttgaagcaacaagaatgggatttgaacgccctgcctaagttcgagaagcacttctacaaggaacaccccaacgtgactaatcgctccgcacaagacgtggaagctttccgaaaagaacatgaaatgactgtctatggaaagaatgttcctcgccccgttgaaacatttgacgaagccggcttcccccaatatgtgatctctgaagttaaggctcagggattcgctaaacccacacccatccaatctcaaggttggcctatggccttgtctgggcgcgacgttgttggtattgcagaaaccgggtcgggaaaaactttgacatattgcttgcctgccatcgtccacatcaatgctcagcctctgctcggccctggcgatggaccaattgtacttgttctggcgccaactcgcgagttggccgttcaaatccaagccgaaattacaaagttcggaaagtcttcacgcattcgaaacacctgcgtctacggaggtgtcccaagaggacctcaaattcgcgatctttcccgcggtgtcgaagtctgtatcgccactcctggtcgtttgattgatatgcttgaagcgggaaagacaaaccttcgtcgggttacttacctcgttctcgatgaagcagatcgcatgcttgatatgggtttcgagccccaaattcggaagattatcgggcaaattcgtcctgatagacaaacttgcatgtggtcggctacctggccaaaggaagtccgacagcttgctcatgactttctccacgattatatccaagtatatattggatcccaagacctctcggctaaccataggatcacccaaatcgttgagattgtgtcggatttcgaaaagcgtgatcgcatgatcaaccatctcgaacgtatcatggatgacaagaagtccaagatcctcatcttcactggcacaaaacgtgtggcagatgatattacccgattcctccgtcaagatggatggccagctttgtctatccatggtgataagcaacagaatgagcgtgattgggttctaaatgaattcaaaactggcaaaagcccgatcatggtagccactgacgtggcttcgcgtggtattgatgtgcgcgacattactcatgtgttgaactatgactatccgaacaattcggaagattatgttcatcggattggtcgtactggccgtgccggtgctaagggaacggctattacgctgttcaccactgacaatgctaaacaggctcgtgatttggtcaatattctcaccgagtccaagcagcagattgatccacgccttgcagagatggcccgctttggcggcggcggtggaggcggcggccgctggggtggtcgcggccgtggccgtggaggttttaccgcctcaaatgctgcccctctcggccataatcgccgctggtag

SEQ ID NO: 3511 - protein, 542 aa, Coccidioides immitis
MSYGGGYSSSRDHYGGGHHSGGRSGGYGGSNGYSHGNSNGYGSYGGNSHGSGVGSHGGGHHGDRMSNLGSGLKQQEWDLNALPKFEKHFYKEHPNVTNRSAQDVEAFRKEHEMTVYGKNVPRPVETFDEAGFPQYVISEVKAQGFAKPTPIQSQGWPMALSGRDVVGIAETGSGKTLTYCLPAIVHINAQPLLGPGDGPIVLVLAPTRELAVQIQAEITKFGKSSRIRNTCVYGGVPRGPQIRDLSRGVEVCIATPGRLIDMLEAGKTNLRRVTYLVLDEADRMLDMGFEPQIRKIIGQIRPDRQTCMWSATWPKEVRQLAHDFLHDYIQVYIGSQDLSANHRITQIVEIVSDFEKRDRMINHLERIMDDKKSKILIFTGTKRVADDITRFLRQDGWPALSIHGDKQQNERDWVLNEFKTGKSPIMVATDVASRGIDVRDITHVLNYDYPNNSEDYVHRIGRTGRAGAKGTAITLFTTDNAKQARDLVNILTESKQQIDPRLAEMARFGGGGGGGGRWGGRGRGRGGFTASNAAPLGHNRRW

SEQ ID NO: 3512 - DNA, 1623 bp, Cryptococcus neoformans
  CDS (1)..(1623)
atgtcttacggtggcggctacggcggcggtggttacggtggtggctacggcggcggcggtggtggtggtggctacggtggtggcggcggcggctacggcggtggctacggtggtggtggttacggtggcggtttcggtggtgaccgaatgggcaaccttggtcagggcttgcacaacattgactggcaaaaccagtctctcgccaaatttgagaagaacttctacgtccaggacccccgagtcactgctcgttccgatgctgaggtcgaagccttccgtgccgagaaggaaatgaagatccaaggcaagaacgtgcctcgacccatcaccacctttgaggaggccggtttccccgactacatcatgtccgagatccgacgaatgggcttcactgctccttcttctatccagtgccaggcttggcctatggccttgtccggtcgtgaccttgtcgccattgccgagactggttctggtaagaccatctctttctgccttcctgcaatggtccacatcaacgcccagcccctccttgcccctggtgacggtcctattgttcttatccttgctcctacccgagagctcgctgttcagatccagaccgaagctaccaagtttggtcaatcttcccgaattaggaacactgccatttacggtggtgctcccaagggccctcaaatccgagacctccagcgaggtgtcgagatctgtgtcgccactcctggtcgattgatcgacatgctcgagactggcaagaccaacctcaagcgtgttacttatctcgttatggacgaagccgaccgaatgctcgacatgggtttcgagccccagatccgaaagattgtttctcagatccgacctgaccgacagactctcttgttctctgccacttggcccaaggaggtccaacgtctcgccatggacttcctccacgactttatccaggttaacattggttctcttgaccttactgccaaccacaacgttgcccagcacgtcgaagtctgcactgactttgacaagcgaagcaaacttctcagccacttggagaagatttctcaggagaacggcaaggttcttatcttcgttgctaccaagagggtcgccgatgacttgaccaagttcttgagaatggacggctggcctgcccttgctatccacggtgacaaacaacaagctgagcgtgactgggttcttgccgaattcaagtctggccgaagccccatcatgcttgccactgacgttgcttctcgaggtctcgatgtccgagacattggttacgttatcaactatgacttccccaacaattgtgaagattacattcaccgaatcggccgaactggtcgtgccggtcgaaagggtacttcttacacttacttcaccatggacaactccaaagctgctcgtgaactcgtccagattttgagagagtccaaggctgacatccctcccgagcttgaggagatggccatgtacggcggtcgaggtggcggtggtggtcgaggccgaggtggccgtggcggtggccgaggtggttacggtggtggtggtggccgaggcggctacagctctggcgccaactcttacggtggcggtggcggtggctactctagcaggtggtaa

SEQ ID NO: 3513 - protein, 540 aa, Cryptococcus neoformans
MSYGGGYGGGGYGGGYGGGGGGGGYGGGGGGYGGGYGGGGYGGGFGGDRMGNLGQGLHNIDWQNQSLAKFEKNFYVQDPRVTARSDAEVEAFRAEKEMKIQGKNVPRPITTFEEAGFPDYIMSEIRRMGFTAPSSIQCQAWPMALSGRDLVAIAETGSGKTISFCLPAMVHINAQPLLAPGDGPIVLILAPTRELAVQIQTEATKFGQSSRIRNTAIYGGAPKGPQIRDLQRGVEICVATPGRLIDMLETGKTNLKRVTYLVMDEADRMLDMGFEPQIRKIVSQIRPDRQTLLFSATWPKEVQRLAMDFLHDFIQVNIGSLDLTANHNVAQHVEVCTDFDKRSKLLSHLEKISQENGKVLIFVATKRVADDLTKFLRMDGWPALAIHGDKQQAERDWVLAEFKSGRSPIMLATDVASRGLDVRDIGYVINYDFPNNCEDYIHRIGRTGRAGRKGTSYTYFTMDNSKAARELVQILRESKADIPPELEEMAMYGGRGGGGGRGRGGRGGGRGGYGGGGGRGGYSSGANSYGGGGGGYSSRW

SEQ ID NO: 3514 - DNA, 1611 bp, Debaryomyces hansenii
  CDS (1)..(1611)
atgtcatacaacaacaacagtgatagctacggtggtggttacaattcatatggtggtaactcatatggtggtggtggttacggtggtggccgtggcggtggccgtggtggattcggtggccgtggtggtggccgttacgatgaaagagtagaattaaacacccctgagtgggatattgattcattgccaaaattcgaaaagaacttctataacgaacatccagatgtgactgctcgttccgttcaagatgtcaacgcctttagaaaggaacatgacatgaaatgtgatggtactgacattccaaagccaattactagctttgacgaagctggattcccagactacgttttaaaggaagttaagcaacaaggatttccaaagccaacctcgattcaatgtcaagggtggcctatggctttaagtggtagagatatggttggtattgcttctaccggttccggtaagactttatcgtactgtttaccatctattgttcacatcaacgcccaaccattgttgagtcctggtgatggtcctattgtattggttttggctccaaccagagaattggcggttcaaattcaacaagaatgttccaagtttggttcttcttctagaattagaaacacctgtgtctacggtggtgctccaaagggtcaacaaatcagagatttagccagaggtgttgaaatttgtattgctactcctggtagattgattgatatgttggaaactggcaagactaacttgagaagagtcacctacttagttttagatgaagctgatagaatgttagatatggggttcgaacctcaaatcagaaagattgtcgatcaaattagacctgatagacaaactttgatgtggtctgctacttggccaaaggaagttcaagccttaactagagattacttgaacgatccaattcaggtcaccgttggttcattagagttagctgcttcccacacaattactcaattagttgaagttgttactgaatttgaaaagcgtgacagattaatcaagcatttggaaacggctactgctgatccagaagctaagtgtttaattttcgcttctactaagagaacttgtgatgaaatcactaactacttaagagccgatggatggcctgcattagccattcatggtgacaaacaacaaggtgaaagagactgggtcttaaaggaattcaagaccggtaaatctccaattatggttgcaaccgatgttgcagcccgtggtattgatgtcaagggtatctcttacgtcattaacttagatatgcctggtaatatcgaggattacgtccatcgtattggtagaaccggtagagccggttctaccggtactgcggtttccttcttcaccgataacaactctaagttaggtggtgatttatgtaaaatcatgagagaagctaaccaaaccattcctcctgaattaatgagattcgatagaagaagtttcggtagtcacataagatacggtagaggtggtggccgtggtggtttcagaggtggccgtggtcgcggtggtttcagaggtggccgtggaggttaccaatctggttccaacagtgctccactcggtaacgcccgtcgttactaa

SEQ ID NO: 3515 - protein, 536 aa, Debaryomyces hansenii
MSYNNNSDSYGGGYNSYGGNSYGGGGYGGGRGGGRGGFGGRGGGRYDERVELNTPEWDIDSLPKFEKNFYNEHPDVTARSVQDVNAFRKEHDMKCDGTDIPKPITSFDEAGFPDYVLKEVKQQGFPKPTSIQCQGWPMALSGRDMVGIASTGSGKTLSYCLPSIVHINAQPLLSPGDGPIVLVLAPTRELAVQIQQECSKFGSSSRIRNTCVYGGAPKGQQIRDLARGVEICIATPGRLIDMLETGKTNLRRVTYLVLDEADRMLDMGFEPQIRKIVDQIRPDRQTLMWSATWPKEVQALTRDYLNDPIQVTVGSLELAASHTITQLVEVVTEFEKRDRLIKHLETATADPEAKCLIFASTKRTCDEITNYLRADGWPALAIHGDKQQGERDWVLKEFKTGKSPIMVATDVAARGIDVKGISYVINLDMPGNIEDYVHRIGRTGRAGSTGTAVSFFTDNNSKLGGDLCKIMREANQTIPPELMRFDRRSFGSHIRYGRGGGRGGFRGGRGRGGFRGGRGGYQSGSNSAPLGNARRY

SEQ ID NO: 3516 - DNA, 1692 bp, Emericella nidulans
  CDS (1)..(1692)
atgtcttcttacggcggcagcggtggctaccagcgcgattcctatcgctccggcggtggcggcggctactcaaacggttactctaatggccatggaggcggctatggaggtcgcggcggcggttacggtggtggtggtggtagtggctacggaggtggctacggcggtggtggttacggcggcggcggttacggacgcggcggtggtggtgccggtgccggtgccggcggtgaccgcatgggtaacttgggttccggtctgaagaagcaggactgggatctcgacacactccctaaattcgagaaatccttctacaaggagcaccccgatgtgactgcccggtcccagcgtgaagtcgatgaattccgcaagaagtgcgagatgactgttcagggacgggatgtccctcgtccagtcgagaccttcgatgaagccggtttcccccaatatgttctgagcgaagttaaggctcaggggtttgagaagcctacggctatccagtctcagggttggcctatggctctctccggtcgtgatgttgttggtattgccgaaaccggctccggaaagaccttgtcatactgtctccccgctattgttcacatcaacgctcagcctctcctagctcctggagatgggcctattgtccttattctcgctcctacccgtgaattggcggttcagatccaggctgaaatcagcaagttcggaaagtcgtctcgcatcaggaacacttgtgtgtacggtggtgtccccaagggtcctcagattcgcgatctttcccgcggtgttgaggtctgcattgccactcccggtcgactcattgatatgctcgaagctggccgcaccaaccttcgccgagttacttacctcgttcttgacgaggccgaccgcatgttggatatgggttttgagccccaaattcgcaagatcatttctcagattcgccctgaccgccagacatgcatgtggtcagctacctggcccaaggaggtccgtcagctcgccagcgatttcctcaacaactacattcaagtcaacattggttcgatggacttatccgccaaccaccggatcactcagattgtagaagttatctcagaatttgagaagcgtgatcgcatgatcaagcatcttgagaagatcatggagaaccgcggcaacaagtgtctcgttttcactggtactaagcgcattgccgacgagattacacgtttcctccgtcaggacggatggccagcactttccattcacggtgacaagcaacaacaagaaagagattgggttctgaatgagttcaagacaggcaagagcccaatcatggtggccactgacgtggcttcccgtggtatcgatgttcgtgacattactcatgtcatcaattatgattaccccaataactcagaagactatgttcaccgtattggtcgaactggtcgtgcgggtgctaagggtaccgccattacctttttcaccactgacaatgctaagcaggctcgtgacttggtcactatcctctctgaggccaagcagcagattgacccccgtctcgctgagatggtccgctacagcggtggcggcggccacggtggtggttatggccgttggggtggtcgtggcggcggtcgtggtcgcggtggtaacttcactgcctccaacgcagcgcctcttggtaacaaccgtcgctggtag

SEQ ID NO: 3517 - protein, 563 aa, Emericella nidulans
MSSYGGSGGYQRDSYRSGGGGGYSNGYSNGHGGGYGGRGGGYGGGGGSGYGGGYGGGGYGGGGYGRGGGGAGAGAGGDRMGNLGSGLKKQDWDLDTLPKFEKSFYKEHPDVTARSQREVDEFRKKCEMTVQGRDVPRPVETFDEAGFPQYVLSEVKAQGFEKPTAIQSQGWPMALSGRDVVGIAETGSGKTLSYCLPAIVHINAQPLLAPGDGPIVLILAPTRELAVQIQAEISKFGKSSRIRNTCVYGGVPKGPQIRDLSRGVEVCIATPGRLIDMLEAGRTNLRRVTYLVLDEADRMLDMGFEPQIRKIISQIRPDRQTCMWSATWPKEVRQLASDFLNNYIQVNIGSMDLSANHRITQIVEVISEFEKRDRMIKHLEKIMENRGNKCLVFTGTKRIADEITRFLRQDGWPALSIHGDKQQQERDWVLNEFKTGKSPIMVATDVASRGIDVRDITHVINYDYPNNSEDYVHRIGRTGRAGAKGTAITFFTTDNAKQARDLVTILSEAKQQIDPRLAEMVRYSGGGGHGGGYGRWGGRGGGRGRGGNFTASNAAPLGNNRRW

SEQ ID NO: 3518 - DNA, 1668 bp, Gibberella zeae
  CDS (1)..(1668)
atgtctggctacgacggcggatacagcggcggtggtggtcgcggaggcggcggctacggtggtggtggttacggccgtgatcgtggtggtgaccgtggtggtgaccgcaacggtggtggtttcggaggcaacggaaatggctacggaggtggtggctacggcggcggtggtggtggttacggaggtggcggtttcggaggaggtgctggcggcgaccgtatgggcgctctcggctctggcctcaagaaccaagaatgggatatcaacagccttcccaagttcgagaagtctttctacaaggagcaccccgacgttgaaacccgatctgatgccgatgttgaggctttccgccgcaagcaccagatgaccattgctggctcgaacgttcccaagcctgtcgagaccttcgacgaggctggcttcccccgatatgttatggatgaggtcaaggctcagggtttccctgctcccaccgccatccagtctcaaggttggcccatggctctctccggtcgcgatgtcgttggtattgccgagactggttccggaaagaccctcacctactgccttccctccatcgttcacatcaacgcccagcctctcctcgcccccggtgacggccccattgttcttgtcctcgctcctactcgtgagcttgctgtccagatccaagaagagatgaagaagttcggtcgatcttctcgcatccgaaacacctgtgtctacggtggtgtccccaagggtcctcaaattcgcgacctctctcgcggagtcgaggtgtgcattgccactcccggtcgtctcattgacatgctcgaggccggtaagaccaacttgcgtcgtgttacctatctcgtcctcgacgaggctgatcgcatgcttgacatgggtttcgagccccagatccgcaagatcattggtcagatccgacctgatcgacaaaccctcatgtggtccgctacctggcctaaggaagtccgtgctctcgcttccgacttcctccaggacttcatccaagtcaacattggttccatggagcttgctgccaaccaccgaattacacaaatcgttgaggttgttaccgagatggagaagcgtgaccgcatgattaagcacatggagaaggtcatggagaacaaggagaacaagatcctcattttcgttggcacaaagcgagttgctgacgagatcacccgattccttcgccaggacggatggcctgcgctttccattcacggtgacaagcagcagaacgagcgtgattgggtccttgaccagttcaagaccggaaagtcccccatcatggtggctaccgatgtggcctcgcgtggtattgatgtgcgcaacatcacccatgtgttgaactacgattatcccaacaactctgaggactacattcaccgaatcggtcgtaccggtcgtgctggtgccatgggtaccgccattaccctcttcactactgataaccagaagcaggctcgtgaccttgtcaatgtcctccaggaggccaagcagcagatcgacccccgtctcgttgagatgacccgatatggtggcggcggcggtcgcggctacggtggatggggccgcggccgaggcggtggcagaggtgggttccccaacgcccacaatgccaacaacatgcccatcggtaaccgtcgttggtaa

SEQ ID NO: 3519 - protein, 555 aa, Gibberella zeae
MSGYDGGYSGGGGRGGGGYGGGGYGRDRGGDRGGDRNGGGFGGNGNGYGGGGYGGGGGGYGGGGFGGGAGGDRMGALGSGLKNQEWDINSLPKFEKSFYKEHPDVETRSDADVEAFRRKHQMTIAGSNVPKPVETFDEAGFPRYVMDEVKAQGFPAPTAIQSQGWPMALSGRDVVGIAETGSGKTLTYCLPSIVHINAQPLLAPGDGPIVLVLAPTRELAVQIQEEMKKFGRSSRIRNTCVYGGVPKGPQIRDLSRGVEVCIATPGRLIDMLEAGKTNLRRVTYLVLDEADRMLDMGFEPQIRKIIGQIRPDRQTLMWSATWPKEVRALASDFLQDFIQVNIGSMELAANHRITQIVEVVTEMEKRDRMIKHMEKVMENKENKILIFVGTKRVADEITRFLRQDGWPALSIHGDKQQNERDWVLDQFKTGKSPIMVATDVASRGIDVRNITHVLNYDYPNNSEDYIHRIGRTGRAGAMGTAITLFTTDNQKQARDLVNVLQEAKQQIDPRLVEMTRYGGGGGRGYGGWGRGRGGGRGGFPNAHNANNMPIGNRRW

SEQ ID NO: 3520 - DNA, 1665 bp, Kluyveromyces lactis
  CDS (1)..(1665)
atgagtttcggcggtggaagagatcatcaatttaacagaaacaacatgggcagcactcatggtgacttccgtggtagcagaggttctgacagaaacagctacaacagaggtaatgacttccgcggtggccgtagctttggtcgtggtccatctcgtgataccagagttgatttggtcgctccaaactgggacgaagaactaccaaatttgccagttttcgaaaagaatttttaccaagaacatccagatgttgctcaaatgagtgaaagtgaagttatcgaatttagaaaggaaaacgaaatgaccatttctggtcatgacgttccaaaacctatcagaagttttgatgaagctggtttcccatcttatgtcttggatgaagttaagcaagaaggtttcgccaaaccaactggtattcaatgccaaggttggcctatggctttgtctggtagagatatgattggtgtcgctgcgaccggttccggtaagaccttatcatactgtttaccaggtatcgttcatattaatgctcaacctttgctatctccaggtgatggtccaattgttttggtattggctccaaccagagaattagctgttcaaattcaaaaagaatgttccaaatttggtgcttcctctagaattagaaacacttgtgtctatggtggtgttccaaagtctcaacaaatcagagatttacagagaggtgtagaaatcctgattgctactccaggtagattgattgacatgttggaaattggtaagacaaacttgaaaagagtcacttaccttgtcttggatgaagctgatagaatgttggatatgggtttcgaacctcaaatcagaaaaattgtcgatcaaattagacctgatagacaaactttgatgtggtccgctacttggccaaaggaagttaaacaattggcaagtgactatttgcatgatccaattcaagttcaaattggttctttggaattgtctgcatcccacacaatcactcagatcgtcgaagtccttactgatttcgaaaagagagatagattggccaagcatttggaaaccgcttctcaagatcaagactccaagatcatcatttttgcttccactaagagaacttgtgatgagatcacttcttatttgagaactgaaggctggccagctttggccattcacggtgacaaggctcagaacgagcgtgattgggttttggctgagtttaggtccggtagatctcctatcatggtagcaactgatgttgctgctagaggtattgacgtcaagggtattaattacgttatcaattacgatatgccaggcaacatcgaagattatgtgcatagaattggtagaactggtagagccggttctactggtactgccatctccttcttcactgaaggcaataaatctctgggtgctgctttgatcaagattatgagagaagctaaacaagatattccagaagaactaagaagatacgacaggggtcaatacggccaacatccaagatatggtggcggccgtggtggtcgtggctttggtggtggccgtggtggccgtggctttggtggccgtggtgatggtggttacggtggtggtggttacggtggtggccgtggcggcttcggtggaaacagatccagagaccaaggctggagacgttag

SEQ ID NO: 3521 - protein, 554 aa, Kluyveromyces lactis
MSFGGGRDHQFNRNNMGSTHGDFRGSRGSDRNSYNRGNDFRGGRSFGRGPSRDTRVDLVAPNWDEELPNLPVFEKNFYQEHPDVAQMSESEVIEFRKENEMTISGHDVPKPIRSFDEAGFPSYVLDEVKQEGFAKPTGIQCQGWPMALSGRDMIGVAATGSGKTLSYCLPGIVHINAQPLLSPGDGPIVLVLAPTRELAVQIQKECSKFGASSRIRNTCVYGGVPKSQQIRDLQRGVEILIATPGRLIDMLEIGKTNLKRVTYLVLDEADRMLDMGFEPQIRKIVDQIRPDRQTLMWSATWPKEVKQLASDYLHDPIQVQIGSLELSASHTITQIVEVLTDFEKRDRLAKHLETASQDQDSKIIIFASTKRTCDEITSYLRTEGWPALAIHGDKAQNERDWVLAEFRSGRSPIMVATDVAARGIDVKGINYVINYDMPGNIEDYVHRIGRTGRAGSTGTAISFFTEGNKSLGAALIKIMREAKQDIPEELRRYDRGQYGQHPRYGGGRGGRGFGGGRGGRGFGGRGDGGYGGGGYGGGRGGFGGNRSRDQGWRR

SEQ ID NO: 3522 - DNA, 1647 bp, Magnaporthe grisea
  CDS (1)..(1647)
atgtcttacggcggtggtggctacggcggtcgcaacggcggcggttacggtggtggtcgcgatggtggttactcgaacggacacggctcccacggcggtggctacggcggcggtggcggcggtggctatggaggtggtggtggtggttacggcggcggcggcggcggcggcttcggaggtggtggtgaccgcatgtctaacctaggcgcaggccttcagaagcaggactgggatatcaacgccctccccaagttcgagaagcacttctacaaggagcaccccgatgtcaccaacaggtcgcaggccgaggttgacaagttccgtcgcgagcactctatggccgtgcagggtagcgatgtgcccaagcctgtcgagacgttcgacgaggctggcttcccgcgctacgtaatggacgaggtcaaggcgcagggcttccctgcacccactgccattcagtctcagggctggcccatggctttgagtggtcgtgatgtcgttggtatcgctgagacgggatcgggcaagactcttacgtattgtcttcccgccatcgtgcacatcaacgctcagccgctcttggcacccggtgacggacccatcgtcctgatccttgcccccactcgagagctcgctgttcagatccaggctgaaatcagcaagttcggaaagtcgtcgcgcattagaaacacgtgcgtctacggtggtgtgcccaagggcccccaaatccgtgacttgtctcgtggcgtcgaggtctgcattgcaacccccggtcgtctgattgacatgctcgagtctggcaagaccaacttgcgccgggtcacatacctcgtcctcgacgaggccgatcgcatgcttgacatgggtttcgagccccagatccgcaagatcattggccagatccgccccgatcgtcagactctgatgtggtcggctacctggcccaaggaggtccgcaacatggctgctgacttcctgcaagactttatccaggtcaacattggttccctggatctttcagcaaaccaccgtatcacacagattgtggaagttgtgtcagagtctgagaagcgtgaccgcatgatcaggcacatggagaaggttatggacggaaaggacagcaagaacaagattctcatcttcgttggcacaaagcgtgttgcagacgaaatcaccaggttcctgcgacaggatggctggcccgcgctttcgatccacggtgacaagcagcagaacgagcgtgactgggtcctcgaccagttcaagacgggcaagagccccatcatggttgccaccgacgttgcgtcgcgtggtattgacgtgcgcaacattactcatgtgctcaactatgactaccctaacaactcggaggactacatccaccgtatcggtcgtacaggccgtgctggtgcgaagggaaccgcaattaccttcttcaccactgagaactctaagcaggctcgtgatctacttggcgtcctgcaggaggccaagcaagagatcgaccctcgtcttgcagagatggccaggtacggcggcggcggtggcggcggtaggtacggcggataccgcggccgcggcggtcgccaccatggcggtggtggccgtggtgccaacgacctgcccatgggaggtaaccgacgctggtag

SEQ ID NO: 3523 - protein, 548 aa, Magnaporthe grisea
MSYGGGGYGGRNGGGYGGGRDGGYSNGHGSHGGGYGGGGGGGYGGGGGGYGGGGGGGFGGGGDRMSNLGAGLQKQDWDINALPKFEKHFYKEHPDVTNRSQAEVDKFRREHSMAVQGSDVPKPVETFDEAGFPRYVMDEVKAQGFPAPTAIQSQGWPMALSGRDVVGIAETGSGKTLTYCLPAIVHINAQPLLAPGDGPIVLILAPTRELAVQIQAEISKFGKSSRIRNTCVYGGVPKGPQIRDLSRGVEVCIATPGRLIDMLESGKTNLRRVTYLVLDEADRMLDMGFEPQIRKIIGQIRPDRQTLMWSATWPKEVRNMAADFLQDFIQVNIGSLDLSANHRITQIVEVVSESEKRDRMIRHMEKVMDGKDSKNKILIFVGTKRVADEITRFLRQDGWPALSIHGDKQQNERDWVLDQFKTGKSPIMVATDVASRGIDVRNITHVLNYDYPNNSEDYIHRIGRTGRAGAKGTAITFFTTENSKQARDLLGVLQEAKQEIDPRLAEMARYGGGGGGGRYGGYRGRGGRHHGGGGRGANDLPMGGNRRW

SEQ ID NO: 3524 - DNA, 1593 bp, Pichia stipitis
  CDS (1)..(1593): transl_table=12
atgaacaactacaacaacggtgactacaaaggtggcagagaacaacacttcggtggaaacaacaactacaaccgcggttatggtggaaacggtggattcggtggaaaccgttacaacgagagagttgaactcaccaccccagactgggacttggaatcgttgccaaagttcgaaaagaacttctacactgaacacccagatgttgctgcccgtagtgacaaagacattgctgccttcagaaacgaacaccagatgagctgtttgggctcagacattcctcatcccatcactactttcgatgaggctggattcccagaatacgtgttgaacgaagtcaaggcacagggtttcccttctccaactgccattcaatgtcagggttggcccatggctctttctggtagagacatggtgggtattgctgctactggttcgggtaagaccttatcgtactgtttgcctgctattgtccacatcaacgctcagcccttgttgagccctggtgatggtcctgttgtgttggttttggctcctaccagagaattggctgttcagattcagcaagaatgctccaagttcggatcttcttccagaatcagaaacacctgtgtctatggtggtgcaccaaagggtcaacagatcagagacttggccagaggtgttgaaattgtcattgccactccaggtagattgatcgatatgttggaaatgggtaagaccaacttgaagagagtaacctatttggttttggatgaagccgacagaatgttggatatgggtttcgaacctcaaatcagaaagattgtcgaccagatcagaccagaccgtcaaaccttgatgtggtccgccacttggccaaaggaagttcaaaacttggctagagactacttgcaagaccctatccaagtcagaattggttccttagaattggctgcctctcatactatcacccaagttgttgaagttatttcggaatacgaaaagcgtgacagattggtaaagcacttggaaaccgctaccaccgagaaggagtccaaggtgttgatcttcgcctccaccaagaagacttgtgatgaagtcacttcgtacttgagagctgacggatggcccgcattggctatccacggtgacaagcaacagagtgaaagagactgggtcttgagagaattcaagaccggtaaatcccctatcatggtggctactgatgttgctgccagaggtattgatgtcaagggtatcaatttcgttatcaacttcgacatgccaggtaacattgaagattacgtccacagaatcggtagaaccggaagaggtggtgccactggtactgctgtttctttcttcaccgatggtaacaacaagcttggtggtgatttgtgcaaaatcatgagagaagctaagcaaaccattcctccagaattacagagattcgacagaaagagtttcggtgcccacattagatacggtggtggacgtggtggtcgtggtggctacggccgtggacgtggtggttacggtggacgtggtggttatggtcaaagaaactaccaaactggatccaaccaggctcctttgtccaaccgtcgtttttaa

SEQ ID NO: 3525 - protein, 530 aa, Pichia stipitis
MNNYNNGDYKGGREQHFGGNNNYNRGYGGNGGFGGNRYNERVELTTPDWDLESLPKFEKNFYTEHPDVAARSDKDIAAFRNEHQMSCLGSDIPHPITTFDEAGFPEYVLNEVKAQGFPSPTAIQCQGWPMALSGRDMVGIAATGSGKTLSYCLPAIVHINAQPLLSPGDGPVVLVLAPTRELAVQIQQECSKFGSSSRIRNTCVYGGAPKGQQIRDLARGVEIVIATPGRLIDMLEMGKTNLKRVTYLVLDEADRMLDMGFEPQIRKIVDQIRPDRQTLMWSATWPKEVQNLARDYLQDPIQVRIGSLELAASHTITQVVEVISEYEKRDRLVKHLETATTEKESKVLIFASTKKTCDEVTSYLRADGWPALAIHGDKQQSERDWVLREFKTGKSPIMVATDVAARGIDVKGINFVINFDMPGNIEDYVHRIGRTGRGGATGTAVSFFTDGNNKLGGDLCKIMREAKQTIPPELQRFDRKSFGAHIRYGGGRGGRGGYGRGRGGYGGRGGYGQRNYQTGSNQAPLSNRRF

SEQ ID NO: 3526 - DNA, 1653 bp, Schizosaccharomyces pombe
  CDS (1)..(1653)
atgtcttacagagataacgaatatagtggaaattacaatggaaaagaggatggctataacagcagaggtcgttatggtggcggataccgcaataactatagtcgtggcggcggtcgtggaggtttcaatgatggcgcttcttatggctacgatcaacgaggacaaggaagaaatttttacgagtcagatggtcccggtgctaatttggtaaagaaggattggaaaaatgaaactttgattccgtttcaaaaagatttttataaagaacatgaaaatgttcgcaatcgttcagacgctgaagtcaccgaataccgtaaagaaaaagaaattgtcgtgcatggattaaatgttcctaaacctgttacgacatttgaagaggctggttttcctaactatgtactaaaggaagtcaaacaattggggttcgaagctcctactcctatccaacaacaagcatggccgatggctatgtctggtagagatatggtaggcatttcagctacgggttctggtaagacactttcttattgtcttcctgctatcgtacatattaatgcccaaccactactttctccaggcgatggtccaattgtactcgttcttgctccaacgcgtgaattagctgtccaaattcagcaagaatgtactaaatttggcaaatcatcccgaattcgcaacacatgtgtgtatggtggtgtccctcgtggtccacaaattcgtgacctaattcgcggtgtcgaaatttgcattgcaacacctggtcgtttattggatatgttagactctaacaaaaccaacttacgtcgtgtgacctatttagtgctggatgaagccgaccgaatgcttgatatgggttttgaacctcaaattagaaagattgttgatcaaattcgaccagaccgtcaaactgtcatgttttctgcaacatggccaaaagaagttcaacgtcttgctcgtgactatttgaatgactacattcaagtaactgtcggctctttggatttggcagcttctcataacattaagcaaatcgtagaagttgttgacaatgctgataaaagagctcgtcttggaaaggatatcgaagaggttttgaaggatagggataacaaagttcttatttttacaggcacaaaacgtgttgctgatgacattactcgcttccttaggcaagatggttggcctgcccttgccattcatggtgataaagctcaagacgagcgtgactgggtactcaatgagttccgtactggcaagtctccgattatggttgctactgatgttgcttctagaggaatagatgttaagggtattacacatgtctttaactatgatttccctggaaatacggaagactacgttcatagaattggacgtactggtcgtgctggagctaaaggtaccgcatatacctatttcacttcggataatgctaagcaagctcgtgaacttgtttccattctctctgaagccaagcaggacattgatcctaagcttgaggaaatggcccgctattcaagcggtggtcgtggtggtaactaccgccgtggcggctatggtcgtggtggtttccgtcgtggaggaggttatggaaaccgtaataggggttttaccggaagtaattctgccccccttgcgcgttcacgttggtga

SEQ ID NO: 3527 - protein, 550 aa, Schizosaccharomyces pombe
MSYRDNEYSGNYNGKEDGYNSRGRYGGGYRNNYSRGGGRGGFNDGASYGYDQRGQGRNFYESDGPGANLVKKDWKNETLIPFQKDFYKEHENVRNRSDAEVTEYRKEKEIVVHGLNVPKPVTTFEEAGFPNYVLKEVKQLGFEAPTPIQQQAWPMAMSGRDMVGISATGSGKTLSYCLPAIVHINAQPLLSPGDGPIVLVLAPTRELAVQIQQECTKFGKSSRIRNTCVYGGVPRGPQIRDLIRGVEICIATPGRLLDMLDSNKTNLRRVTYLVLDEADRMLDMGFEPQIRKIVDQIRPDRQTVMFSATWPKEVQRLARDYLNDYIQVTVGSLDLAASHNIKQIVEVVDNADKRARLGKDIEEVLKDRDNKVLIFTGTKRVADDITRFLRQDGWPALAIHGDKAQDERDWVLNEFRTGKSPIMVATDVASRGIDVKGITHVFNYDFPGNTEDYVHRIGRTGRAGAKGTAYTYFTSDNAKQARELVSILSEAKQDIDPKLEEMARYSSGGRGGNYRRGGYGRGGFRRGGGYGNRNRGFTGSNSAPLARSRW

SEQ ID NO: 3528 - DNA, 1659 bp, Yarrowia lipolytica
  CDS (1)..(1659)
atgtcttacggtgacgattacaacaacaacgaccgaggctacggcggcggacgaggcttcggcggaggccgaggtggccgaggtggttcccgaggcggtcgaggcggcttcggtggcgatcgaggtttcggaggtgaccgaggcggctacggcggcggaggctaccaggacaacgactttggcaacctgcccaagcaggactgggaccttgagaagctccctcagtttgagaagaacttctacaaggaggaccctgctgtcactgagcgaaccgacgaggaggtcactgccttccgaaaggagaaccagatgaccctgcacggagacggtatccctaagcccgtgaccaactttgacgaggctggtttccccccttacgtcctcaaggaggtcaagcagcagggtttcgagaagcccactgccattcagtgccagggatggcccatggccctgaccggacgagatgtcattggtatcgcttccaccggttccggtaagactctgtcttactgcctgcccgccattgtccacatcaacgcccagcccatgctgtcccacggtgacggacccatcgtcctggtcctcgcccccacccgagagctggctgttcagattcagcaggagtgctccaagttcggcaagtcttccaagattcgaaacacctgtgtctacggaggtgttccccgaggccagcagattcgagaccttgcccgaggtgtggagattgtcattgccactcccggccgacttctcgatatgctcgagtccggaaagactaaccttcgacgagtgacctacctggttctcgatgaggccgaccgaatgctcgatatgggtttcgagcctcaaattcgaaagattgtcgaccagattcgacccgaccgacagaccctcatgtggtctgctacctggcccaaggaggtccagcgactggcccacgactacctcaaggaccagattcaggtcaacattggttctctggagttgtctgcctctcacaacatcacccaggttgtggaggtctgcaccgagtacgagaagcgagaccgacttgtcaagcacctcgagaccgtcatggagaacaaggagtccaagtgtctgattttcaccggcaccaagcgtgtcgctgacgacattaccaagttcctgcgacaggacggctggcctgctctcgccattcacggtgacaagcagcagcaggagcgagactgggttctcaacgagttccgacagggcaagagccccatcatggttgccaccgacgtggcttcccgtggtattgatgtcaagggtatcaacttcgttatcaactacgactacccctccaactccgaggactatgtccaccgaatcggtcgaactggtcgagccggcaccaagggtaccgcttacacctacttcaccgaggacaaccgaaagcaggcccgagaccttctcgtcatcctgcgagaggccaagcagcatatcgaccccaagctggaggagatgggcggtggccgaggtggccgaggaggctggggaggccgaggcggtcgaggcggccgtggcggccgtggtggttaccgacgaggtggctacggcggcggtggctatggtggaggacgaggttccgacatcaccggctccaactccgctcctctttccaactcccgatggtag

SEQ ID NO: 3529 - protein, 552 aa, Yarrowia lipolytica
MSYGDDYNNNDRGYGGGRGFGGGRGGRGGSRGGRGGFGGDRGFGGDRGGYGGGGYQDNDFGNLPKQDWDLEKLPQFEKNFYKEDPAVTERTDEEVTAFRKENQMTLHGDGIPKPVTNFDEAGFPPYVLKEVKQQGFEKPTAIQCQGWPMALTGRDVIGIASTGSGKTLSYCLPAIVHINAQPMLSHGDGPIVLVLAPTRELAVQIQQECSKFGKSSKIRNTCVYGGVPRGQQIRDLARGVEIVIATPGRLLDMLESGKTNLRRVTYLVLDEADRMLDMGFEPQIRKIVDQIRPDRQTLMWSATWPKEVQRLAHDYLKDQIQVNIGSLELSASHNITQVVEVCTEYEKRDRLVKHLETVMENKESKCLIFTGTKRVADDITKFLRQDGWPALAIHGDKQQQERDWVLNEFRQGKSPIMVATDVASRGIDVKGINFVINYDYPSNSEDYVHRIGRTGRAGTKGTAYTYFTEDNRKQARDLLVILREAKQHIDPKLEEMGGGRGGRGGWGGRGGRGGRGGRGGYRRGGYGGGGYGGGRGSDITGSNSAPLSNSRW

SEQ ID NO: 3530 - DNA, 1641 bp, Saccharomyces cerevisiae
  CDS (1)..(1641)
atgacttacggtggtagagatcagcaatataacaagactaactacaagtctagaggtggcgacttccgcggtggaagaaactctgatagaaactcttacaatgacagaccacaaggcggtaactaccgtggtggtttcggtggtcgttccaattacaaccaaccccaggaattgatcaaaccaaactgggatgaagaattacccaaattgccaactttcgaaaagaatttctatgttgaacacgaaagtgttcgcgacagatcggacagtgagattgctcagttcagaaaggaaaatgaaatgactatttccggacacgatattccaaagccaatcaccactttcgatgaagctggtttcccagactacgttttgaatgaagtgaaggctgaaggatttgacaaaccaactggcattcaatgtcagggttggccaatggctttatctggtagggacatggttggtattgctgccactggttccggtaagactttgtcttattgtttaccaggtattgttcatatcaacgctcaaccattattggctccaggcgatggaccaattgttttggttttggctccaactagagaattggctgttcaaattcaaacagaatgttccaagtttggtcatagttccagaatcagaaatacctgtgtctacggtggtgttccaaaaagtcaacaaatcagagatttatctcgtggctctgaaattgttattgctactccaggtcgactaattgatatgctagagattggtaagactaatttgaagagagtcacttacctggttcttgatgaagctgatagaatgttagatatgggttttgaacctcaaatcagaaagattgttgatcaaatcagacctgatagacaaaccttgatgtggtctgccacttggccaaaggaggtgaagcaactagccgctgattacttgaatgatccaattcaagttcaagttggttctctagaactatctgcctcccataatattactcagatcgtcgaagttgtttctgatttcgaaaagagagatcgtttgaacaagtacttagaaacagcctctcaagacaacgaatacaagacattaatctttgcttctacgaaaagaatgtgcgatgatatcaccaagtatctaagagaagatggatggcccgccttggctattcatggtgacaaagaccaaagagaacgtgactgggttctacaagagtttagaaacggtagatccccaattatggttgctactgatgtggccgccagaggtatcgatgtcaaaggtatcaattacgttatcaactacgatatgccaggtaacattgaagattatgttcacagaatcggtagaactggtagagcaggtgctactggtactgctatatctttcttcaccgaacaaaacaaaggtttaggtgctaaattaatctctatcatgagagaagctaatcaaaatattcctcccgaattattgaaatacgacaggagatcttatggtggcggtcacccaagatacggtggtggccgtggtggtcgtggcggctatggccgtagaggtggttacggtggtggccgtggtggttacggcggtaacaggcagagagatggtggctggggtaacagaggtcgttcaaactattga

SEQ ID NO: 3531 - protein, 546 aa, Saccharomyces cerevisiae
MTYGGRDQQYNKTNYKSRGGDFRGGRNSDRNSYNDRPQGGNYRGGFGGRSNYNQPQELIKPNWDEELPKLPTFEKNFYVEHESVRDRSDSEIAQFRKENEMTISGHDIPKPITTFDEAGFPDYVLNEVKAEGFDKPTGIQCQGWPMALSGRDMVGIAATGSGKTLSYCLPGIVHINAQPLLAPGDGPIVLVLAPTRELAVQIQTECSKFGHSSRIRNTCVYGGVPKSQQIRDLSRGSEIVIATPGRLIDMLEIGKTNLKRVTYLVLDEADRMLDMGFEPQIRKIVDQIRPDRQTLMWSATWPKEVKQLAADYLNDPIQVQVGSLELSASHNITQIVEVVSDFEKRDRLNKYLETASQDNEYKTLIFASTKRMCDDITKYLREDGWPALAIHGDKDQRERDWVLQEFRNGRSPIMVATDVAARGIDVKGINYVINYDMPGNIEDYVHRIGRTGRAGATGTAISFFTEQNKGLGAKLISIMREANQNIPPELLKYDRRSYGGGHPRYGGGRGGRGGYGRRGGYGGGRGGYGGNRQRDGGWGNRGRSNY

SEQ ID NO: 3532 - DNA, 2160 bp, Drosophila melanogaster
  CDS (1)..(2160)
atgcttaagcttgtgcaatacatagccccccgggtgggcggcgccacgccccgaccgactgcctgcggctggggcaacttgctattgatttccccgagaagtggcgcgagctccgagaaatgtataacgcaacgtcgccattttcttttctcctccgccagcagcagcggcactttcgcttcttcttcttcgctctgcaccgaacaacgacaacagttccacgggagtcgcaggaatcgtgagacaatactgttcccaagcacatatagtagtctccaagctcagtcgcagcgtgcgtttcgagacagctcgaaaccagattcagacgactacgtagattccatcccgaaagcagagcagcggacgaggacgaggaaatcgcttttcaacgatcccgacgaaagaactgaggaaatcaaaattgaaggagtaatggcaccacacgatcgcgactttggtcacagtggacgtggcggtcgcggaggcgatcgaggcggcgatgatcggcgaggaggcggcggcggaggcaatcgcttcggtggcggcggtggcggtggcgattaccacggcataaggaatggacgcgtcgagaagcgacgcgatgaccgcggaggcggcaaccgatttggaggtggtggtggattcggggatcgccgaggaggaggtggcggcggcagccaagacctccccatgcgtccggtcgacttctccaacctggctcccttcaagaagaacttttaccaggagcaccctaacgtagcaaaccgatcgccctacgaagttcagaggtatcgcgaagagcaggagatcaccgtgcgcggacaggtgccgaaccccatccaggacttctccgaggtccatctgcccgactacgtcatgaaggagatccgccgacagggctacaaggcccccaccgctatccaagcgcagggctggcctatcgccatgagtggctcgaacttcgtcggcattgccaagacgggatccggaaagaccctgggctacatcctgcccgctattgtccacatcaacaaccagcagccgctgcagaggggcgacggacctatcgccctcgtgctggcccccactcgggagctggcccaacagatccagcaggtggccaccgaattcggttcctcgtcgtatgttcgcaacacctgcgtcttcggcggcgccccgaagggcggccaaatgcgggatctgcagcgcggctgcgagatcgtcattgccacacccggacgtcttattgatttcctctccgccggctctactaacctgaagcgttgcacctacttggtgctggacgaggccgatcgcatgttagacatgggcttcgagccccagatcagaaagatcgtctcacagatccggcccgaccgacagacgctcatgtggagcgctacctggcccaaggaggtcaagcagcttgccgaggactttttgggcaactacatccagatcaacattggatcgctggagctgtccgccaatcacaacatccgccaggtggtggacgtttgtgacgagttcagcaaggaggagaaattgaagaccctcctgtcagacatctacgacaccagcgagagccccggcaagattatcatattcgtggagacaaagcgacgcgtggacaacctggtgcgcttcatccgcagcttcggagtccgttgtggagctattcacggtgacaagtcgcaatcagaacgagactttgtgctccgtgagttccgctcgggcaagtccaacattctggtggccaccgatgtggcggcccgtggactagacgtggacggcatcaagtatgtcatcaactttgactacccgcaaaacagcgaggactacatccatcgcatcggtcgcacaggacgatccaacacaaagggcacctctttcgccttcttcaccaagaacaatgccaagcaagccaaggcgctggtcgacgtactccgagaagctaatcaggaaatcaatcctgccctggaaaatctggcccgcaactcgcgctacgacggtggcggcggacgctcccgttatggaggcggtggcggcggcggtcgcttcggcggcggcggcttcaagaagggcagcctgagcaacggacgaggcttcggaggaggcggcggcggcggcggcgaaggcagacactcgcgcttcgactag

SEQ ID NO: 3533 - protein, 719 aa, Drosophila melanogaster
MLKLVQYIAPRVGGATPRPTACGWGNLLLISPRSGASSEKCITQRRHFLFSSASSSGTFASSSSLCTEQRQQFHGSRRNRETILFPSTYSSLQAQSQRAFRDSSKPDSDDYVDSIPKAEQRTRTRKSLFNDPDERTEEIKIEGVMAPHDRDFGHSGRGGRGGDRGGDDRRGGGGGGNRFGGGGGGGDYHGIRNGRVEKRRDDRGGGNRFGGGGGFGDRRGGGGGGSQDLPMRPVDFSNLAPFKKNFYQEHPNVANRSPYEVQRYREEQEITVRGQVPNPIQDFSEVHLPDYVMKEIRRQGYKAPTAIQAQGWPIAMSGSNFVGIAKTGSGKTLGYILPAIVHINNQQPLQRGDGPIALVLAPTRELAQQIQQVATEFGSSSYVRNTCVFGGAPKGGQMRDLQRGCEIVIATPGRLIDFLSAGSTNLKRCTYLVLDEADRMLDMGFEPQIRKIVSQIRPDRQTLMWSATWPKEVKQLAEDFLGNYIQINIGSLELSANHNIRQVVDVCDEFSKEEKLKTLLSDIYDTSESPGKIIIFVETKRRVDNLVRFIRSFGVRCGAIHGDKSQSERDFVLREFRSGKSNILVATDVAARGLDVDGIKYVINFDYPQNSEDYIHRIGRTGRSNTKGTSFAFFTKNNAKQAKALVDVLREANQEINPALENLARNSRYDGGGGRSRYGGGGGGGRFGGGGFKKGSLSNGRGFGGGGGGGGEGRHSRFD

SEQ ID NO: 3534 - DNA, 2397 bp, Drosophila melanogaster
  CDS (1)..(2397)
atgagtaatgctattaaccaaaatggcacaggtctagagcagcaagttgctggtctggacttgaatggcggctctgctgactacagcggccccataaccagcaagacttccactaactcggtcaccggtggtgtgtatgtgcccccgcaccttcgtggtggtggtggcaataacaacgcagcggacgcagagagccagggccaaggacagggccagggtcagggcttcgactccagatccgggaatccgcgccaggagactagggaccctcaacagtcgcgcggaggcggaggcgaataccgcagaggcggcggcggtggtggtcgcggcttcaatcgccagagcggcgactacggttacggaagcggcggcggaggacgacgtggaggcggtggacgtttcgaggacaactacaacggtggtgaattcgattcgcgtcgcggcggtgactggaatcgcagcggcggaggcggcggaggaggtcgaggatttggacgcggaccatcgtaccgcggcggtggcggcggaagcggtagcaacctcaacgagcagactgccgaggatggccaggcacagcagcagcagcagccgcgcaacgatcgttggcaggagccagaacgtcctgccggattcgatggcagcgagggcggacagtctgccggcggcaacagaagctacaacaatcgcggcgagcgcggaggcggcggttacaacagccgctggaaggagggcggcggctcaaacgtcgactacacaaagctgggcgcccgagatgagcgcctggaggtggagctgttcggcgtgggcaatacgggaatcaattttgacaaatacgaggatatacccgtggaggcgacgggccagaatgtgcccccgaacatcacatcgttcgatgatgtgcagctgacggagattatccgcaacaacgtggccttagcacgttatgacaaaccgacaccggtgcagaagcacgccattccgatcattatcaatggccgggatctaatggcctgcgcccagactggatccggcaagacggccgccttcctggtgccgattctcaaccagatgtacgagctgggacatgtgcccccgccgcaaagcacccggcagtacagccggcgcaagcagtatccgttgggtctggtgctggcgccgacccgcgaactggccacccagatctttgaggaggccaagaagttcgcctatcgctcccggatgcgcccggcagtgctgtacggcggaaacaatactagcgagcagatgcgcgagctggaccgcggttgccatctgattgtggccacacccggtcgcctagaggacatgatcacacgcggaaaggtgggactggagaacattcgattccttgtactggatgaggctgatcgtatgttggacatgggtttcgagccgcagatccgtcgcatcgtcgaacagctaaacatgccgccaaccggacagcgccagacgcttatgttctcggccacattccccaagcagatccaggagttagccagcgatttcctcagcaactacattttcttggccgttggtcgtgtgggctccacatctgagaacattacgcagacaatcctgtgggtctatgaacccgacaagcgctcgtatctgctggatctgctctcgtctatccgcgatggccccgaatacaccaaagacagcctaacactgatctttgtggagactaagaagggtgcagactcgctggaggagttcctgtaccagtgcaatcatcccgtcactagcatccacggtgatcgcacgcagaaggagcgcgaggaggcactgcgctgcttccgatcgggcgactgccccatcctggtggccacagccgtggccgctcgtggcctggacattccgcacgttaagcacgttattaactttgacctgccctcggatgtggaggagtatgtccaccgtatcgggcgtaccggacgtatgggtaatcttggtgtggccacctcctttttcaacgaaaagaaccgcaacatttgctccgatctcttggagctgctgatcgaaacgaagcaggagatccccagtttcatggaggatatgagttcggatcgcggacatggcggagccaagcgggctggacgaggcggtggtggacgttatggtggcggcttcggctccagggattaccgtcaaagctctggcggcggcggtggcggacgcagtggaccgccaccacgtagcggtggttccggatcaggaggcggcggcggcagttaccgcagcaatggaaactcgtacggcggcaattcgggcggcggtggatactatggcggcggcgccggtggtggctcctatggcggctcctacggcggcggcagtgcctcgcactcttcgaacgcacccgactggtgggctcaatga

SEQ ID NO: 3535 - protein, 798 aa, Drosophila melanogaster
MSNAINQNGTGLEQQVAGLDLNGGSADYSGPITSKTSTNSVTGGVYVPPHLRGGGGNNNAADAESQGQGQGQGQGFDSRSGNPRQETRDPQQSRGGGGEYRRGGGGGGRGFNRQSGDYGYGSGGGGRRGGGGRFEDNYNGGEFDSRRGGDWNRSGGGGGGGRGFGRGPSYRGGGGGSGSNLNEQTAEDGQAQQQQQPRNDRWQEPERPAGFDGSEGGQSAGGNRSYNNRGERGGGGYNSRWKEGGGSNVDYTKLGARDERLEVELFGVGNTGINFDKYEDIPVEATGQNVPPNITSFDDVQLTEIIRNNVALARYDKPTPVQKHAIPIIINGRDLMACAQTGSGKTAAFLVPILNQMYELGHVPPPQSTRQYSRRKQYPLGLVLAPTRELATQIFEEAKKFAYRSRMRPAVLYGGNNTSEQMRELDRGCHLIVATPGRLEDMITRGKVGLENIRFLVLDEADRMLDMGFEPQIRRIVEQLNMPPTGQRQTLMFSATFPKQIQELASDFLSNYIFLAVGRVGSTSENITQTILWVYEPDKRSYLLDLLSSIRDGPEYTKDSLTLIFVETKKGADSLEEFLYQCNHPVTSIHGDRTQKEREEALRCFRSGDCPILVATAVAARGLDIPHVKHVINFDLPSDVEEYVHRIGRTGRMGNLGVATSFFNEKNRNICSDLLELLIETKQEIPSFMEDMSSDRGHGGAKRAGRGGGGRYGGGFGSRDYRQSSGGGGGGRSGPPPRSGGSGSGGGGGSYRSNGNSYGGNSGGGGYYGGGAGGGSYGGSYGGGSASHSSNAPDWWAQ

SEQ ID NO: 3536 - DNA, 1872 bp, Ashbya gossypii
  CDS (1)..(1872)
atgtctgaactagttaacaagatggaaaatttgagtgttggcgacagcgcgcaaaagaagagcgcttacgtgcctcctcacgttaagagacggatgaaggaggggggcagtgagccatcctcgcgcaatacggaaaactttggcaacggggggcgctttggtgggtctgaacacaacggctttggcggcggacgcgggagctggtttggcggcaacgccagaggtggtggtccgcggagcagtgaccgcgggggatcatctagatttggtaagtgggtggacggcaagcatgtgcccatgaagcgtaacgagaagctagaggtgcaacttttcggcaccccagaggacccaaacttccagtcttcgggtattaactttgacaattacgacgatattccagtggacgcttccggtgaggacgtgcctgatccgatcacggagtttacttctcctcctttggacgagctattgttggaaaacattaaactagcgcgcttcacgaagcccactccagtgcagaagtattctgtgcctattgtggcaaagggcagagatttgatggcgtgtgcgcagacaggttccggtaagactggtgggtttttgttccctgtgctatcacagtcgtttagcaacggtcctgcctcaactccagatgagtccggctactacatgagaaaggcttaccctactgctgtggttctagctcctaccagagagttggctactcagattttcgatgaggcgaagaagttcacttaccggtcctgggtcaaaccatgcgttgtatacggtggtgctgacattcgtcagcagattagagagttggagcgtggctgcgacttgatcgttgctactccaggtcgtttgaacgatttgctagaacgtggtaagatttcgctatgcagcgtgaagtacctcgttcttgatgaagcggacagaatgttggatatgggttttgagcctcaaattagacacatcgtggagggctgtgatatgcctactgtcgagaacagacaaacgcttatgttttccgccacattccctactgacatccagcatttggcagcagactttttgaaggactacattttcttgtcggtcggtagagttggttcgacctccgagaatattacccagaaggttttgcacgtggaagacattgacaagcgttctgttctattggacttgctagctgcttctgatggcggtttgacgttagtattcgtggagaccaagagaatggccgatgctctaactgactttttaatcatgcagaacctttctgccactgctatccatggtgatcgtacccaggctgagcgtgaacgtgctctagccttcttcagaaccggtcgtgctaacgtcttggttgctacagcggttgccgccagaggtttggatattccaaacgttacacatgttattaactacgacttgccttcggacattgacgattacgtccacagaattggtagaactggtcgtgctggtaacactggtttggctactgccttctttaaccgtggcaacaagaacgttgtcaaggagttggtcgacattttggaagaggccaaccaagaggttccatcatttttgagccagattgctaaggaaatgtcctacggtggtggtggtggtaagagtagtagaggtggccgtggaggatactcgcgtgggaatagtactagggacttccgtcgtcacggcggtggtggcggctccgaatggtccagcgccaacagagcaagctccggctggggtaacgccaccagaaccggctccggctggggtgacagctctggatttgggggtagcactgaatcctggtctaacgcttcaaagactgtgggtagcaacaactcctggtggtga

SEQ ID NO: 3537 - protein, 623 aa, Ashbya gossypii
MSELVNKMENLSVGDSAQKKSAYVPPHVKRRMKEGGSEPSSRNTENFGNGGRFGGSEHNGFGGGRGSWFGGNARGGGPRSSDRGGSSRFGKWVDGKHVPMKRNEKLEVQLFGTPEDPNFQSSGINFDNYDDIPVDASGEDVPDPITEFTSPPLDELLLENIKLARFTKPTPVQKYSVPIVAKGRDLMACAQTGSGKTGGFLFPVLSQSFSNGPASTPDESGYYMRKAYPTAVVLAPTRELATQIFDEAKKFTYRSWVKPCVVYGGADIRQQIRELERGCDLIVATPGRLNDLLERGKISLCSVKYLVLDEADRMLDMGFEPQIRHIVEGCDMPTVENRQTLMFSATFPTDIQHLAADFLKDYIFLSVGRVGSTSENITQKVLHVEDIDKRSVLLDLLAASDGGLTLVFVETKRMADALTDFLIMQNLSATAIHGDRTQAERERALAFFRTGRANVLVATAVAARGLDIPNVTHVINYDLPSDIDDYVHRIGRTGRAGNTGLATAFFNRGNKNVVKELVDILEEANQEVPSFLSQIAKEMSYGGGGGKSSRGGRGGYSRGNSTRDFRRHGGGGGSEWSSANRASSGWGNATRTGSGWGDSSGFGGSTESWSNASKTVGSNNSWW

SEQ ID NO: 3538 - DNA, 2046 bp, Aspergillus clavatus
  CDS (1)..(2046)
atggccgacggattgaacatgggaaacctttccctcaacgactcccagcatgcgcctgctggccctggtaacactggccgcgctgcctacatccctccccatctccgtgggcgcgctgggggtgccaacgtcgacgctgctgccgctgctgctcctcctcccggtcctgcggcctggaacggtcccagacaaggcgcccctccccgtggtggcaactgggctaacgccaacgcctctgattttagccctcgcgctcccagtggtcccaatggtaacaacagctggactccctcggaaggtcaacgccggccatttgatccccatgcttacggacacccaggtcacggaggctcctacggtggttcccagggcgcctctactagaggctctggagatggccagtggcgtgatggcaagcacatccctggtcccgcgaacgcccgcctggaacgtgaacttttcggtgttcccaacgatcctaccaagcagagcaccggtattaacttcgccaactacgacgatatccctgtcgaagcttccggtcaagatgtccccgagcccgtcaatgctttcacgaaccctcccctggacgaccacctgatctcgaacatcaagctcgctcgttaccagacccctacccccgtccagaagtactccatccccattgtcatgaacggtcgtgatctcatggcttgtgcccagaccggctccggaaagactggtggtttcttgttccccattctctctcaggctttccagaagggtccctccgccgtgcctgctcaggcttccggtcagatgagctacggccgtcaacgcaaggcttatcccacttccctgatcctcgcccccactcgtgagcttgtttctcagatcttcgacgaggcccgcaagttcgcctaccgctcttgggttcgcccctgtgttgtgtacggtggtgccgacattggctcccagctccgccagatcgagcgtggctgtgatctgctcgtcgctactcccggtcgtctggttgacttgatcgagcgtggccgcatttcgctcgtcaacatcaactacctggttctcgacgaggctgatcgtatgttggacatgggtttcgagcctcagattcgccgtatcgtcgagggtgaggatatgccttcggtcaacgagcgccaaactctcatgttctcggctaccttcccccgcgatatccagatgctcgcccgtgacttcctgaaggactacgtcttcctgtccgtcggtcgtgtcggttcgacctccgagaacatcactcagaaggtcgagtacgttgaagacgttgacaagcgctccgttctgctcgatatcctccacacccatggcaccagcggtctgaccctcatcttcgttgagaccaagcgcatggccgatgctctgtccgacttcctcatcaaccagcgcttccccgctaccgccatccacggtgatcgtactcagcgtgagcgtgagcgtgctctggagatgttccgctccgcacgctgccccatcctcgttgccactgctgtcgctgctcgtggtcttgatatccctaacgtcacccacgttatcaactacgatcttcccactgacatcgatgattacgtccaccgcattggtcgtaccggtcgtgccggtaacaccggtattgccactgctttcttcaaccgtggcaaccgtggtgtcgtccgtgagctgatcgaccttctgaaggaggctcaccaggaggttccctctttcctggagagcattgctcgcgaaggcagcggatacggcggccgtggcggtcgcggtggccgtggccgtggtggcaatgccaaccgcgatgtgcgccgtatgggcggtgccatgggtggcggtgctccttccttcggcggaggtagctacggtggccccggtggcagctacggcggcggcagctatggtggtggtgctgctgctccatcctatggcggtggctacggcggtgccagcggcggtggcggcagctacggtggcagctatggcaacccctctggccccactggaccttcttcgtggtggtaa

SEQ ID NO: 3539 - protein, 681 aa, Aspergillus clavatus
MADGLNMGNLSLNDSQHAPAGPGNTGRAAYIPPHLRGRAGGANVDAAAAAAPPPGPAAWNGPRQGAPPRGGNWANANASDFSPRAPSGPNGNNSWTPSEGQRRPFDPHAYGHPGHGGSYGGSQGASTRGSGDGQWRDGKHIPGPANARLERELFGVPNDPTKQSTGINFANYDDIPVEASGQDVPEPVNAFTNPPLDDHLISNIKLARYQTPTPVQKYSIPIVMNGRDLMACAQTGSGKTGGFLFPILSQAFQKGPSAVPAQASGQMSYGRQRKAYPTSLILAPTRELVSQIFDEARKFAYRSWVRPCVVYGGADIGSQLRQIERGCDLLVATPGRLVDLIERGRISLVNINYLVLDEADRMLDMGFEPQIRRIVEGEDMPSVNERQTLMFSATFPRDIQMLARDFLKDYVFLSVGRVGSTSENITQKVEYVEDVDKRSVLLDILHTHGTSGLTLIFVETKRMADALSDFLINQRFPATAIHGDRTQRERERALEMFRSARCPILVATAVAARGLDIPNVTHVINYDLPTDIDDYVHRIGRTGRAGNTGIATAFFNRGNRGVVRELIDLLKEAHQEVPSFLESIAREGSGYGGRGGRGGRGRGGNANRDVRRMGGAMGGGAPSFGGGSYGGPGGSYGGGSYGGGAAAPSYGGGYGGASGGGGSYGGSYGNPSGPTGPSSWW

SEQ ID NO: 3540 - DNA, 2025 bp, Aspergillus fumigatus
  CDS (1)..(2025)
atggccgacagcttgaagatgggaaatctgtcccttaacgaatcccagcacgcgcctgctgctcccccttcaaacggccgcgctgcctacatccctccccatctccgtcagcgcaccatgggcgctaacgtcgacggtgccgctgcttccccccccggtccggctcctggtgctggtgcttggaacggcccaagaaacgctcctcgcggtggcaactgggctaatgccaatgcctctgacttcagccctcgtggtcccaacgtccccaatggtaacatcagctggactcccacggaaactcaacgtcggccctttaacccacatgcttacggacacccaggacacggaggctcctacggcggttctcatggttctgccaaaggctctggagacggccagtggcgcgacggcaagcacatccccggtcccgcaaacgcccgcctagagcgtgagcttttcggtgttcccaacgatcccaccaagcagagcactggtatcaacttcgccaactacgacgatatccccgtcgaagcatccggtcacgacgttcccgagcctgtcaatgccttcacgaaccccccgctggatgaccacttgatttctaacatcaagctcgctcgctatcaaacccctactcccgtccagaagtactccattcccattgtgatgaacggtcgcgatctcatggcgtgtgctcagactggttccggaaagactggtggtttcctgtttcccattctctctcaggccttccagacaggcccttcccctgtgcctgctcaggcctccggccagttcggctatggtcgtcaacgcaaggcgtaccctacttccctgatcctcgcccccactcgtgagctcgtttctcagatctttgacgaagcccgcaagttcgcttaccgctcttgggttcgcccctgtgtcgtctacggtggtgccgatattggctctcagctccgtcagatcgagcgtggctgtgatctcctggtcgctacccctggtcgtctggttgacctgatcgagcgtggccgcatctctctggttaacatcaagtacctggtcctcgacgaggctgatcgtatgttggacatgggtttcgagcctcagattcgccgcatcgtagagggtgaagacatgcctaacgtcaatgagcgccaaactctgatgttctcagccactttccctcgtgatattcagatgcttgcccgggacttcctgaaggattacgtgttcctctccgtcggtcgtgttggctccacctctgagaacattactcagaaggtcgagtatgtcgaggatcacgacaagcgttccgtccttcttgatatcctccacacccatggcacgagcggtcttactctcatcttcgtggagaccaagcgtatggcggatgctctttccgacttcctgcttaaccaacgcttccctgcaactgctattcacggtgatcgcacccagcgtgagcgtgaacgtgctttggagatgttccgctccgggcgttgccctattttggttgctactgctgtcgctgctcgtggtcttgatattccaaacgtcacccatgtcattaactatgatctacccaccgacattgatgactacgttcatcgcattggtcgtaccggtcgtgcgggtaacactggtatcgctactgccttcttcaaccgtagcaaccgtggtgttgtccgtgagctgattgaccttctcaaggaggctcatcaagaagttccttccttcctggagagcattgctcgcgaaggcagcggatatggtggacgcggaggccgtggaggccgcggtcgtggtggcaatgccactcgcgatatgcgtcgtatgggtggtaacgttggcggtggtggtccctcgttcggcggcggctacggtgctcccagtggaagcagctatggcggcggggctggcggctacggtgctcccccagcctacggtggtggctacggcggtggttatggcggcggtagctacggaaacccctcgggcccaactggaccctcttcctggtggtaa

SEQ ID NO: 3541 - protein, 674 aa, Aspergillus fumigatus
MADSLKMGNLSLNESQHAPAAPPSNGRAAYIPPHLRQRTMGANVDGAAASPPGPAPGAGAWNGPRNAPRGGNWANANASDFSPRGPNVPNGNISWTPTETQRRPFNPHAYGHPGHGGSYGGSHGSAKGSGDGQWRDGKHIPGPANARLERELFGVPNDPTKQSTGINFANYDDIPVEASGHDVPEPVNAFTNPPLDDHLISNIKLARYQTPTPVQKYSIPIVMNGRDLMACAQTGSGKTGGFLFPILSQAFQTGPSPVPAQASGQFGYGRQRKAYPTSLILAPTRELVSQIFDEARKFAYRSWVRPCVVYGGADIGSQLRQIERGCDLLVATPGRLVDLIERGRISLVNIKYLVLDEADRMLDMGFEPQIRRIVEGEDMPNVNERQTLMFSATFPRDIQMLARDFLKDYVFLSVGRVGSTSENITQKVEYVEDHDKRSVLLDILHTHGTSGLTLIFVETKRMADALSDFLLNQRFPATAIHGDRTQRERERALEMFRSGRCPILVATAVAARGLDIPNVTHVINYDLPTDIDDYVHRIGRTGRAGNTGIATAFFNRSNRGVVRELIDLLKEAHQEVPSFLESIAREGSGYGGRGGRGGRGRGGNATRDMRRMGGNVGGGGPSFGGGYGAPSGSSYGGGAGGYGAPPAYGGGYGGGYGGGSYGNPSGPTGPSSWW

SEQ ID NO: 3542 - DNA, 2037 bp, Aspergillus niger
  CDS (1)..(2037)
atggccgacagcttgaagatgggaaacctttccctcaacgagtctcagcacgctcctgcccctgccccctccacgggtcgcgccgcttacatccctccccatcttcgcggacgccagatgggtggaaacatggacggtgctgccgccgctgcccctccccccggtcccgccgctggccctggcaactcctggggtggtcctagaggcggccctcgtggtggccagtgggccaacgccaacgctcctgatttcagccctcgcggtcccaatggtaacactagctggagccctcacgaagctcgccggccctttaatccaaatgcttacggacacccaggtcacggaggttcttatggaagtggaggtggttctgcccgaggctctggagatggccagtggcgtgacggcaagcacattcccggtcctgccaatccccgtctcgaacgcgaactgttcggtcttcccaacgatcccaccaagcaaaacactggcatcaactttgccaactacgacgacatccccgtggaggcctctggtcacgatgtcccggagccggtcaacgccttcaccaacccgcccctggatgaccacctgatcgagaacatcaagctcgcccactaccagactcccactcccgtccagaagtattccatccccatcgtcatgaacggccgcgacttgatggcctgcgcccagactggttccggaaagactggtggtttcctcttccctattttgtctcaggcttatcagaacggtccttccgctgctcctgcccaggccggcggccaatttggctacggacgtcaacgcaaggcgtacccgacctccctcattctcgcccccacccgtgagcttgtttcccagattttcgatgaggcccgcaagttcgcctaccgctcttgggtccgcccttgtgttgtgtacggtggtgccgatatcggctcccagctccgccagatcgagcgcggatgtgatcttctggttgctactcctggtcgtcttgtcgatcttatcgagcgtggccgcatctctctggtcaacatcaagtacctgattctcgatgaggccgatcgtatgttggacatgggtttcgagccccagattcgccgcattgtggaaggcgaggatatgccccacgtgaacgaccgccagacgctgatgttttcggccaccttcccccgtgacatccagatgctggctcgcgacttcttgaaggactacgtcttcctgtccgtcggccgtgtcggttctacctctgagaacatcacccagaaggttgaatacgttgaggaccacgacaagcgctccgtcctcttggatatcctccacacgcacggcactagcggtctgaccctcatcttcgtcgaaaccaagcgtatggccgactccctgtccgacttccttctcaaccagcgtttccccgccaccgctattcacggtgatcgtacccagcgtgagcgtgagcgtgctttggaaatgttccgctctggccgttgccctatccttgttgccactgctgttgctgctcgtggtctcgatatccccaatgttacccacgtcatcaactacgacttgcctaccgacatcgatgactatgttcaccgtatcggtcgtactggtcgtgccggtaacactggtatcgccactgctttcttcaaccgtggtaaccggggtgttgtccgcgacctgattgatctcctgaaggaggctcatcaggaggtcccctccttcctcgagagcattgctcgtgagggcagcggctatggtggtcgtggcggccgtggtggccgtggtcgtggcgccaacgctacccgtgacatgcgtcgcatgggcggtggtatgggcggtcctccctcctttggtggcagcagctacggtgcacctggcggcagctatggtggcggcggcggcggcagcagcagctatggcgctcctccctcctatggaggcggtggtggctatggcggcggcggcagctacggtggtggttacggcaacccgtccggccctactggaccttcttcctggtggtaa

SEQ ID NO: 3543 - protein, 678 aa, Aspergillus niger
MADSLKMGNLSLNESQHAPAPAPSTGRAAYIPPHLRGRQMGGNMDGAAAAAPPPGPAAGPGNSWGGPRGGPRGGQWANANAPDFSPRGPNGNTSWSPHEARRPFNPNAYGHPGHGGSYGSGGGSARGSGDGQWRDGKHIPGPANPRLERELFGLPNDPTKQNTGINFANYDDIPVEASGHDVPEPVNAFTNPPLDDHLIENIKLAHYQTPTPVQKYSIPIVMNGRDLMACAQTGSGKTGGFLFPILSQAYQNGPSAAPAQAGGQFGYGRQRKAYPTSLILAPTRELVSQIFDEARKFAYRSWVRPCVVYGGADIGSQLRQIERGCDLLVATPGRLVDLIERGRISLVNIKYLILDEADRMLDMGFEPQIRRIVEGEDMPHVNDRQTLMFSATFPRDIQMLARDFLKDYVFLSVGRVGSTSENITQKVEYVEDHDKRSVLLDILHTHGTSGLTLIFVETKRMADSLSDFLLNQRFPATAIHGDRTQRERERALEMFRSGRCPILVATAVAARGLDIPNVTHVINYDLPTDIDDYVHRIGRTGRAGNTGIATAFFNRGNRGVVRDLIDLLKEAHQEVPSFLESIAREGSGYGGRGGRGGRGRGANATRDMRRMGGGMGGPPSFGGSSYGAPGGSYGGGGGGSSSYGAPPSYGGGGGYGGGGSYGGGYGNPSGPTGPSSWW

SEQ ID NO: 3544 - DNA, 2028 bp, Aspergillus oryzae
  CDS (1)..(2028)
atggccgacagcttgaagatgggtagcctttccctcaacgaatctcagcatgcgcctgctccaaactcttctggccgcgctgcctacatccctccccatctccgtcaacgccagacgggtgcgaacatggacggagcccccgccgccgctccccctgctcctggtcccagcggcccgggcaactcttggggttcgagaggcggtcctcgcggtggcaactgggccaacgctaatgctcctgatttcagccctcgcggtcccaatcccaatggtaacactagctggactcccactgaaggttctcgccggtcatttaatccagatgcttacggaaacccaggtcatggaggctcttatggcggaggcagtgccagaggctctggagatggccagtggcgcgacggcaagcacatccccggtcccgccaacgcccgcgtggagcgtgaacttttcggcctgcccaacgatcccactaagcagaacactggtatcaactttgccaactacgacgatatccccgtggaagcctccggtcaaaatgttcctgagcccgtcaacgcattcaccaaccctcctttggatgaccacctgattgcgaacattacgctcgctcattaccagactcccaccccggtgcagaagtactctattcctatcgtgatgaacggccgtgacctgatggcttgtgcccagactggttctggaaagactggtggtttcctgttcccgatcttgtctcaggcattccagaacggtccttccccaactcctgccccggcatccggccagttcagctacggccgtcagcgcaaggcctacccgacatcccttatcttggccccgactcgtgaactagtctctcagatcttcgatgaagcccgcaagttcgcttaccgctcctgggttcgtccctgcgtcgtctacggtggtgccgatattggatctcagctccgtcagattgaacgtggttgtgaccttctggttgccactcctggtcgtctcgtggatcttatcgagcgtggccgcatttctcttgtcaacatcaagtacttgatcttggacgaagctgaccgcatgttggacatgggtttcgagcctcagatccgccgcattgtggagggtgaagatatgcctcatgttaatgaccgtcaaactctgatgttctccgccaccttccctcgcgacattcagatgctggctcgcgacttcctgaaagattatgttttcctttctgttggtcgtgtcggctcaacctctgagaacatcacccagaaagttgaatacgtcgaagatcacgacaagcgttcagttctcttggatattctccacactcatggaactagcggtctcaccctcattttcgttgagaccaagcgcatggccgactctctgtcggacttcctgctcaaccagcgcttccccgccaccgccatccacggtgaccgtactcagcgtgaacgtgagcgtgctttggagatgttccgttccggccgttgccctatcttggttgctactgctgtcgctgctcgtggtctcgatattcccaacgttactcacgttatcaactacgatctgcctactgatattgacgactatgttcaccgtatcggtcgtaccggtcgtgcgggtaacaccggtattgccaccgccttcttcaaccgtggcaaccgtggcgtcgtccgcgatctgatcgaccttctcaaggaggcgcaccaggaggtcccctcgttcttggagagcattgctcgtgagggcagtggatacggcggccgtggcggccgtggtggtcgtggccgtggagccaacgccactcgtgatatgcgtcgtgtgggcggcggtatgggcggtcctccttccttcggtggcagcagctatggcggtcccagtgctggctatggcggtagctatggtggtggtgctccctcttacggcggcagcggcggcggcagctacggctacggtggcagcggcggcggcggcggctatggaaacccctcgggccctactggaccttcctcctggtggtaa

SEQ ID NO: 3545 - protein, 675 aa, Aspergillus oryzae
MADSLKMGSLSLNESQHAPAPNSSGRAAYIPPHLRQRQTGANMDGAPAAAPPAPGPSGPGNSWGSRGGPRGGNWANANAPDFSPRGPNPNGNTSWTPTEGSRRSFNPDAYGNPGHGGSYGGGSARGSGDGQWRDGKHIPGPANARVERELFGLPNDPTKQNTGINFANYDDIPVEASGQNVPEPVNAFTNPPLDDHLIANITLAHYQTPTPVQKYSIPIVMNGRDLMACAQTGSGKTGGFLFPILSQAFQNGPSPTPAPASGQFSYGRQRKAYPTSLILAPTRELVSQIFDEARKFAYRSWVRPCVVYGGADIGSQLRQIERGCDLLVATPGRLVDLIERGRISLVNIKYLILDEADRMLDMGFEPQIRRIVEGEDMPHVNDRQTLMFSATFPRDIQMLARDFLKDYVFLSVGRVGSTSENITQKVEYVEDHDKRSVLLDILHTHGTSGLTLIFVETKRMADSLSDFLLNQRFPATAIHGDRTQRERERALEMFRSGRCPILVATAVAARGLDIPNVTHVINYDLPTDIDDYVHRIGRTGRAGNTGIATAFFNRGNRGVVRDLIDLLKEAHQEVPSFLESIAREGSGYGGRGGRGGRGRGANATRDMRRVGGGMGGPPSFGGSSYGGPSAGYGGSYGGGAPSYGGSGGGSYGYGGSGGGGGYGNPSGPTGPSSWW

SEQ ID NO: 3546 - DNA, 2019 bp, Candida albicans
  CDS (1)..(2019): transl_table=12
atgtctgatattagtaaacaaatgaataatttgagtgttaacgatggtgctaacacagtaaacaacaacaacagctttagaggcggccgttcccaatacgtgccacctcatttaagaaacagacaaggtggtggtaatcaatcaggttcctcatcagaatcatcagatgttccatttggaggatctcaacgtggtggatttaactcaaatggattcaacaacaacagaggtggattcaacaatggtggctacaacaacaaccgaggtggattcaacaacggtggcttcaataacagaggtaactacaaccaatcctttggaggcagaggtggcagaggtggtttcaacaacggtggcggtagataccaaagaccaactccaggtgtcggtaaatggcaagatggtaaacacgaaccagctcctcgtaatgagaaattagaagtggaattatttggtactgctgatgattctcatttccaatcttctggtattaactttgacaattatgatgatattccagttgaagctagtggtgacaaagttccagaacctattacttcctttactgctccaccattggacgaattgttggttgaaaacattcagttgtctagattcaccaaaccaaccccagtccaaaaatactccgttccaattgttgctgctggtagagatttgatggcttgtgcccaaactggttccggtaagaccggtgggttccttttcccagttttatctgaatcttacatgaagggaccagctccagttcctgaatcaaatggtgccttctcttcacacaaagtttatccaaccatacttgttatggcaccaaccagagaattggtttctcaaatttacgaagaaagtaaaaaattcagttacagatcatgggttcgtgcttgtgtcgtttatggtggtgccgatattggtcaacaaatgagaaacatggacagaggttgtgatttgttagttgccaccccaggtcgtcttaaggatttgttggatagaggcaaagtttctttggccaacattagatacttggttttggatgaagctgatagaatgttggatatgggttttgaaccacaaatcagatacattgttgaagagtgtgatatgcctgctgtcaaggatagacaaacattgatgttttctgctactttcccaagagacattcaaatgttggcccgtgatttcttaaaagattatgttttcctttctgttggtagagttggttctacttcagaaaacatcacccaaaagatcttgtacgttgaagatgacgaaaagaagtcagttattttggacttgttatctgccaatgaaaatggattaactatcgttttcactgaaaccaagagaatggccgacaacttggccgattacttgtacgaccaaggattcccagctactgctattcatggtgacagatctcaatatgaaagagaaaaagctcttgctgccttcaaaaatggtgctgctcctattttggttgccactgccgttgctgccagaggtttggatattcctaatgtttcccacgttatcaactacgatttacctagtgatatcgatgactatgttcatagaattggtcgtactggtcgtgccggtaacgttggtattgccactgcttttttcaacagaaacaacaagaatgttgttaaaggattaattgaattattatctgaagccaatcaagaagtcccagactttttaactaaaattgccagagaaggagcttttggtaagatgactcgtggtggtggccgtggcggttccagccgtggaccatccagagatttcagaagaagtggaaattcaggatggggcaactctggtaacagtggctggggtaactccggtaacgccagtagcagtggctggggtggtaattcatcctcatcatactccaacactaacagcaattatggtggtggttacaacaataaccaacgttctaactttagcagcggtggcagttacggtaatcaaactggttccaactcctggtggtaa

SEQ ID NO: 3547 - protein, 672 aa, Candida albicans
MSDISKQMNNLSVNDGANTVNNNNSFRGGRSQYVPPHLRNRQGGGNQSGSSSESSDVPFGGSQRGGFNSNGFNNNRGGFNNGGYNNNRGGFNNGGFNNRGNYNQSFGGRGGRGGFNNGGGRYQRPTPGVGKWQDGKHEPAPRNEKLEVELFGTADDSHFQSSGINFDNYDDIPVEASGDKVPEPITSFTAPPLDELLVENIQLSRFTKPTPVQKYSVPIVAAGRDLMACAQTGSGKTGGFLFPVLSESYMKGPAPVPESNGAFSSHKVYPTILVMAPTRELVSQIYEESKKFSYRSWVRACVVYGGADIGQQMRNMDRGCDLLVATPGRLKDLLDRGKVSLANIRYLVLDEADRMLDMGFEPQIRYIVEECDMPAVKDRQTLMFSATFPRDIQMLARDFLKDYVFLSVGRVGSTSENITQKILYVEDDEKKSVILDLLSANENGLTIVFTETKRMADNLADYLYDQGFPATAIHGDRSQYEREKALAAFKNGAAPILVATAVAARGLDIPNVSHVINYDLPSDIDDYVHRIGRTGRAGNVGIATAFFNRNNKNVVKGLIELLSEANQEVPDFLTKIAREGAFGKMTRGGGRGGSSRGPSRDFRRSGNSGWGNSGNSGWGNSGNASSSGWGGNSSSSYSNTNSNYGGGYNNNQRSNFSSGGSYGNQTGSNSWW

SEQ ID NO: 3548 - DNA, 1854 bp, Candida glabrata
  CDS (1)..(1854)
atgactgagttagcagagcaagtttccatgcctgaagggcaacaaagacgtggtggttacgttccacctcacatccgtaacggtggtggcagaagaggcgattctgctcctcgtggtggtttcaacaacggtggcggccgtggtggtttcttcagaaacaacggtgaccgtggtggattcggctttggcggccgcggtggtggcttcggtggtaaccgtggtggcttcggcggtaaccgtggtggtttcggtggtggtatgagaggtagatgggttgacggcaagcacgttccaggccaaagaaatgagagaatcgaacttgaactgttcggtgctccagaagacccaagcttccaatcctctggtattaacttcgacaactacgacgatattccagtggaagcctctggtgaagatgtaccagaagctatcaccgagttcacttccccacctttggacagcttgttgttggaaaacatcaagttggccagattcacaaagccaactccagttcaaaagtactccgtaccaatcgtctccaagggtagagatttgatggcctgtgcccaaactggttccggtaagactggtggtttcttgttcccagtcttgtccgaatctttcttgaccggcccagctgagaaggccgctaacgatggttactcttaccaaagaaaggccttcccaactgctgttgtcatggccccaaccagagaattggctacacaaattttcgacgaagccaagaagttctgttacagatcttgggttaagccatgtgtcgtctacggtggtgctccaatcggtaaccaaatgagagaaatggaccacggttgtgacttgctagttgccaccccaggtcgtctaaacgatcttttggaaagaggtaaggtttctctatccaatgtcaagtacctggtcttggatgaagccgacagaatgttggatatgggtttcgaacctcaaatcagacacattgttgaagactgtgacatgcctccaaccggtgaaagacaaactctgatgttctctgccactttccctcacgacattcaacatttggccagagatttcctacacgactacatcttcttgtctgtcggtagagtcggttccacttccgaaaacattactcaaagaatcttatacgttgaaaacagagacaagaactctgctttgctagatctattggctgcttctaacgataacttgactttgattttcgttgagaccaagagaatggctgaccaactgaccgatttcttgatcatgcaaaacttcagcgccactgccatccacggtgaccgttctcaagctgaacgtgaacgtgctttggctgccttcagatctggtagagccaacattctagttgctactgctgttgccgctagaggtttggatattccaaatgttacccacgttatcaactacgatttgccaagtgatgttgatgactatgttcacagaatcggtagaactggtcgtgccggtaacaccggtgttgctaccgccttcttcaacagagacaacaacaacatcgttaagggtctatacgaaatcttggaagaagctaaccaagaaattcctccattcttagaagactgtctaagagaagtctccttcagcagaagtggtagcaacagaagtaccagaggtaacagaagcagcaacaccagagattaccgtaaacacggtggtaatggttccttcggtcaaaactccagaaacagttcttggggttctgccagaggtggtggtttcggtggttccactggtggctggggtaacgacagagctggtggttccgctggcggctggggtgcttccaacactaagacctcctcttggtggtaa

SEQ ID NO: 3549 - protein, 617 aa, Candida glabrata
MTELAEQVSMPEGQQRRGGYVPPHIRNGGGRRGDSAPRGGFNNGGGRGGFFRNNGDRGGFGFGGRGGGFGGNRGGFGGNRGGFGGGMRGRWVDGKHVPGQRNERIELELFGAPEDPSFQSSGINFDNYDDIPVEASGEDVPEAITEFTSPPLDSLLLENIKLARFTKPTPVQKYSVPIVSKGRDLMACAQTGSGKTGGFLFPVLSESFLTGPAEKAANDGYSYQRKAFPTAVVMAPTRELATQIFDEAKKFCYRSWVKPCVVYGGAPIGNQMREMDHGCDLLVATPGRLNDLLERGKVSLSNVKYLVLDEADRMLDMGFEPQIRHIVEDCDMPPTGERQTLMFSATFPHDIQHLARDFLHDYIFLSVGRVGSTSENITQRILYVENRDKNSALLDLLAASNDNLTLIFVETKRMADQLTDFLIMQNFSATAIHGDRSQAERERALAAFRSGRANILVATAVAARGLDIPNVTHVINYDLPSDVDDYVHRIGRTGRAGNTGVATAFFNRDNNNIVKGLYEILEEANQEIPPFLEDCLREVSFSRSGSNRSTRGNRSSNTRDYRKHGGNGSFGQNSRNSSWGSARGGGFGGSTGGWGNDRAGGSAGGWGASNTKTSSWW

SEQ ID NO: 3550 - DNA, 2067 bp, Chaetomium globosum
  CDS (1)..(2067)
atggcggaccaactcaacggcgacatgggcaacttgtcccttggctctccccagccgggccagcaccctggccagcagcccacggctcgttcctacattcctccccacatgcgcggcaagatgagcgcccccggctctccgggcagccccattgcgtccccccccatgaactctccccctcagccgggtccgggctctagccccatgggtggcctcaacaacagcgcttgggccggcaataacaattttgatgcgcgcgctggtggcggcggcaactggagcggcggatacgaaaatggccctggccctcagccttggggcggcccccggggcggcggtggcttcaaccgcaatgcttaccgcggacctaacgctggcggcggcggcggtggtaacatgggtggtggtgttggccgcggcgaaggccggtggatcgagggcaagcacgtcattggtaacagcgaccctcgcctggagcgtgacctctttggcactgccgacgacccgagcaagcagcacaccggcatcaacttcgagaagtacgacgatatcccggtcaatccctccggccgtgacgtgcctgagccggtcctcacttttagcaaccccccgctggatgctcacctgctctccaacattgagctcgctcgctaccagatccctactccagttcagaagtactccatccccattgtcatcaatggccgtgatctgatggcctgcgcccagaccggctccggcaagaccggtggtttcttgttccccatcatgcaccagtctttcacccaaggcccttcgcctattcccgctcagagcggcggcggctaccgccagcgcaaggcttaccctactgccttgatcctggcccccacccgtgagctggtttcgcagatctacgaggaagctcgcaagtttgcttaccgctcctgggtgcgcccttgcgtcgtctacggcggtgccgatattggctcccagctccgccagatggagcgcggctgcgatcttctagttgctacccctggtagacttgtcgacctcatagagcgtggtcgcatctcgctctgcaacatcaagtacctcgtgcttgacgaggctgatcgcatgttggacatgggtttcgagccccagattcgccgcattgttcagggtgaagacatgcctaccaccggccagcgccagacgctcatgttttcggccactttccctcgcgacatccaaatgcttgcccaggacttcctcaacgactacgttttcctttctgtcggtcgtgttggttctacttcggaaaacatcacccagaaggtcgaatacgtcgaggacgtcgacaagcgttccgtcctcctcgacattctgcacacccacgccggcggtctcacgcttatctttgtcgagaccaagcgcatggctgattccctgtcggatttcctcatcaaccaaaacttccccgccacctcgattcacggtgaccgcacccaacgtgagcgtgagcgcgctctagagctgttccgcaacggcaagtgccccatcctggtcgccactgctgttgctgctcgtggactcgatattcccaacgtcacccacgtcatcaactacgaccttcccactgatgttgacgactatgtgcaccgtattggtcgtactggtcgtgccggtaacacgggtatcgctactgccttcttcaaccgtggcaaccgcggtatcgtccgggagcttcttgacctcctcaaggaagctaaccaggaggttcctgctttcctcgagaccatcgcccgcgagtcgtcctttggcggcggtggcggccgtggccgtggtggcggcggtcgtggtcgcggcggtcgtggcggtaacaccgatttccgcaagtatggcggcggtggtggaggcttcggcggcggcggcggcggcttcggtggtggtcagcacggctctggcggtggtggcggcttcggtggcggcggtggctatggcggtgccccccagagcggtggttatggcggcggatacagcggcggctacggcggtggctacggcaaccccggtggtgccggtggccagtcctggtggtaa

SEQ ID NO: 3551 - protein, 688 aa, Chaetomium globosum
MADQLNGDMGNLSLGSPQPGQHPGQQPTARSYIPPHMRGKMSAPGSPGSPIASPPMNSPPQPGPGSSPMGGLNNSAWAGNNNFDARAGGGGNWSGGYENGPGPQPWGGPRGGGGFNRNAYRGPNAGGGGGGNMGGGVGRGEGRWIEGKHVIGNSDPRLERDLFGTADDPSKQHTGINFEKYDDIPVNPSGRDVPEPVLTFSNPPLDAHLLSNIELARYQIPTPVQKYSIPIVINGRDLMACAQTGSGKTGGFLFPIMHQSFTQGPSPIPAQSGGGYRQRKAYPTALILAPTRELVSQIYEEARKFAYRSWVRPCVVYGGADIGSQLRQMERGCDLLVATPGRLVDLIERGRISLCNIKYLVLDEADRMLDMGFEPQIRRIVQGEDMPTTGQRQTLMFSATFPRDIQMLAQDFLNDYVFLSVGRVGSTSENITQKVEYVEDVDKRSVLLDILHTHAGGLTLIFVETKRMADSLSDFLINQNFPATSIHGDRTQRERERALELFRNGKCPILVATAVAARGLDIPNVTHVINYDLPTDVDDYVHRIGRTGRAGNTGIATAFFNRGNRGIVRELLDLLKEANQEVPAFLETIARESSFGGGGGRGRGGGGRGRGGRGGNTDFRKYGGGGGGFGGGGGGFGGGQHGSGGGGGFGGGGGYGGAPQSGGYGGGYSGGYGGGYGNPGGAGGQSWW

SEQ ID NO: 3552 - DNA, 1980 bp, Coccidioides immitis
  CDS (1)..(1980)
atggctggcctctcgctcgaggactcccaacacgcccctagccatgccaccggtcgtgccccgtacattcctccccacctccgtggtcagcaacgcgccggccctaccatgcctgtcgatggtgctgctccacaaggtcgtcctccaatgaaccctggctcttggggtcctaatggtgctcctcccaacaactgggctcctcgaggagcaaataatatcaacggtgcccctgcctggggtgctgctggcggcggtggtgctcgtttcgatccaaatgcctatggccaccctggtcatcgcggcggtcagagccacggtggtgccggtagcggtgctgcccgtggatccggtgatggtcagtggcgcgatggaaaacatatccccggtccaccaaatgcccgtcttgaacgtgaactcttcggcgtccccaacgacccgtccaagcagcataccggtatcaacttcgccaactacgatgacattcctgtcgaggcctcaggtcacgatgttccagagccagtgactaccttcacaaacccacccctggatgaccatttgatatccaacatcaaacttgccacctacaagacaccgaccccagtccagaagtattccatcccaattgtcatgggtggtcgtgacctcatggcctgtgctcagaccggttccggaaaaactggcggtttcctcttcccgattctctctcaagcttttaaaaacggtccttccgcggtcccaacacaaaacgccaaccaattcagctatggccgtcagcgaaaagcctacccaacctcgttgatcttggcccctacccgtgaattggtgtctcagatctacgatgaagcccgcaagttcgcttaccgctcctgggttcgcccatgcgtcgtctacggcggtgcggatatcggttctcagctccgccagattgaacgtggctgtgaccttctcgtcgctactcccggccgtcttgtcgatctgatcgaacgtggacgtatctctctctgcaatatcaagtacctcgtccttgatgaggccgatcgcatgttggacatgggtttcgagccccagattcgccgcatcgtcgagggagaggatatgccacctgtcaacggacgtcagaccctcatgttttcggctacattccctcgtgacatccagatgctcgcccgcgacttcttgaaggactatgtgttcttgtctgtcggtcgtgtcggatccacctcggagaacatcacccaaaaggtcgaatacgtcgaagacgccgacaagcgctccgttctgcttgatatcctccacacccatggaactggactcactctcattttcgtcgagaccaagcgcatggctgattctctatctgagttccttatcaaccagaatttccctgcaactgctatccacggtgaccgcactcaacgtgagcgtgagcgggctcttgaatacttccgcaacggccgctgccctatcctcgttgccactgctgttgctgctcgtggtctcgatatccctaatgttactcacgtcgtcaactacgatctccccaccgacatcgatgactatgtccatcgtatcggccgtactggtcgtgctggtaacaccggtctgtccacagctttcttcaaccgtggcaaccgcggtgtcgtccgtgacttgatcgaattactcaaagaagctcaccaggaagtcccggccttcttggaaaatattgctcgtgagggcagcggatacggcggccgtggcggcggtcgtggtggtggaagaggccgtggtgccaatgccactcgtgatatgcgtcgcatgggcggtggcggtcctccaatgagtggtactccatcctacagcggtggttatggtggtggcgccaacaactatggtggaagctatagcagtgctccatcttacggcggatacggcggtggctacggtggaggcagctacggcaacccatctggtcccaccgggccatcttcttggtggtaa

SEQ ID NO: 3553 - protein, 659 aa, Coccidioides immitis
MAGLSLEDSQHAPSHATGRAPYIPPHLRGQQRAGPTMPVDGAAPQGRPPMNPGSWGPNGAPPNNWAPRGANNINGAPAWGAAGGGGARFDPNAYGHPGHRGGQSHGGAGSGAARGSGDGQWRDGKHIPGPPNARLERELFGVPNDPSKQHTGINFANYDDIPVEASGHDVPEPVTTFTNPPLDDHLISNIKLATYKTPTPVQKYSIPIVMGGRDLMACAQTGSGKTGGFLFPILSQAFKNGPSAVPTQNANQFSYGRQRKAYPTSLILAPTRELVSQIYDEARKFAYRSWVRPCVVYGGADIGSQLRQIERGCDLLVATPGRLVDLIERGRISLCNIKYLVLDEADRMLDMGFEPQIRRIVEGEDMPPVNGRQTLMFSATFPRDIQMLARDFLKDYVFLSVGRVGSTSENITQKVEYVEDADKRSVLLDILHTHGTGLTLIFVETKRMADSLSEFLINQNFPATAIHGDRTQRERERALEYFRNGRCPILVATAVAARGLDIPNVTHVVNYDLPTDIDDYVHRIGRTGRAGNTGLSTAFFNRGNRGVVRDLIELLKEAHQEVPAFLENIAREGSGYGGRGGGRGGGRGRGANATRDMRRMGGGGPPMSGTPSYSGGYGGGANNYGGSYSSAPSYGGYGGGYGGGSYGNPSGPTGPSSWW

SEQ ID NO: 3554 - DNA, 1914 bp, Cryptococcus neoformans
  CDS (1)..(1914)
atggctgctaccgatgtcaatggactcgcgtcccaaatgaactccgttaaccttaacggtgcctctcagaaacctcagaaacctgcctacgttcctcctcacttgaggaaccgtgccgctccccccgccgctgtccctcctgcggcccccgctgcctacaggccatctcccaccggtctccccactcccgccaccacccctcctaccaggcatattgtgcctgccgccgttgccgaggacgatgtcggtggatggggtgcacaacctcgtgttaggaaaacttttgagcatggtgcccctcccggatttggtagctggaagaatggccagcacgtcgtcggtgctaggaacacgaggatggagaaggaaatgtatggtgaagtgggagacggattgcaccaggccaccggtatcaactttgataagtacgccgatatccccgtcgaagtcagcggtaagggcgtccccgaacctgtgactgaatttaccaacccccctatcaaccccgtccttctcgagaacgtcaagtacgctcgatacgcaacccctacccctgttcaaaagtactccatccctatcgttgccgatggccgtgatcttatggcttgtgcccaaaccggttccggtaaaactggtggtttccttttccccatcctttcagctctcttcacctacggtccttccactcctcccgttgagcaggacactggctacggctacaggaggacaaaaaaggtctaccccaccgcccttgttcttgcccctacccgagaacttgtctctcagattcacgaagaagctcgtaaattcgcctaccgatcttgggttcgacctgctgtcgtttacggtggtgccgacattggctcccaaatgcgtgccctcgaccgaggatgtgaccttctttccgctacccctggtcgtcttgtcgacttgattgagcgaggcaagatcagtcttgctaacgtcaagtacctcgttcttgacgaagccgaccgaatgctcgacatgggtttcgagcctcagattagaagaatcgttgatgaggaagacatgcccggcgtccttgagcgtcagacgctcatgttctccgccaccttccctcgagagatccagaaccttgctcgatctttcctcaaggagtacatcttcttgaccgtcggtcgagtcggttctacttccgaaaacattacccagcgtgttgagtatgtcgatgaccaggacaagcgctctctgcttctcgacttgctccttgccgaacaatctggcggtttgatacttgtctttgtcgagacgaagcgcatggccgacactctctgtgacttcctctgttctcgtcgacacaatgccacctctatccacggtgaccgtacccagcgcgaacgtgaagctgctctctacgcattcaaatccggtcgagcccccattctcgttgctaccgccgtcgcggctcgaggtctcgatattcccaatgtcactcacgtcatcctttacgatcttcccaacgatgttgccgagtacactcaccgtatcggccgaactggtcgtgcaggaaacgtcggaacttcgactgccttcttcaaccgtggaaacaccaacattggtaaagatttgattgagctcctcaaagaggcgaaccaggaagtacctcagtggcttgttgaaatctcctctgagaggagttatggtggtggtggtggtggtgggtacaaaggaagtcgaggacgaagcactggtggcggcggcggtgcgaggttgggcggacgagatatgcgtcaaggtggcggtgggtacggcggtggtggaaggacttctgggtatggtgggggttacggtggtggtggcggtggtgccggatggggtagtggcggtgggttcccacccgcgggtggcgactctggcgcgagctggtggtaa

SEQ ID NO: 3555 - protein, 637 aa, Cryptococcus neoformans
MAATDVNGLASQMNSVNLNGASQKPQKPAYVPPHLRNRAAPPAAVPPAAPAAYRPSPTGLPTPATTPPTRHIVPAAVAEDDVGGWGAQPRVRKTFEHGAPPGFGSWKNGQHVVGARNTRMEKEMYGEVGDGLHQATGINFDKYADIPVEVSGKGVPEPVTEFTNPPINPVLLENVKYARYATPTPVQKYSIPIVADGRDLMACAQTGSGKTGGFLFPILSALFTYGPSTPPVEQDTGYGYRRTKKVYPTALVLAPTRELVSQIHEEARKFAYRSWVRPAVVYGGADIGSQMRALDRGCDLLSATPGRLVDLIERGKISLANVKYLVLDEADRMLDMGFEPQIRRIVDEEDMPGVLERQTLMFSATFPREIQNLARSFLKEYIFLTVGRVGSTSENITQRVEYVDDQDKRSLLLDLLLAEQSGGLILVFVETKRMADTLCDFLCSRRHNATSIHGDRTQREREAALYAFKSGRAPILVATAVAARGLDIPNVTHVILYDLPNDVAEYTHRIGRTGRAGNVGTSTAFFNRGNTNIGKDLIELLKEANQEVPQWLVEISSERSYGGGGGGGYKGSRGRSTGGGGGARLGGRDMRQGGGGYGGGGRTSGYGGGYGGGGGGAGWGSGGGFPPAGGDSGASWW

SEQ ID NO: 3556 - DNA, 1893 bp, Debaryomyces hansenii
  CDS (1)..(1893)
atggcagatattactcaacaaatgaacaacctttcagttgaacaaggttcgcaaggaaacggttcgtcccgctcgcagtatgttccacctcatcttcgtaacagaccatcaggcggcaatggatcttttggcggcaaccgtcgtggtgggtttaataacaactcttttggaggatttgataacaaccgccgtggaggatataataataactcgtttggaggatataataacaaccgtcgtggaggattcaacaacgcacgcgggtcaggcagatataatacgcctaagccaggtgttggtagatgggtcgatggtaagcacgaaccagcagagaaaaacgagagactcgaaaaggaattatatgggattgacgaagagccaaccacgcaatcttccggtattaatttcgacaactacgatgacattccagttgaggcatcaggtgaaggagttccagaacctattactgctttcacagcaccaccattggacccattgttggtggaaaacgtcaagttatccagattcacaaagcctactccagtgcaaaagtactcggtgcctattgttgctgccggaagagatttgatggcatgtgcccaaactggttccggtaagactggtggtttcttgttcccagtgttatctgaatcgtacatgaacggaccagctgaggttccagaaactgctggcgccttctcctcgcacaaggtttaccctactgcgttggtgatggctccaaccagagaattggtgtcgcaaattttcgacgaagccaagaagttcgcctacagatcgtgggtgcgcccaagcgtcgtctacggtggtgctgatattggtggccaaatcagaaacttggaaagaggatgtgacttgttagtcgctactccaggtcgtcttaaggacttgttggaaagaggccgtgtatccttggctagcattaaatacttagtgttagatgaagctgatagaatgttggatatgggtttcgaaccacaaatcagacacattgtccaagaatgtgacatgccaggtgttgaagacagacaaaccttgatgttttcagccaccttcccaaaggaaattcaatttttggcccgtgatttcttaaaagaatatatcttcttatctgttggtcgtgttggttctacctccgaaaacattacccaaaagatcttatacgtcgaagacgaagaaaagaagtctgtgttattggacttattatctgcaaacgacaacggtttaacaatcattttcacagaaaccaagagaatggctgataacttggccgacttcttatacgaccaaggtttcccagccactgctatccatggtgacagatcacaatacgaaagagaaaaggctttggctgcgttcaagactggtactgctccaatcttagtcgccactgcagttgccgccagagggttagatattccaaacgtttcccatattgtcaactatgatttaccaagtgatattgatgattacgttcatagaatcggtcgtactggtcgtgccggtaacattggtattgctaccgctttcttcaacagaaataacaagaacattgtcaagggcttagttgatttattgactgaagctaaccaagaaattcctgatttcttaaacaagattgctagagaatcagcctttggtggaaagtccatgcgtggcggtagttctcgtggcggtagaggaggagctaccagagatttcagaaagcaaggtggcagctacggtggtggtgccagctcttctaactggggcggaagcagcagcagcggcggtggctggggttcttcaaacaacggcggttattctggatacagtggccgtagtaacggttcatcaagttacggtaacccatccgccagtaactcctggtggtaa

SEQ ID NO: 3557 - protein, 630 aa, Debaryomyces hansenii
MADITQQMNNLSVEQGSQGNGSSRSQYVPPHLRNRPSGGNGSFGGNRRGGFNNNSFGGFDNNRRGGYNNNSFGGYNNNRRGGFNNARGSGRYNTPKPGVGRWVDGKHEPAEKNERLEKELYGIDEEPTTQSSGINFDNYDDIPVEASGEGVPEPITAFTAPPLDPLLVENVKLSRFTKPTPVQKYSVPIVAAGRDLMACAQTGSGKTGGFLFPVLSESYMNGPAEVPETAGAFSSHKVYPTALVMAPTRELVSQIFDEAKKFAYRSWVRPSVVYGGADIGGQIRNLERGCDLLVATPGRLKDLLERGRVSLASIKYLVLDEADRMLDMGFEPQIRHIVQECDMPGVEDRQTLMFSATFPKEIQFLARDFLKEYIFLSVGRVGSTSENITQKILYVEDEEKKSVLLDLLSANDNGLTIIFTETKRMADNLADFLYDQGFPATAIHGDRSQYEREKALAAFKTGTAPILVATAVAARGLDIPNVSHIVNYDLPSDIDDYVHRIGRTGRAGNIGIATAFFNRNNKNIVKGLVDLLTEANQEIPDFLNKIARESAFGGKSMRGGSSRGGRGGATRDFRKQGGSYGGGASSSNWGGSSSSGGGWGSSNNGGYSGYSGRSNGSSSYGNPSASNSWW

SEQ ID NO: 3558 - DNA, 2028 bp, Gibberella zeae
  CDS (1)..(2028)
atggctgatcagatcaatatgggtggcctctccctcaacgaaggcggtcatcaaggccctccccagggtcgatcctacattcctcctcacatgcgtggccgcggtggtcctccccccgctggtccccaagctggtggtcctcccgttatgaacggtggtcctcctgctgctgctcccggtcctaacggcatcggcaacagtgcctgggctaaccaaaactacggcgcccgccaaaacaactggagcaacgatgttcctacctaccagggcaacaacaaccgccgaggcggctggggcggtcgaggtggtggctacagcggtggcggcaacttcgacggtcactctggtggtggtggcgctcccactgcccgcggatctggtgatggacaatggcgcgatggaaagcacatccccggcccggccaacccccgtgtcgagcgcgagcttttcggtgttactgccgaggacccttccaagcaacacactggtatcaacttcgagaagtacgacgacatccctgttgaggcttccggtacagacgttcccgagcctgttcaccagttcaccacacctcctctggacgaacacttgtgccgcaacattgagctcgctcactacaaggtccctacacccgttcagaagtactcgatccctatcgttagcggcggtcgtgatctgatggcttgtgcccagaccggttccggaaagactggtggtttcttgttccctatcctctctcaggctttcatcaacggaccttctgccgtgcccgctaatgccgccggtcagtttggtcgccagcgcaaggcttaccccacctctttgattcttgcccctacccgtgagcttgtgtctcagatctttgacgagtcccgcaagttcgcctaccgttcttgggtgcgaccttgtgtcgtttacggtggtgccgacattggctctcagctccgacagatcgagcgtggctgtgatctgcttgtcgctactcccggtcgattggtggacctcatagagcgaggtcgcatctccctccagaacatcaagtacctcgtgctcgatgaggccgatcgcatgctggacatgggtttcgagccccagattcgccgcattgtcgaaggcgaagacatgccccaggttcaggaccgccagaccctcatgttctcagccaccttcccccgcgacatccagatgcttgcccgcgatttcctcaaggactatatcttcctttccgtcggtcgtgtcggttccacctctgagaacattactcagaaggttgagtacgtcgaggatgttgacaagcgatccgtccttctggacattctccactcccacgccaacggtctcaccctaatctttgttgagaccaagcgcatggctgattcgctctccgacttcctcatcaaccagaacttccctgctacctccattcacggtgaccgtactcagcgtgagcgtgagcgtgctctcgagttcttccgtaacggtcgatgccccatcctggttgctactgctgttgccgctcgaggtctggatatccctcacgtcactcacgtcatcaactacgatctccctaccgatgtcgacgactacgtccatcgtattggtcgtactggtcgtgccggaaacactggtattgccactgcattcttcaaccgtggcaaccgcggaattgttcgtgagcttatggacttgctcaaggaagctaaccaagaggtccctgctttcctcgagaccatcgcccgtgagtcttccttcggtggaggaggccgtggtggtcgctcccgtggcggcggtggtcgcggtggtgccactcgtgatttccgaaagtttggcggcggcggcttcggtggtaacaacaacggcggcggtggtggcttcaacaacgctggatctcagggtgctggcttcagcgctggtggtggtggtggcgctggctacggcggaggtgctggttacggtggcggagctggctatggcggcggtggttacggcaaccccagcggccctggtgctcagtcgtcttggtggtaa

SEQ ID NO: 3559 - protein, 675 aa, Gibberella zeae
MADQINMGGLSLNEGGHQGPPQGRSYIPPHMRGRGGPPPAGPQAGGPPVMNGGPPAAAPGPNGIGNSAWANQNYGARQNNWSNDVPTYQGNNNRRGGWGGRGGGYSGGGNFDGHSGGGGAPTARGSGDGQWRDGKHIPGPANPRVERELFGVTAEDPSKQHTGINFEKYDDIPVEASGTDVPEPVHQFTTPPLDEHLCRNIELAHYKVPTPVQKYSIPIVSGGRDLMACAQTGSGKTGGFLFPILSQAFINGPSAVPANAAGQFGRQRKAYPTSLILAPTRELVSQIFDESRKFAYRSWVRPCVVYGGADIGSQLRQIERGCDLLVATPGRLVDLIERGRISLQNIKYLVLDEADRMLDMGFEPQIRRIVEGEDMPQVQDRQTLMFSATFPRDIQMLARDFLKDYIFLSVGRVGSTSENITQKVEYVEDVDKRSVLLDILHSHANGLTLIFVETKRMADSLSDFLINQNFPATSIHGDRTQRERERALEFFRNGRCPILVATAVAARGLDIPHVTHVINYDLPTDVDDYVHRIGRTGRAGNTGIATAFFNRGNRGIVRELMDLLKEANQEVPAFLETIARESSFGGGGRGGRSRGGGGRGGATRDFRKFGGGGFGGNNNGGGGGFNNAGSQGAGFSAGGGGGAGYGGGAGYGGGAGYGGGGYGNPSGPGAQSSWW

SEQ ID NO: 3560 - DNA, 1884 bp, Kluyveromyces lactis
  CDS (1)..(1884)
atgtctgatattgcggaaaacatgtctaatttgtctgttcaggacaatgattctggtgcaacttcaggtgacagcagacgttcttatgttcctcctcatgtgagaggccaacaaagaagtggtagcggtaactatcgtggtcgttctgataacttcggtggtaacgagagatccttctttggtaacgaaagaagaggcggtggatacagcagaggcggtagaggttccgtcaactggggtggttccaactggggtggcagaaacgacagtagaggttctggcggttacggtggtggtaactcatctggtagatggatcgacggtaagcacgtcccagctgccaagaacgctaacttggaattagagttgttcggtgttgctgaggacaagagtttccaatcctctggtatcaacttcgataactacgacgatattccagtcgaagcctctggtaatgatgttccagaaccaatcagtgaattccactctcctccattggatcctttgttattggacaatattaagttggccagattcaccaagccaactccagttcaaaaatactctgttccaatcgtcgctgctggtagagatttaatggcttgtgctcaaactggttccggtaagactggtggtttcttgttcccagttctgtctgaatcattctccagtggtccagcctcaaccccagaagctgccggtaactcttacatcaagaaggtttacccaaccgccgtgatcttggccccaaccagagaattggctactcaaatttacgatgaagctaaaaagttcacttacagatcgtgggttaaacctatggtcgtttacggtggtgccagtatcgacaaccaaattaaacaaatgagatacggttgcaacttgttggttgccactccaggtcgtttgactgatttattggaacgtcgttacatctctcttgccaacgttaagtacttggttttggatgaagctgatagaatgttggatatgggtttcgaacctcaaatcaggagaattgtggaaggttctgacatgccatctgttgataacagacaaacattaatgttttccgccactttcccaagtgaaatccaacatttggcttccgatttcttgaaggactacgttttcttgtccgttggtagagttggttctacatccgaaaatattacccaaaagattctttacgttgaagacttcgacaagaacgatactttgttggacttgttggccgctagtaatgaaggtttgaccttgattttcgttgaaactaagagagccgcagattccttgactgacttcttgatcatggaaggtttcaaggctactgctatccatggtgaccgtacacaaggtgaacgtgaacgtgcgttgtctgctttcaagaccggtagagctactatcttggttgctaccgctgtcgctgctagaggtttggatattccaaacgttactcatgttatcaactttgacttgccaaatgatatcgatgattacgtccacagaattggtagaactggtcgtgccggtaacaccggtgttgctactaccttctttaaccgtggtaacaagaatgtcgctaaggaattggttagtttgttgagtgaagctaatcaagaggttccatccttcttgaccaccatcatgagagaagcttctagcggcagaggcggtgccagaggtggccgtggtggttacaaccgtggcaacagcaccagagatttccgtcgcggtggcgccccctctggtggcttcagcagcggtggcggttccagcggcggctggggtaacggtggcggctccagcggtggctggggtaactcttccggtaactggggtaactcttctaactcctcaaactctaactctggttggtggtaa

SEQ ID NO: 3561 - protein, 627 aa, Kluyveromyces lactis
MSDIAENMSNLSVQDNDSGATSGDSRRSYVPPHVRGQQRSGSGNYRGRSDNFGGNERSFFGNERRGGGYSRGGRGSVNWGGSNWGGRNDSRGSGGYGGGNSSGRWIDGKHVPAAKNANLELELFGVAEDKSFQSSGINFDNYDDIPVEASGNDVPEPISEFHSPPLDPLLLDNIKLARFTKPTPVQKYSVPIVAAGRDLMACAQTGSGKTGGFLFPVLSESFSSGPASTPEAAGNSYIKKVYPTAVILAPTRELATQIYDEAKKFTYRSWVKPMVVYGGASIDNQIKQMRYGCNLLVATPGRLTDLLERRYISLANVKYLVLDEADRMLDMGFEPQIRRIVEGSDMPSVDNRQTLMFSATFPSEIQHLASDFLKDYVFLSVGRVGSTSENITQKILYVEDFDKNDTLLDLLAASNEGLTLIFVETKRAADSLTDFLIMEGFKATAIHGDRTQGERERALSAFKTGRATILVATAVAARGLDIPNVTHVINFDLPNDIDDYVHRIGRTGRAGNTGVATTFFNRGNKNVAKELVSLLSEANQEVPSFLTTIMREASSGRGGARGGRGGYNRGNSTRDFRRGGAPSGGFSSGGGSSGGWGNGGGSSGGWGNSSGNWGNSSNSSNSNSGWW

SEQ ID NO: 3562 - DNA, 2067 bp, Neurospora crassa
  CDS (1)..(2067)
atggcggatcaactcagcagcggcatgggcaacctgtccatcgaccagcagcccccctcgggcccccagatgggaggccagggccagatgaggcgctcttacattcctcctcaccttcgcggcaagatgggcgacgctgctcctcccatggccggccccaacggtcttaacaacagcgcttgggctggtaacaacaactatgacgctcgtggcccaggcggcggcggcaactggcccgctcctggtggtccccctggccctggctttgagggccagcagggcgctggctggggcggccctcgtcctcagggcggcttcaaccccaacgcgtaccgcggcaacgctggcgctggcgccggtgccggtgccggtggtggtggcggcagcttcagcaaccgtggctctggcgatggtcagtggcgcgatggcaagcacattcctggccctgccaacccccgcgtcgagcgtgagctcttcggtacccccgacgacccgtccaagcagcacactggtatcaacttcgagaagtacgatgacattcccgttgaggcttccggtgacaacgtgcccgagcccgttcttaccttcagcaaccctcctctggacaaccacctcatttccaacattcagctcgcccgctacaatgtccccactccggttcagaagtactccatccccatcgtcatgggtggccgtgatctgatggcttgcgcccagactggttccggcaagactggtggtttcctcttccccattctttctcagtctttccacactggtccgtctccgattcccgccagcgctgctggtgcctatggtcgtcagcgcaaggcttaccccaccgccttgatccttgctcccacccgtgagttggtctctcagatctacgacgaggctcgcaagttcgcctaccgttcgtgggtccgtccttgcgtcgtctacggtggtgccgatatcggctcccagcttcgccagatcgagcgcggctgcgatcttcttgttgctactcctggtcgtcttgtcgatctcatcgagcgtggccgtatctccctctgcaacatcaagtacctcgtccttgatgaggctgatcgcatgcttgacatgggtttcgagcctcaaattcgccgtatcgttgagggtgaggacatgcccaaggtcaatgaccgccagactctcatgttctcggccactttcccccgcgacatccagatcctcgcccgcgatttcctcaaggactacatcttcctgtccgttggtcgtgttggttccacctctgagaacatcacccagaaggtcgagtacgttgaggatattgacaagcgttccgtccttctcgacattctccacacccacgccggaggtctcacccttattttcgttgagaccaagcgcatggccgattcgctgtccgacttcttgatcaaccagaacttccccgctacttccattcacggtgaccgcactcagcgtgagcgtgagcgcgctttggagatgttccgcaacggtcgctgccctattctggttgccactgctgtcgctgctcgtggcttggatattcccaacgtcacccacgtcatcaactacgatctccctaccgacattgatgactacgttcaccgtatcggtcgtaccggtcgtgccggaaacactggtattgccaccgctttcttcaaccgtggcaaccgtggtgtcgtccgcgagcttcttgaactcctcaaggaggctaaccaggaggttcctgccttccttgagaccattgcccgcgagtcctcgttcggcggtggtcgtggcggtcgtggtggtggtcgtggcggcggtcgcggtcgcactcaaactgccgattaccgcaagttcggcggttccggtggtggcggcttcggcggtggcttcggcggtgctcccgctagcggcggctacggcggcggcggctatggtggtggtggtccccccgccggtggctacggcggtggtggtggtgctggctacggcggcggcggtggcggcggcggctatggtggcggcggttacggcaaccctggcggtgccggtggccagtcttggtggtaa

SEQ ID NO: 3563 - protein, 688 aa, Neurospora crassa
MADQLSSGMGNLSIDQQPPSGPQMGGQGQMRRSYIPPHLRGKMGDAAPPMAGPNGLNNSAWAGNNNYDARGPGGGGNWPAPGGPPGPGFEGQQGAGWGGPRPQGGFNPNAYRGNAGAGAGAGAGGGGGSFSNRGSGDGQWRDGKHIPGPANPRVERELFGTPDDPSKQHTGINFEKYDDIPVEASGDNVPEPVLTFSNPPLDNHLISNIQLARYNVPTPVQKYSIPIVMGGRDLMACAQTGSGKTGGFLFPILSQSFHTGPSPIPASAAGAYGRQRKAYPTALILAPTRELVSQIYDEARKFAYRSWVRPCVVYGGADIGSQLRQIERGCDLLVATPGRLVDLIERGRISLCNIKYLVLDEADRMLDMGFEPQIRRIVEGEDMPKVNDRQTLMFSATFPRDIQILARDFLKDYIFLSVGRVGSTSENITQKVEYVEDIDKRSVLLDILHTHAGGLTLIFVETKRMADSLSDFLINQNFPATSIHGDRTQRERERALEMFRNGRCPILVATAVAARGLDIPNVTHVINYDLPTDIDDYVHRIGRTGRAGNTGIATAFFNRGNRGVVRELLELLKEANQEVPAFLETIARESSFGGGRGGRGGGRGGGRGRTQTADYRKFGGSGGGGFGGGFGGAPASGGYGGGGYGGGGPPAGGYGGGGGAGYGGGGGGGGYGGGGYGNPGGAGGQSWW

SEQ ID NO: 3564 - DNA, 2001 bp, Pichia guilliermondii
  CDS (88)..(2001)
atgtcacgcgctgtgatcacagatcacgtgcgaatttcttttttcacctataaaaaccagcggcgcacaaattttttctcacctacaatgagtgatatcacccataaaatgaacgaactttcggttggggacggagccaatagggcttctggggccgctgcgggcggcgaaaccccctcgggctcttcgggacgctcccagtacgtacctcctcatctcagaaatcgcccaaatggtggttcgactccatcgaggcgtggcgattttggttccagaagcaacggatttggcagtggaagaagaggcgatttcaattcttcgggcttccagtttggatctggtcgcagaggcaactctggctttggcggtcgcggtggttttggcggcggcagtggcagatacaactcgcctaaaccgggcgttggtcagtgggtcgatggtaagcacgagccagccgctcccaatgagagattggagaaggagttgtttggtgttgctgaagaccccagtgtccaatcatctggaatcaactttgacaactatgatgacattcctgtggaagccaccggtgatggagtcccagagccaattctggcattcactgctcctcctttggacccattgatcgtagagaacattaagctctcgcgtttcactaaacctacccccgtgcaaaagtactcggttcccatcgtggccagcggtcgtgatttgatggcttgtgcccagaccggttccggtaagactggtggattcttattcccagtgttgtctgaatcgtacatgaacggtccagatgcagttcccgagagccagggcgccttctcgtcccacaaggtccacccaactgcgttggttatggcccctacaagagagttggtgtcgcaaattttcgaagaggctaagaaattctcctacagatcatgggttcgtccctgtgttgtctatggtggtgctgatatcggtactcaaatccgtaacttggatcgtggatgtgacttgttagttgctactcctggtcgtcttaaggatttgcttgaaagaggccgtgtatccctttccaacatcaaatacttggttttggatgaagccgatcgtatgttggatatgggtttcgagcctcaaatcagacacattgttcaagaatgtgacatgcctggcgttgaaagcagacaaaccttgatgttttccgccacgttccctcgtgacatccaaatgttggctcgtgacttcttgaaagattacatattcctctccgtcggtagagttggatctacctccgagaacatcacccaaaaggtgttatacgtggaggacgacgaaaagaaatcggtattgttggacttgctttccgccaacgataacggattgaccattatcttcaccgaaacaaagagaatggccgataacttggctgacttcttgtacgaccaaggtttcccggccactgctatccacggtgacagatcgcaatatgaaagagaaaaggctttggctgctttcaagagcggtaccgccccaattttagttgcaactgcggttgcagctagaggtttggatattcctaacgtgtcccacgttgttaactacgacttgcctggtgacattgacgactatgtccatcgtatcggtcgtaccggtcgtgctggtaatgtcggtattgccactgcctttttcaacagaaacaacagaaacgttgttaagggtatgatcgagttgctttctgaggccaaccaagaagttcctgactttcttcaaaaaatttcaagagagggttcgtacggaagtaaaggtggctttggaagcatgcgtggcggagctggtcgcggtgtcttaggaggcggtagcagaggaggcagccgtgacttcagaagaagtggcggaggctttggatcgtctggatcttccggttctaactggggatcttctagttccggcaacggaggataccgtagcagctccaactacggtaacccatcgtcaggtaactcctggtggtaa

SEQ ID NO: 3565 - protein, 637 aa, Pichia guilliermondii
MSDITHKMNELSVGDGANRASGAAAGGETPSGSSGRSQYVPPHLRNRPNGGSTPSRRGDFGSRSNGFGSGRRGDFNSSGFQFGSGRRGNSGFGGRGGFGGGSGRYNSPKPGVGQWVDGKHEPAAPNERLEKELFGVAEDPSVQSSGINFDNYDDIPVEATGDGVPEPILAFTAPPLDPLIVENIKLSRFTKPTPVQKYSVPIVASGRDLMACAQTGSGKTGGFLFPVLSESYMNGPDAVPESQGAFSSHKVHPTALVMAPTRELVSQIFEEAKKFSYRSWVRPCVVYGGADIGTQIRNLDRGCDLLVATPGRLKDLLERGRVSLSNIKYLVLDEADRMLDMGFEPQIRHIVQECDMPGVESRQTLMFSATFPRDIQMLARDFLKDYIFLSVGRVGSTSENITQKVLYVEDDEKKSVLLDLLSANDNGLTIIFTETKRMADNLADFLYDQGFPATAIHGDRSQYEREKALAAFKSGTAPILVATAVAARGLDIPNVSHVVNYDLPGDIDDYVHRIGRTGRAGNVGIATAFFNRNNRNVVKGMIELLSEANQEVPDFLQKISREGSYGSKGGFGSMRGGAGRGVLGGGSRGGSRDFRRSGGGFGSSGSSGSNWGSSSSGNGGYRSSSNYGNPSSGNSWW

SEQ ID NO: 3566 - DNA, 1911 bp, Schizosaccharomyces pombe
  CDS (1)..(1911)
atgagcgacaatgtacagcaacaagtagattcagttggttctgtgactgaaaaattgcaaaaaacaaacatcagcagacctaggaagtatattcctccttttgctagggataagccaagcgctggcgcagctccagctgttggcgacgatgagtctgtctcatctcgtggctcttctaggtctcaaactcctagtgagttttcctctaactatggaggtcgccgtgaatacaatcgtggcggtcattatggtggtggcgagggccgccaaaataattaccgtggcggtcgtgaaggtggttacagcaacggcggtggttatcgtaacaaccgtggatttggccaatggagagatggtcaacacgttatcggagcccgtaacactcttttggagcgtcaattatttggtgccgttgctgatggtaccaaagtttcaactggtattaacttcgaaaagtatgatgacatccctgttgaagtttccggtggagatatcgagcctgttaatgagttcacttctcctcctttgaactctcatcttcttcaaaacattaaactctctggctacactcagcccaccccagttcaaaagaactccattcctattgtcacatccggacgtgatttgatggcctgtgcccaaaccggttccggtaagactgctggtttcttattccctattctttctcttgctttcgataaaggacctgccgctgttcctgttgatcaggatgccggtatgggttatcgtcctcgcaaagcctatcctaccacccttattttggctcccactcgtgaattagtttgtcaaattcatgaggaatctcgtaaattctgttaccgttcttgggtgcgtccctgtgctgtttacggtggtgccgatattcgtgctcaaatccgccaaattgaccaaggttgcgacttgctttctgctactcctggtcgtttggttgatttaatcgatcgtggtcgtatttctttggccaacattaagtttttggtgttggatgaagctgatcgtatgctggatatgggtttcgagcctcaaattcgtcacattgtggaaggtgctgacatgacaagcgttgaagaacgtcaaactctcatgttttctgccactttcccccgtgatatccaacttttagctcgtgactttttaaaggattatgtcttcttgagtgttggtcgtgtcggttccacttcggagaatattactcaaaaggtcgtacacgttgaagattctgaaaagcgtagttacttgcttgatattcttcacaccttacctcctgagggtcttaccttgatctttgtagagactaaacgcatggctgacacacttaccgactatttgttgaatagcaacttccccgcaacaagcattcacggtgaccgtacccaacgtgagcgtgagcgcgctttggaattgttccgctctggccgtacttccattatggtcgctactgccgtcgccagtcgtggtttagatattcccaatgtcacgcatgttattaactacgatttacctactgacattgatgactatgtgcatagaattggtcgtaccggtcgtgctggtaacactggtcaagctgttgcgtttttcaaccgtaacaacaagggtatcgctaaggaattgattgagttgttgcaagaggccaatcaagagtgccccagctttttgatcgccatggctcgtgaaagcagctttggtggtaatggacgtggtggccgttacagtggtcgtggtggtcgtggaggcaatgcttatggtgctcgcgacttccgtcgccctactaatagtagtagtggttatagctctggccctagctactctggatacggtggctttgaaagccgtactcctcatcatggtaacacttacaacagtggtagtgctcaatcctggtggtaa

SEQ ID NO: 3567 - protein, 636 aa, Schizosaccharomyces pombe
MSDNVQQQVDSVGSVTEKLQKTNISRPRKYIPPFARDKPSAGAAPAVGDDESVSSRGSSRSQTPSEFSSNYGGRREYNRGGHYGGGEGRQNNYRGGREGGYSNGGGYRNNRGFGQWRDGQHVIGARNTLLERQLFGAVADGTKVSTGINFEKYDDIPVEVSGGDIEPVNEFTSPPLNSHLLQNIKLSGYTQPTPVQKNSIPIVTSGRDLMACAQTGSGKTAGFLFPILSLAFDKGPAAVPVDQDAGMGYRPRKAYPTTLILAPTRELVCQIHEESRKFCYRSWVRPCAVYGGADIRAQIRQIDQGCDLLSATPGRLVDLIDRGRISLANIKFLVLDEADRMLDMGFEPQIRHIVEGADMTSVEERQTLMFSATFPRDIQLLARDFLKDYVFLSVGRVGSTSENITQKVVHVEDSEKRSYLLDILHTLPPEGLTLIFVETKRMADTLTDYLLNSNFPATSIHGDRTQRERERALELFRSGRTSIMVATAVASRGLDIPNVTHVINYDLPTDIDDYVHRIGRTGRAGNTGQAVAFFNRNNKGIAKELIELLQEANQECPSFLIAMARESSFGGNGRGGRYSGRGGRGGNAYGARDFRRPTNSSSGYSSGPSYSGYGGFESRTPHHGNTYNSGSAQSWW

SEQ ID NO: 3568 - DNA, 2019 bp, Ustilago maydis
  CDS (1)..(2019)
atgacttacgaaaacaacacacatcagcaaaacggtgctggcaccgccgacattgagtcgaggtttgccaacatgtcggtccagaatggcgctgcaggcggtgctcctcgaaaggcctatgttccacctcaccttcgtagccagcagcagcccgcttcgctcaactcctctgccgcttccttcagcccccgcgctcccgccgcctttaatggaaatggcaacagcaacggcaacggcaacggccctgccgctcccgctgcacctgccgccttccagagcttcaaccgtggcgctcctcgcggtggcgccggtggatgggacgctccctcctctggcggttacggcggcgctcgcaatggcggcggttatggcggcggcgctcgcaacgatggattcggccagtggaaagacggcaagcacgtgcctggcccgcacaaccctcgcctccagaaggaacttttcggtgaggagggcgacggtcttcaccagagcatgggtatcaactttgacaagtatggtgacattcccgtcgaggctactggtcgcgatgtgcccgagcctgtcactaccttcacctctcctcctatcgatgctcaccttctcgaaaacatcaagctcgctcgctacaccaaccccacccctgttcagaagtactcgatccccatcattaagcttggtcgtgacttgatgggctgtgcccagaccggttctggtaagacgggtggtttcctcttccccattctctcggctctcttcacccacggccctcctcctccctctgccgccgagatggctcagggcggttacaatcgcagaaaggcctaccccagcaccctcatcctggctcccactcgcgagcttgtctcgcagattcacgacgaggcccgcaagttcacttaccgctcgtgggtgaagcctgcagtcgtctacggtggcgccgacattgtcactcagctccgtcagatcgaacgtggatgtgaccttctctctgctacccccggtcgtctcgtcgacctgatggagcgtggtcgaatcagccttagcaacgtccgtttcctggtcctcgacgaggctgaccgcatgctagacatgggtttcgagcctcagattcgacgcatcgtcgaaggcgaggacatgcctggtgtcatggatcgccagacgctcatgttctcagccaccttcccccgcgacatccagctgctcgctaaggatttcctcaaggagtacgtcttcttgtccgttggccgtgtcggttccacttcggagaacatcacccagaagatcgaatacgtcgaagatgatgacaagcgctcggttctccttgacgtcctcgcctcgatgcccagcggtggtctcactcttatctttgtcgaaaccaagcgcatggccgacatgctcagcgatttcctcctccgctccaagatcggcgccacctcgatccacggtgaccgtacccagcgcgagcgcgagcgtgctctcgagctcttcagatcgggcaagacgcccatcatggtcgccaccgccgtcgccgcccgcggtctcgatattcccaacgttacccacgtcgtcaactacgatcttccctcggacgtcgacgactatgttcaccgcatcggtcgtaccggtcgtgccggtaacgtaggtcacgccaccgccttcttcaaccgaggcaacaagaacatcgtgcgcgatcttatcgaattgctcaaggaggccaaccaggaggtgcctcagtggctcgaggccgttgcccgcgagagcatgtttggtgctggtggcggaagccgtggtggtcgcggtcgcggccgtggtcgcggaggtgcctcttcgtttggcaaccgtgacgcccgtaccatgaacggaccctcgtccggcggcggacgtggtttcggtggtggctacggtggcggtatgggcggtggtctcggcggcagctacggcgccggcgctgctgcctacggtggccctccccctgcttccaacggcggcagctacggcggcaactcgtcatggtggtaa

SEQ ID NO: 3569 - protein, 672 aa, Ustilago maydis
MTYENNTHQQNGAGTADIESRFANMSVQNGAAGGAPRKAYVPPHLRSQQQPASLNSSAASFSPRAPAAFNGNGNSNGNGNGPAAPAAPAAFQSFNRGAPRGGAGGWDAPSSGGYGGARNGGGYGGGARNDGFGQWKDGKHVPGPHNPRLQKELFGEEGDGLHQSMGINFDKYGDIPVEATGRDVPEPVTTFTSPPIDAHLLENIKLARYTNPTPVQKYSIPIIKLGRDLMGCAQTGSGKTGGFLFPILSALFTHGPPPPSAAEMAQGGYNRRKAYPSTLILAPTRELVSQIHDEARKFTYRSWVKPAVVYGGADIVTQLRQIERGCDLLSATPGRLVDLMERGRISLSNVRFLVLDEADRMLDMGFEPQIRRIVEGEDMPGVMDRQTLMFSATFPRDIQLLAKDFLKEYVFLSVGRVGSTSENITQKIEYVEDDDKRSVLLDVLASMPSGGLTLIFVETKRMADMLSDFLLRSKIGATSIHGDRTQRERERALELFRSGKTPIMVATAVAARGLDIPNVTHVVNYDLPSDVDDYVHRIGRTGRAGNVGHATAFFNRGNKNIVRDLIELLKEANQEVPQWLEAVARESMFGAGGGSRGGRGRGRGRGGASSFGNRDARTMNGPSSGGGRGFGGGYGGGMGGGLGGSYGAGAAAYGGPPPASNGGSYGGNSSWW

SEQ ID NO: 3570 - DNA, 1857 bp, Yarrowia lipolytica
  CDS (1)..(1857)
atgtctgaactcgaaaatggtgtcaagtcgttgaatctgaacaacgacacccccgctgctccccgaagcaagtacgtgcccccccaccgggccaaggctgccgccaccggtaacggaacctccaactccgccccctccaacgaccgacgagaggctggccgaaacctgtactcccagtactccaactccttccagaacaactcccgaggctcctacgggggaggctacggaggtggtcgaggcggtcgaggcggtcgatcttggggcaacgacggtggctaccgaggtggcttccgagacccctcccagggctctttcgtggatggtaagcatgtccccggcccccggaacgagcgaaccgaggttgaaatcttcggcgttgctaacgacgagcgattccagtccaccggtatcaactttgataactacgacgagattcccgtcgaggccaccggtaacgacgtgcccgagcccatcaacgctttcacctctcctcccctcgaggagcacctgctgactaacatcaagcttgctcgatacaacaagcccacccccgtccagaagtactctgtccccattgttgctgctggccgagacctgatggcctgtgcccagaccggttctggtaagaccggaggattcctcttccccgttctgtcccagtccttcttccacggtccctcccccaccccacagcccactggccctcgacacatgcacaagaaggcctaccccactgcccttgtgcttgctcccacccgagagcttgtgtcgcagatctacgacgaggccaagaagttcgcctaccgatcctgggtccgaccttgcgtcgtctacggtggtgccgacattggcgagcagatgcgaaacattgagcgaggctgcgacctccttgttgctgctcccggtcgactcgtcgatctgatcgaccgaggcaaggtctctctggagaacatcaagtaccttgtccttgatgaggccgaccgaatgctcgatatgggtttcgagccccaaatccgagccatcgtccagggctccggcatgcccgacgttaacgagcgacagaccctcatgttctccgccacctttccccggaacatccagatgctggcccgggacttcctcaaggactacatcttcctgtctgtcggccgtgtcggttccacctctgagaacatcacccagaaggtcgagtatgttgaggatggagacaagatctctgctctgctcgacattctctctgccgctggcaagggcctgaccctggtcttcgtcgagaccaagcgaggtgccgattacctctgtgatgttctgcagagcgaggacttccccgccacctccattcacggagaccgatctcagcgagaccgagagcgagctttggaaatgttccgagacggaactacccctattctggtcgccactgccgtcgctgctcgaggcctggatatccccaacgttacccacgttgttaactacgatctccccaccgacattgacgattacgtccaccgaatcggtcgaactggccgagccggaaacaccggtattgccaccgccttcttcaaccgaggcaacaagggtatcgtgcgagagctcatcgatatcctcaaggaggcccaccaggacgttcctcagttcctcgagtccactgcccgagaggcctcttacggaggccgaggcggaggccgtggccgaggtggcttcggtggaggccgatctcgagctacccaggatttccgaaagcagggtggcggctttggctccaacgaccgattcggaggctcctccggcggctcttcttacggtggcggttcctcttacggtaaccagggtggtaacaacaactggtggtaa

SEQ ID NO: 3571 - protein, 618 aa, Yarrowia lipolytica
MSELENGVKSLNLNNDTPAAPRSKYVPPHRAKAAATGNGTSNSAPSNDRREAGRNLYSQYSNSFQNNSRGSYGGGYGGGRGGRGGRSWGNDGGYRGGFRDPSQGSFVDGKHVPGPRNERTEVEIFGVANDERFQSTGINFDNYDEIPVEATGNDVPEPINAFTSPPLEEHLLTNIKLARYNKPTPVQKYSVPIVAAGRDLMACAQTGSGKTGGFLFPVLSQSFFHGPSPTPQPTGPRHMHKKAYPTALVLAPTRELVSQIYDEAKKFAYRSWVRPCVVYGGADIGEQMRNIERGCDLLVAAPGRLVDLIDRGKVSLENIKYLVLDEADRMLDMGFEPQIRAIVQGSGMPDVNERQTLMFSATFPRNIQMLARDFLKDYIFLSVGRVGSTSENITQKVEYVEDGDKISALLDILSAAGKGLTLVFVETKRGADYLCDVLQSEDFPATSIHGDRSQRDRERALEMFRDGTTPILVATAVAARGLDIPNVTHVVNYDLPTDIDDYVHRIGRTGRAGNTGIATAFFNRGNKGIVRELIDILKEAHQDVPQFLESTAREASYGGRGGGRGRGGFGGGRSRATQDFRKQGGGFGSNDRFGGSSGGSSYGGGSSYGNQGGNNNWW

SEQ ID NO: 3572 - DNA, 1815 bp, Saccharomyces cerevisiae
  CDS (1)..(1815)
atggctgaactgagcgaacaagtgcaaaatttaagcatcaacgacaacaacgagaatggttatgttcctcctcacttaagaggaaaaccaagaagtgccagaaataacagtagcaactacaataacaacaacggcggctacaacggtggccgtggcggtggcagcttctttagcaacaaccgtcgtggtggttacggcaacggtggtttcttcggtggaaacaacggtggcagcagatctaacggccgttctggtggtagatggatcgatggcaaacatgtcccagctccaagaaacgaaaaggccgagatcgccatatttggtgtccccgaggatccaaatttccaatcttctggtattaacttcgataactacgatgatattccagtggacgcctctggtaaggatgttcctgaaccaatcacagaatttacctcacctccattggacggattgttattggaaaacatcaaattggcccgtttcaccaagccaacacctgtgcaaaaatactccgtccctatcgttgccaacggcagagatttgatggcctgtgcgcagaccggttctggtaagactggtgggtttttattcccagtgttgtccgaatcatttaagactggaccatctcctcaaccagagtctcaaggctccttttaccaaagaaaggcctacccaactgctgtcattatggctccaactagagagttggccacccaaattttcgatgaagccaagaaatttacttatagatcctgggtcaaggcctgcgtcgtctacggtggttctccaattggtaaccaactaagagaaattgaacgtggttgcgatcttttagtcgctactccaggtcgtttgaatgacttgttggaacgtggtaaaatttctttggccaacgtcaagtatttggttctagatgaagctgatagaatgttggatatgggtttcgaacctcaaattagacatattgtcgaagactgtgatatgactcctgttggtgaaagacaaactctgatgttctcagctacttttcccgctgatatccaacatttggcccgtgatttcttaagtgactacatctttttgtctgttggtagagtcggttctacttcagaaaacattactcaaaaagtcttatacgttgaaaatcaagataagaagtcagccttattggatctattgtctgcatccactgacggtttgactttgatctttgtcgaaactaagagaatggcagatcaattgaccgatttcctgatcatgcaaaactttagagctaccgccattcatggtgaccgtacccaatctgagagagaacgtgccttggccgccttcagatctggtgccgctactttattggttgccacagctgtcgcagctagaggtctagatattccaaacgtcacccacgttatcaactacgatttaccaagtgatgtcgatgattacgtccatagaattggtagaactggtcgtgccggtaacaccggtcttgccactgcctttttcaacagtgaaaacagtaacattgttaaaggtttgcatgaaattttgactgaagctaaccaagaagtcccatcattcttgaaggacgctatgatgagtgctccaggtagcagaagcaacagccgtagaggcggtttcggtcgcaacaacaacagagattaccgtaaggccggaggcgctagcgcaggcggctggggctcttcaagaagcagagataactctttcagaggcggtagtggctggggtagcgattccaagtcttctggctggggtaacagcggtggttcaaacaactcttcttggtggtga

SEQ ID NO: 3573 - protein, 604 aa, Saccharomyces cerevisiae
MAELSEQVQNLSINDNNENGYVPPHLRGKPRSARNNSSNYNNNNGGYNGGRGGGSFFSNNRRGGYGNGGFFGGNNGGSRSNGRSGGRWIDGKHVPAPRNEKAEIAIFGVPEDPNFQSSGINFDNYDDIPVDASGKDVPEPITEFTSPPLDGLLLENIKLARFTKPTPVQKYSVPIVANGRDLMACAQTGSGKTGGFLFPVLSESFKTGPSPQPESQGSFYQRKAYPTAVIMAPTRELATQIFDEAKKFTYRSWVKACVVYGGSPIGNQLREIERGCDLLVATPGRLNDLLERGKISLANVKYLVLDEADRMLDMGFEPQIRHIVEDCDMTPVGERQTLMFSATFPADIQHLARDFLSDYIFLSVGRVGSTSENITQKVLYVENQDKKSALLDLLSASTDGLTLIFVETKRMADQLTDFLIMQNFRATAIHGDRTQSERERALAAFRSGAATLLVATAVAARGLDIPNVTHVINYDLPSDVDDYVHRIGRTGRAGNTGLATAFFNSENSNIVKGLHEILTEANQEVPSFLKDAMMSAPGSRSNSRRGGFGRNNNRDYRKAGGASAGGWGSSRSRDNSFRGGSGWGSDSKSSGWGNSGGSNNSSWW

SEQ ID NO: 3574 - DNA, 1839 bp, Arabidopsis thaliana
  CDS (1)..(1839)
atgagtgcatcatgggcagatgtggctgattcagagaaggccgtttctcagtcaaagcctccttatgttcccccacacctacggaacaggccatcagagcctgttgctgctcctttgccacaaaatgatcatgcagggtatggtggtcaaccagctgggtctcgttgggctcctcctagcagtgggggtggtggtgccagcggcggtggctataggaatgatggagggcgcactggctatggttatggtgctggaggaggaggtggtggtggtggtggctggaacaacagaagtggagggtgggaccgtagggaacgtgaagtaaacccatttggagatgatgctgagttagaaccggtctttacagagcaggagaatactggcattaattttgatgcctatgaagatattccagttgagaccagtgggggagacgtgccccctcctgttaacacatttgctgacatagatcttggggatgcattaaatctgaacatccggaggtgcaagtatgtgaggccaacaccggtacagcgtcatgctattccaatactgcttgcagagagagatttgatggcctgtgcccagactgggtctgggaagactgctgctttttgctttccaataattagtggaatcatgaaagatcagcatgtagaaagaccccgtggttcacgggcggtttacccttttgcagtcatcctctcaccaacaagggaattggcatgccagatacatgatgaagccaaaaaattctcctaccaaactggtgtgaaggttgttgttgcttatggaggaacacccattcaccagcagctcagggaactcgagaggggatgtgatatccttgtggcaactcctggccggttaaatgatttgcttgaaagagctagagtctcaatgcagatgattaggtttttagctctagatgaggcagacaggatgctggacatgggttttgagccacagattagaaagattgttgagcagatggacatgcctccacgtggggtgagacagacaatgctgttcagtgctacatttccaagtcagattcagagacttgcagctgatttcatgtcaaactatatatttttggctgtgggaagagttggttcaagcactgatttaattacccaaagggttgagtttgtccaagagtctgacaagagaagccatctcatggacctgcttcacgcgcaaagagagacccaagacaagcaatcattgacattagtttttgtggagacaaagaggggagctgatactttggaaaattggctgtgcatgaatgagtttccagcaacctccattcatggcgatagaacacaacaggaaagagaagtggcactgaggtccttcaaaactgggaggacacctattttggttgcaacagacgtggcagcacgtggtcttgacattccccacgtggctcatgttgtaaacttcgatctaccaaatgacattgatgactatgtccaccgtatcggacgaacaggacgtgcaggcaaatctggaatagcaactgccttcttcaacgagaacaatgcacaactggctaggtcgcttgctgagctaatgcaagaagccaatcaagaggtccccgagtggctcacacgatatgcttcacgtgcttcatttggtggtggtaagaaacggtctggtggtcggtttggtggccgtgacttcagaagggaaggctcttacagtagaggaggaggcggcggcggcggaggaggcggcagtgattactatggcggaggaggctatggtggtggtggatacggtggtgctccaagcggtgggtatggtgctggagtgaccagtgcttgggattag

SEQ ID NO: 3575 - protein, 612 aa, Arabidopsis thaliana
MSASWADVADSEKAVSQSKPPYVPPHLRNRPSEPVAAPLPQNDHAGYGGQPAGSRWAPPSSGGGGASGGGYRNDGGRTGYGYGAGGGGGGGGGWNNRSGGWDRREREVNPFGDDAELEPVFTEQENTGINFDAYEDIPVETSGGDVPPPVNTFADIDLGDALNLNIRRCKYVRPTPVQRHAIPILLAERDLMACAQTGSGKTAAFCFPIISGIMKDQHVERPRGSRAVYPFAVILSPTRELACQIHDEAKKFSYQTGVKVVVAYGGTPIHQQLRELERGCDILVATPGRLNDLLERARVSMQMIRFLALDEADRMLDMGFEPQIRKIVEQMDMPPRGVRQTMLFSATFPSQIQRLAADFMSNYIFLAVGRVGSSTDLITQRVEFVQESDKRSHLMDLLHAQRETQDKQSLTLVFVETKRGADTLENWLCMNEFPATSIHGDRTQQEREVALRSFKTGRTPILVATDVAARGLDIPHVAHVVNFDLPNDIDDYVHRIGRTGRAGKSGIATAFFNENNAQLARSLAELMQEANQEVPEWLTRYASRASFGGGKKRSGGRFGGRDFRREGSYSRGGGGGGGGGGSDYYGGGGYGGGGYGGAPSGGYGAGVTSAWD

SEQ ID NO: 3576 - DNA, 1860 bp, Arabidopsis thaliana
  CDS (1)..(1860)
atggctgctaccgctgctgcttctgttgtccgttacgcacctgaggatcatactcttcccaagccctggaaaggccttatcgatgatagaactggttacttgtacttttggaatcctgagaccaatgttactcagtacgagaaaccaaccccctctctacctcctaagttttctcccgccgtttctgttagctcttccgttcaggttcaacaaactgatgcctatgctcctcccaaggatgacgataagtactccagaggctctgaacgtgtgtccaggttttctgagggtggcaggagtggaccgccttattcgaacggtgctgctaatggagttggggattctgcttatggtgcagcatctaccagagttcctcttccttcatcagctccagcaagtgaactatcccctgaggcctattcccgccgtcatgaaattactgtcagtgggggccaagtaccaccacctctaatgtcctttgaagctactggttttccacctgagcttctgcgggaggtactcagtgcaggtttctctgctccaactccaattcaagctcagtcatggcccattgctatgcaaggtagggacatagtagccattgctaaaactggctcgggaaaaactttgggttacttgattcctggatttttgcatcttcaacgtatccgaaatgattcgcgaatgggcccaacaatcttggtattgtctccaacgagagagctggccacacaaatccaagaagaagctgttaaatttgggaggtcatcaagaatttcgtgtacgtgtttgtatggtggtgcaccaaagggccctcagttgagggatttagaaagaggagcagatatcgtggttgcaactcctgggagattgaatgatatccttgaaatgaggaggattagtctgcgtcagatatcttatcttgtgctagatgaggcagatagaatgttggacatgggttttgaacctcagataaggaagattgtgaaagaaattcccactaagcgtcaaacccttatgtacacagctacatggccaaagggagttaggaaaattgcagctgacttgcttgttaaccctgctcaagtcaacattggcaatgttgacgagcttgtggctaacaagtcaatcacacagcatattgaagtggtagcaccaatggagaaacagaggaggttagagcagatcttgcggtctcaggaaccaggctcaaaggtgataatattctgctcaaccaaaaggatgtgtgatcaactaacacgcaatctaacccgccaatttggagctgctgctatacatggagacaagtcccagcctgagagagacaatgttcttaatcaattccgcagtggcagaactccggttcttgtagcaaccgatgttgctgctcgtggtctggacgttaaggacatcagggcggtcgtaaactatgatttccccaatggagtggaagactatgttcatagaatcggaagaacaggaagagctggagcgactggtcaggcattcacattctttggtgatcaagattcgaaacatgcttcggatctgatcaagattttggaaggagcaaaccagcgagttcctcctcagatccgcgaaatggctacacgtggtggtgggggaatgaacaaattcagtcgttggggacctccttccggcggccgtggtcgtggtggcgactctggttatggtggcagaggtagctttgcttcccgtgacagtagaagcagcaatggatggggaagagagcgagaaaggagccgtagccctgagagattcaacagagctccaccaccgtcttccaccggatctcctcctcgcagcttccacgagacgatgatgatgaaacacagatga

SEQ ID NO: 3577 - protein, 619 aa, Arabidopsis thaliana
MAATAAASVVRYAPEDHTLPKPWKGLIDDRTGYLYFWNPETNVTQYEKPTPSLPPKFSPAVSVSSSVQVQQTDAYAPPKDDDKYSRGSERVSRFSEGGRSGPPYSNGAANGVGDSAYGAASTRVPLPSSAPASELSPEAYSRRHEITVSGGQVPPPLMSFEATGFPPELLREVLSAGFSAPTPIQAQSWPIAMQGRDIVAIAKTGSGKTLGYLIPGFLHLQRIRNDSRMGPTILVLSPTRELATQIQEEAVKFGRSSRISCTCLYGGAPKGPQLRDLERGADIVVATPGRLNDILEMRRISLRQISYLVLDEADRMLDMGFEPQIRKIVKEIPTKRQTLMYTATWPKGVRKIAADLLVNPAQVNIGNVDELVANKSITQHIEVVAPMEKQRRLEQILRSQEPGSKVIIFCSTKRMCDQLTRNLTRQFGAAAIHGDKSQPERDNVLNQFRSGRTPVLVATDVAARGLDVKDIRAVVNYDFPNGVEDYVHRIGRTGRAGATGQAFTFFGDQDSKHASDLIKILEGANQRVPPQIREMATRGGGGMNKFSRWGPPSGGRGRGGDSGYGGRGSFASRDSRSSNGWGRERERSRSPERFNRAPPPSSTGSPPRSFHETMMMKHR

SEQ ID NO: 3578 - DNA, 1506 bp, Arabidopsis thaliana
  CDS (1)..(1506)
atgagtcgctacgatagccggaccggcgattccacctcgtaccgtgaccgtcgaagtgactcagggtttggtgggacttcatcatatggaagctcaggtagtcatacatctagcaaaaaggataacgatggcaatgaatctccaaggaagctagatttagatggtttgactccttttgagaagaatttttatgtcgagtctcccgctgtggcggctatgacagacacagaagtagaggaatatcgaaagctaagggaaattactgttgaaggcaaagatattccaaaacctgtcaagagttttcgtgatgttggctttcctgattatgttttggaagaggttaagaaggctggttttactgaacctacgcctatacaatctcaggggtggccaatggctatgaagggacgtgatcttatcggcattgctgaaactggttctggaaagactctttcttacttactacctgctattgtccatgttaatgcccaaccaatgttagctcatggtgacggcccaatcgtcttggttcttgctcccactcgtgaactggctgtgcagatacagcaagaggcatctaaatttggttcatcctcaaaaattaagaccacttgcatttatggtggggttccaaaagggcctcaagtgcgtgatctccagaaaggtgtggagatcgttatagctactcctgggaggttaatagacatgatggagtcgaacaacacaaacctacgaagggttacttatcttgttttggatgaggctgatcgaatgcttgatatggggtttgaccctcagatccggaaaattgtttcacatattcggccagaccgtcaaactttgtactggagtgccacttggcctaaggaggtggaacaactatcgaagaagtttctttataacccatacaaagtgataataggatcttctgatttgaaagctaaccgtgcaattcgtcaaattgttgatgtcatttccgaaagccaaaagtataacaagttggtgaaactgcttgaggacataatggatggaagcagaattcttgtcttcctcgatacaaaaaagggctgtgaccaaatcactcgtcagcttcgcatggatggttggcctgctttgtcaatacatggagataaaagtcaagcggaaagagattgggttctctcggagtttagatcaggcaaaagccctataatgactgctacagacgttgcagctcgtggattagacgtgaaagatgtgaagtatgtgataaactatgacttccctggatcactggaggattatgttcacaggattggacgaacaggtagagccggggctaaaggaacagcttacactttcttcacagttgcaaatgcgagattcgccaaggaacttaccaacatactacaagaagctggacagaaagtgagtcccgaattggcttcaatgggtcgcagtaccgctcctcctcctccagggcttggaggattcagagaccgtgggagcagaagagggtggagctga

SEQ ID NO: 3579 - protein, 501 aa, Arabidopsis thaliana
MSRYDSRTGDSTSYRDRRSDSGFGGTSSYGSSGSHTSSKKDNDGNESPRKLDLDGLTPFEKNFYVESPAVAAMTDTEVEEYRKLREITVEGKDIPKPVKSFRDVGFPDYVLEEVKKAGFTEPTPIQSQGWPMAMKGRDLIGIAETGSGKTLSYLLPAIVHVNAQPMLAHGDGPIVLVLAPTRELAVQIQQEASKFGSSSKIKTTCIYGGVPKGPQVRDLQKGVEIVIATPGRLIDMMESNNTNLRRVTYLVLDEADRMLDMGFDPQIRKIVSHIRPDRQTLYWSATWPKEVEQLSKKFLYNPYKVIIGSSDLKANRAIRQIVDVISESQKYNKLVKLLEDIMDGSRILVFLDTKKGCDQITRQLRMDGWPALSIHGDKSQAERDWVLSEFRSGKSPIMTATDVAARGLDVKDVKYVINYDFPGSLEDYVHRIGRTGRAGAKGTAYTFFTVANARFAKELTNILQEAGQKVSPELASMGRSTAPPPPGLGGFRDRGSRRGWS

SEQ ID NO: 3580 - DNA, 2283 bp, Arabidopsis thaliana
  CDS (1)..(2283)
atgtctaatcgcaaattcggaatggaaggattcggcattaatcggcaaactagctacagtttcgagcgatctcaagcaccgcaacgtctctacgtccctccctcgtctcgcggcggagacaactccgaagatgccgatcttgataacattgattacatggaaaacgaagaagctgaggaagatattgaggaaggcggttctgctgcggctagcggtggcgaggttgatgagatcgatccattagatgcttttatggagggaattcaccaggagatgaaatctgctccacctcctaagccaaaggagaaactagagaggtacaaggacgacgatgacgatcctgttgagagttacctcaaggccaagaaggatttgggcctgacactagccgccgatgcacttaacgccggttataactccgacgaggaggtgtatgctgcagctaaggcggtcgatgcagggatgctagattatgattccgatgataatccgattgttgtggataaaaggaagattgagcctattacagctctggatcatagctccatcgattatgaacctattaataaggacttttacgaggagctagaatcaatatcaggaatgactgagcaagaaaccacggattaccgtcagagattagggattcgggtctcgggttttgatgttcataggccagttaagacctttgaggattgtggattttcctcacagattatgagtgctatcaaaaagcaagcttatgaaaaacctacagcaatccaatgtcaggctttacctattgtgttgtctggtcgagatgttattggcatagccaaaactggttcaggtaagactgcagcgtttgttcttccaatgattgttcatattatggatcagcctgaacttcagagagatgaaggtccaattggtgtcatatgtgctccaaccagagaattggctcatcaaatcttcttggaagccaagaaattttcgaaagcatatggcttacgagtctctgctgtgtatggtggaatgtctaaacatgaacagtttaaggaactcaaggcaggatgcgaaatagttgttgctactcctggaaggttgatagacatgctgaagatgaaggctttgacaatgatgagagccagttatttggttcttgatgaggcagatcggatgtttgaccttggctttgagccacaagtaaggtctattgttggccagattcgtcctgatcgccagactttactattttcagccactatgccttggaaagttgaaaagttagctagggaaatcctttcagatcctattagagtcacagttggtgaagtggggatggccaatgaagatattacgcaggttgtcaatgtcataccttctgatgctgaaaaacttccctggctacttgaaaagctccctggaatgattgatgagggtgacgtattagtgtttgcatctaaaaaggccactgttgatgagattgaagctcaacttactctaaattccttcaaagttgctgctcttcacggtgataaagaccaagcatcacgaatggaaactctgcagaagttcaaatctggagttcaccatgtgctgattgccactgatgttgctgcccgaggtcttgacatcaaatcgcttaagacagtggttaactatgacatcgcaaaagatatggacatgcatgtacatcgtattggtagaacaggccgtgccggtgacagagatggggttgcctacacacttgttacgcagagagaggctagatttgctggtgaattggtaaacagtctggttgctgctggtcaaaatgtgcctccagaactcacagatcttgccatgaaggatggacgattcaagtccaagcgtgacgggagaaaaggaggtaagaaaggccgaggaggaggtggtggaaacaaaggagtacgtggagttgattttggtcttggtattggatttagctcggaatctagtaggacaccttcttctaaagctgcaccaagtagaagtggggcaatcaattcagtgagaactggagtaatggcccaattcaagaatagttttgtcgctgcaacgccatcaaatccacaaaaccaagcttatccaaacaagagaccatccctaatgggctttgtctcaggtggtactattggtggagacatgggtagaactcagagtcaagctcccccagtagcacctactcaaaacgcctcatcacacaactccagccagaatcactcacagagttctgagaatcggcctagagagaggaagagaagatctggttgggataattga

SEQ ID NO: 3581 - protein, 760 aa, Arabidopsis thaliana
MSNRKFGMEGFGINRQTSYSFERSQAPQRLYVPPSSRGGDNSEDADLDNIDYMENEEAEEDIEEGGSAAASGGEVDEIDPLDAFMEGIHQEMKSAPPPKPKEKLERYKDDDDDPVESYLKAKKDLGLTLAADALNAGYNSDEEVYAAAKAVDAGMLDYDSDDNPIVVDKRKIEPITALDHSSIDYEPINKDFYEELESISGMTEQETTDYRQRLGIRVSGFDVHRPVKTFEDCGFSSQIMSAIKKQAYEKPTAIQCQALPIVLSGRDVIGIAKTGSGKTAAFVLPMIVHIMDQPELQRDEGPIGVICAPTRELAHQIFLEAKKFSKAYGLRVSAVYGGMSKHEQFKELKAGCEIVVATPGRLIDMLKMKALTMMRASYLVLDEADRMFDLGFEPQVRSIVGQIRPDRQTLLFSATMPWKVEKLAREILSDPIRVTVGEVGMANEDITQVVNVIPSDAEKLPWLLEKLPGMIDEGDVLVFASKKATVDEIEAQLTLNSFKVAALHGDKDQASRMETLQKFKSGVHHVLIATDVAARGLDIKSLKTVVNYDIAKDMDMHVHRIGRTGRAGDRDGVAYTLVTQREARFAGELVNSLVAAGQNVPPELTDLAMKDGRFKSKRDGRKGGKKGRGGGGGNKGVRGVDFGLGIGFSSESSRTPSSKAAPSRSGAINSVRTGVMAQFKNSFVAATPSNPQNQAYPNKRPSLMGFVSGGTIGGDMGRTQSQAPPVAPTQNASSHNSSQNHSQSSENRPRERKRRSGWDN

SEQ ID NO: 3582 - DNA, 2313 bp, Oryza sativa subsp
  CDS (1)..(2313)
atgtcgaagcggcccaagctcgggggattcagcatccctcgccccacttcctacagcttcgagcgctcccagcctccccagcgcctctacgtccccgccgacgaccccgacctcgacgacatcgccttctccgacgacgcggcggccccgtcggacgcgccccccgcggggggaggcggggcggcgggggatgaggaggagatcgacccgctcgacgccttcatggccgagatccaggaggagattcgcgcgccgccgccggcgcccaagcccgaggcgctccggcgcgcggactccgacgacgaggacgaccccgtggagagcttcctccgggccaagaaggattccgggctcgcgctcgccgccgacgccatgcacgccgggtacgactccgacgaggaggtctacgctgcggccaaggccgtggacgccggcatgatggagtacgactccgacgacaaccccatagtggtggacaagaagaagatcgagcctattccgccgctcgaccattccaccatcgagtatgaacccttcaacaaggatttctacgaggagaagccctcggtttcagggatgagtgagcaagaggtggctgattatatgaaaagtttggcaattcgagtttcaggttttgatgtgccaagaccaatcaaaagctttgcagattgtgggtttcctgtacaactaatgaatgccattgccaagcagggttatgaaaaaccaactacaatccagtgccaggctttaccaattgtactttcaggcagagatatcattggtattgctaaaactggttctggcaaaactgcagcttttgtactccccatgattgttcacattatggatcagcctgagcttgagaaagaagaagggccaataggtgtggtatgtgctccaacaagagaattggcacatcagatataccttgaagctaagaagtttgccaaaccttacaatcttcgagttgctgctgtatatggtggggtttccaaatttgatcaattcaaagaactgaaggcaggctgtgaaatagtcattgctaccccagggagattaatagacttgcttaagatgaaggcattgaagatgtttagggcaacttatttggttcttgatgaagctgatcgcatgttcgatcttggatttgagcctcagataagatccatcgttggtcaaattagaccagaccgacaaaccttgcttttctcagcaacaatgccatacaaagtggaacgtttggctagagaaattttgactgaccctattagagttacagtaggtcaggttggcagtgctaatgaagacattaagcaagttgtaaatgtactcccttctgatgctgagaagatgccttggcttctggaaaaacttcctgggatgattgatgatggagacgttcttgtatttgcagctaagaaggccagagttgatgagattgagagccagttaaatcagagaggtttcagaattgcagcacttcatggtgacaaggatcaagcttctcgcatggagacattgcagaagttcaaatccggggtttatcacgtcctagtagcaactgatgttgctgcacgtggtctggacattaagtcgattaaaacagttgttaatttcgatattgcaaaagaaatggatatgcatattcaccggataggaagaactggccgtgctggtgataaagatggaactgcatatactctgattacacagaaggaggtgcgctttgcaggtgaattggttcattgtttgattgctgcaggacaggatgtgccaaatgaactaatggatctggcaatgaaggatggaagattcagagcaaaccgggattcaagaaaaggtgggaagaaaagtggcaaaggaaaaggtggaggaggcgggggtggcggcggtagcggtgcccgtggtcgtgggcgtggtgtacgtggggttgactttggccttggcatagggtacaatgctgaatcaggatcggtgcctgctccaagatctgctgcattaaattcattgaagacagggatgatgcaaaattttaagagcagctttgtctctgcctcttcatcaaatacaccaagcaacagcgcaccttcaagaggtgctccttcctcctttgtgagaccggcactccgtggttttgtttctggtggcaccataggaggagacgcaaaccaagcacgggcagtactgcctgcgccctcctttgtccctgcttccagacctgcagaaaacactgttgaaaatgcgaacccaaaccctgaaagctcgagggatcgcacgagggagagaaagcggccgtcggggtgggatcgctag

SEQ ID NO: 3583 - protein, 770 aa, Oryza sativa subsp
MSKRPKLGGFSIPRPTSYSFERSQPPQRLYVPADDPDLDDIAFSDDAAAPSDAPPAGGGGAAGDEEEIDPLDAFMAEIQEEIRAPPPAPKPEALRRADSDDEDDPVESFLRAKKDSGLALAADAMHAGYDSDEEVYAAAKAVDAGMMEYDSDDNPIVVDKKKIEPIPPLDHSTIEYEPFNKDFYEEKPSVSGMSEQEVADYMKSLAIRVSGFDVPRPIKSFADCGFPVQLMNAIAKQGYEKPTTIQCQALPIVLSGRDIIGIAKTGSGKTAAFVLPMIVHIMDQPELEKEEGPIGVVCAPTRELAHQIYLEAKKFAKPYNLRVAAVYGGVSKFDQFKELKAGCEIVIATPGRLIDLLKMKALKMFRATYLVLDEADRMFDLGFEPQIRSIVGQIRPDRQTLLFSATMPYKVERLAREILTDPIRVTVGQVGSANEDIKQVVNVLPSDAEKMPWLLEKLPGMIDDGDVLVFAAKKARVDEIESQLNQRGFRIAALHGDKDQASRMETLQKFKSGVYHVLVATDVAARGLDIKSIKTVVNFDIAKEMDMHIHRIGRTGRAGDKDGTAYTLITQKEVRFAGELVHCLIAAGQDVPNELMDLAMKDGRFRANRDSRKGGKKSGKGKGGGGGGGGGSGARGRGRGVRGVDFGLGIGYNAESGSVPAPRSAALNSLKTGMMQNFKSSFVSASSSNTPSNSAPSRGAPSSFVRPALRGFVSGGTIGGDANQARAVLPAPSFVPASRPAENTVENANPNPESSRDRTRERKRPSGWDR

SEQ ID NO: 3584 - DNA, 1776 bp, Arabidopsis thaliana
  CDS (1)..(1776)
atgagctcgtatgatcgtagatttgctgatccaaattcgtatcgccaacgctctggcgccccagttggttcgtctcagccgatggatccttccgccgcaccatacaacccacggtacactggtggtggtggaggatatggaccatctccggtaatggccggtgataattccggctataatcggtacccatctttccagccacctagtggcggtttctctgttggccgcggtggtggaagaggtggatatggtcaatacggcgatagaaacggcggagggaattggggaggaggaggaggacgtggcggatcgagtaaaagagagctagatagtgtttctcttccgaagcagaattttgggaatcttgtacattttgagaagaatttctatgtggagagtcccactgtgcaagctatgacagagcaggatgttgcaatgtacagaaccgagagggatatatccgttgaaggtcgtgatgttcctaagccgatgaagatgttccaagatgctaactttccagataacattcttgaagcaattgctaaattgggatttactgagccaacacctatacaagctcagggatggccgatggcgttgaagggtagggatttgattggtattgctgagactggctctggtaagacattggcttacttgttaccagcattggttcacgttagtgcacaacctcgattaggtcaggatgatggccccattgtgttaatattagctcccacaagagaactagctgttcagattcaagaggaatcaaggaaattcgggttgaggtctggtgttagaagtacttgtatctatggtggtgctcctaaaggacctcagattcgtgatcttagaagaggtgttgagattgtaattgctacacctggtcgtttgattgatatgttggaatgtcaacacactaatttgaagagagtgacttaccttgtactggatgaggctgacagaatgttagacatgggatttgaaccccaaattagaaagattgtatctcagatccgacctgatagacaaacacttctttggagtgcaacatggccacgagaggttgaaactcttgccaggcagtttctacgagatccatataaggccattattggatcaacagatctaaaagctaaccagtctattaaccaagtaatcgagattgtaccgacgccagagaaatacaacaggctccttacactacttaaacagttaatggatgggagtaaaatcctaatttttgtggagacaaagagagggtgtgatcaagtgactagacaattgagaatggacggatggccagctcttgccatacatggtgacaagacccaatcggaaagagaccgagtcttggcagaatttaagagtggacgaagcccgataatgactgccactgatgtagcagcaaggggacttgatgtgaaggacattaaatgtgtggttaattatgatttcccaaatacattggaggattacatccataggattggtcgaaccgggcgtgcaggagctaaaggaatggcctttacattcttcacacatgacaatgctaagtttgcgagagagcttgtcaagatccttcaagaagctggtcaagttgtacctcctactctctccgcactagtccgatcatctggttctggttatggaggttcaggtggtggaagaaacttcaggccaagaggaggaggacgtggtggtgggtttggagataaacggtcaagatcgacttcaaactttgtacctcacggtggaaagaggacttggtaa

SEQ ID NO: 3585 - protein, 591 aa, Arabidopsis thaliana
MSSYDRRFADPNSYRQRSGAPVGSSQPMDPSAAPYNPRYTGGGGGYGPSPVMAGDNSGYNRYPSFQPPSGGFSVGRGGGRGGYGQYGDRNGGGNWGGGGGRGGSSKRELDSVSLPKQNFGNLVHFEKNFYVESPTVQAMTEQDVAMYRTERDISVEGRDVPKPMKMFQDANFPDNILEAIAKLGFTEPTPIQAQGWPMALKGRDLIGIAETGSGKTLAYLLPALVHVSAQPRLGQDDGPIVLILAPTRELAVQIQEESRKFGLRSGVRSTCIYGGAPKGPQIRDLRRGVEIVIATPGRLIDMLECQHTNLKRVTYLVLDEADRMLDMGFEPQIRKIVSQIRPDRQTLLWSATWPREVETLARQFLRDPYKAIIGSTDLKANQSINQVIEIVPTPEKYNRLLTLLKQLMDGSKILIFVETKRGCDQVTRQLRMDGWPALAIHGDKTQSERDRVLAEFKSGRSPIMTATDVAARGLDVKDIKCVVNYDFPNTLEDYIHRIGRTGRAGAKGMAFTFFTHDNAKFARELVKILQEAGQVVPPTLSALVRSSGSGYGGSGGGRNFRPRGGGRGGGFGDKRSRSTSNFVPHGGKRTW

SEQ ID NO: 3586 - DNA, 1884 bp, Oryza sativa subsp
  CDS (1)..(1884)
atggccgccgccacggcctcctcgccggcgaccgccgccgccgccaactccgatgacgaagacaactacgaggagtacatccccgtcgccaagcgccgggccatggaggccgaccgcctccgccgcctccgcctctccaagcccgcgcccccatcctcctccgccgcggaggccgcctcggatctcccgcctccccctcccccaccgccgaaccagccctcagccggcggtggcggtggcggcctcgaagcctccgcgaagcccagcctcctcgtcaaggcgacgcagctcaagcgggccgcgccggaggtgacccacacggagcagctcatcatgcaggagaaggagatgatcgagcacctctccgaccgcaagacgctcatgtcggtgcgcgagctcgccaaggggatcacctactccgacccgctcaagacggggtggaagccgccgctccgcctccgccgcatgccgcgcgccaaggccgacgagctccgccgcaagtggcacatcctcgtggacggggacgacgtgccgccgcccgctcgggacttccgcgacctccgcctgcccgagcccatgctgcgcaagctccgcgagaagggcatcgtccagcccactcccatccaggtgcagggattgcccgtggtgctctccgggcgcgacatgattggcattgccttcacagggtccgggaagacgttggtgtttgtgctgccgctcatcatggtggcattacaggaggagatgatgatgccaatcgtgccgggtgaagggccatttgggatgatcatctgtccatcgcgagagctggccaagcaaacgtacgatgtcattgagcagttccttgttccacttaaggaggctgggtacccggagatacgcccgttgctttgcattgggggtgtcgatatgagggcgcagctggatgtggtcaagaagggagtacatattgtggtggctacacctggccgactcaaggatttacttgccaagaaaaagatgaacctcgacaattgcaggtacttgaccttggatgaagctgataggcttgtcgatcttgggtttgaggatgatatccgtgaggtttttgaccatttcaaggcacaaaggcagacacttctattttctgccactatgccgaagaagattcaaaactttgcgaagagtgcccttgtgaaacctgttattgtgaatgttggtagagctggtgcggcaaatctggatgtcatccaagaagttgagtatgtcaaggaggatgccagaattatatatctcctggaatgcctccagaagactccacctccagttcttgtcttttgtgaaaacaaagctgatgtcgactatatccatgagtatcttcttctgaagggtgtagaggctgttgcaatccatggaggaaaggatcaagaggaaagagagaatgcaatcgagttcttcaagaatggaaagaaggatgttttggtggctactgatgttgcctcgaaaggtcttgatttccctgatatccagcatgtgattaactatgatatgcctgctgaaatagaaaactatgttcaccggattggtcgaactggtcgatgtgggaaaactggaatagcaacaaccttcataaacaagaatcaaacggagactacccttcttgaccttaagcacttgcttaaggaagctaagcaaagaataccgccagtgttggctgagctcaatgacccattggaagatgaggaaaccatggccaaggagagcggtgttaagggatgtgcatactgtggtggtcttggccatcgtgttaccgactgtccaaagctggagcaccagaagtccatggcgatcgcgggctctagaagagattactatggcggtggaggctacagaggagaaatatga

SEQ ID NO: 3587 - protein, 627 aa, Oryza sativa subsp
MAAATASSPATAAAANSDDEDNYEEYIPVAKRRAMEADRLRRLRLSKPAPPSSSAAEAASDLPPPPPPPPNQPSAGGGGGGLEASAKPSLLVKATQLKRAAPEVTHTEQLIMQEKEMIEHLSDRKTLMSVRELAKGITYSDPLKTGWKPPLRLRRMPRAKADELRRKWHILVDGDDVPPPARDFRDLRLPEPMLRKLREKGIVQPTPIQVQGLPVVLSGRDMIGIAFTGSGKTLVFVLPLIMVALQEEMMMPIVPGEGPFGMIICPSRELAKQTYDVIEQFLVPLKEAGYPEIRPLLCIGGVDMRAQLDVVKKGVHIVVATPGRLKDLLAKKKMNLDNCRYLTLDEADRLVDLGFEDDIREVFDHFKAQRQTLLFSATMPKKIQNFAKSALVKPVIVNVGRAGAANLDVIQEVEYVKEDARIIYLLECLQKTPPPVLVFCENKADVDYIHEYLLLKGVEAVAIHGGKDQEERENAIEFFKNGKKDVLVATDVASKGLDFPDIQHVINYDMPAEIENYVHRIGRTGRCGKTGIATTFINKNQTETTLLDLKHLLKEAKQRIPPVLAELNDPLEDEETMAKESGVKGCAYCGGLGHRVTDCPKLEHQKSMAIAGSRRDYYGGGGYRGEI

SEQ ID NO: 3588 - DNA, 1860 bp, Oryza sativa subsp
  CDS (1)..(1860)
atggccgccgccgccgccgccgccgccgccggcgactcgccccgccgcggaacaccggacagcgatgaggaggactacgaggagtacgtccccgtcgccaagcgccgggccatggaggccgaacgcctccgccgcgccactaaaccgccgaccacgaacgcagttgcagttgcagccccgccgccgccgccgcgctccacctcgtcgccggcggtgggtgaggttgcggtcaagacgagcctgctcgtgaaggccacgaagctgaagcgcgaggcccctgaggtgaccccggccgagcggctgctccagcaggagagggagatgatcgagcacctctccgaccgcaaggccctcatgcccgtcggcgagatcgcgaaggggatcagctactccgagccgatcaccacggggtggaggccgccgcttcgcctccgccgcatgccgcggtcccgcgcggacgcgctgcgacggagctggcacatccttgtcgacggcgacgacgtgcccccgccgtcccgaagcttcggcgacctccgtctcccggagcccatcctccgcgcgctccgcggcaagggaatcgagaagccgaccccaatccaggtgcagggtctccccgtcgcgctctccgggcgggacatgatcgggatcgcgttcacggggtccgggaagacgctggtgttcgtgctgccgctcatcatggcggcgctgcaggaggagatcctgatgccgatcgtgcccggcgagggcccgttcgggctcatcgtctgcccgtcgcgggagctcgcgaggcagacgcacgaggtgatcgagatgttcctcgcgccgctcatggaggccgggtacccggagatacggccgctgctctgcattggaggcgtggacatgaggacgcagatggaggtggtgaagaagggcgtgcatattgtagtggcgactcctgggaggctcaaggatttgctctccaagaagaagatgaatcttgataactgcaggtatttaacactagatgaggcggacagactagtcgatcttggatttgaggacgacatcagggaggtgttcgaccatttcaaggcacagagacagacactcctcttctctgccaccatgccagagaagatccagaattttgcaaagagtgcgctagtgaaaccaatcattgtcaatgtgggaagagctggagcagcaaaccttgatgtcatccaagaggttgagtatgtcaaggaggaagcaagaatcatatacctccttgagtgtctccagaaaaccccaccccctgtgctggttttctgcgagcacaaagccgatgtcgattacatccaagaatttcttcttctgaaaggtgtcgaagctgttgcaatccatggtggaaaagatgatgaggaaagaaaagacgcgttcaaatcattcaaagcctcagaaaaggatgtattggtagctacagatgttgcatccaaaggccttgatatccctgatatccagcatgtgatcaactacgacatgcctgctgagatagagaactatgtgcatcggattggaagaaccggcaggcgtgggaaaaccggcgtcgcaacgacattcatcaacaagaaccagacagagactacgcttcttgacctgaagcaattgctcatcgaatcaaagcaaaggttaccaccaattctggctgatcttgatgatccacaggaggacgataaggtggccattgctcagcagagtggtgtgaagggctgtgcgttttgtggtggccttggccatcgtatcgaggcctgccccaagcagcagctccagaacagtgtcacgcttgctcgagcaagaagtgattacttcggtggtggtggctaccggggggagatttga

SEQ ID NO: 3589 - protein, 619 aa, Oryza sativa subsp
MAAAAAAAAAGDSPRRGTPDSDEEDYEEYVPVAKRRAMEAERLRRATKPPTTNAVAVAAPPPPPRSTSSPAVGEVAVKTSLLVKATKLKREAPEVTPAERLLQQEREMIEHLSDRKALMPVGEIAKGISYSEPITTGWRPPLRLRRMPRSRADALRRSWHILVDGDDVPPPSRSFGDLRLPEPILRALRGKGIEKPTPIQVQGLPVALSGRDMIGIAFTGSGKTLVFVLPLIMAALQEEILMPIVPGEGPFGLIVCPSRELARQTHEVIEMFLAPLMEAGYPEIRPLLCIGGVDMRTQMEVVKKGVHIVVATPGRLKDLLSKKKMNLDNCRYLTLDEADRLVDLGFEDDIREVFDHFKAQRQTLLFSATMPEKIQNFAKSALVKPIIVNVGRAGAANLDVIQEVEYVKEEARIIYLLECLQKTPPPVLVFCEHKADVDYIQEFLLLKGVEAVAIHGGKDDEERKDAFKSFKASEKDVLVATDVASKGLDIPDIQHVINYDMPAEIENYVHRIGRTGRRGKTGVATTFINKNQTETTLLDLKQLLIESKQRLPPILADLDDPQEDDKVAIAQQSGVKGCAFCGGLGHRIEACPKQQLQNSVTLARARSDYFGGGGYRGEI

SEQ ID NO: 3590 - DNA, 1902 bp, Arabidopsis thaliana
  CDS (1)..(1902)
atgagtgcatcatgggctgatgtagctgactcagagaacacgggttctgggtcttctaatcagaattctcatccttcacgacctgcttatgttcctccacatctaaggaacaggccagcagcttctgagcctgttgctccattgccagctaatgatcgtgtaggttatggtggtccaccttctggctctcgatgggctcctggtggtagtggtgttggtgttggaggtggtggtggttatagggctgatgcaggtcgtcctggctctggctctggctatggtggacgaggaggtggtggttggaacaacagaagcggagggtgggaccgtagggaacgtgaagtaaacccctttgaaaatgatgattccgaaccagaaccagcttttactgagcaggataatacggttattaattttgatgcctatgaagatattccgattgagaccagtggggataatgtgcctcctcctgttaacacattcgcagagatagatctcggggaggcattgaatctaaatatccgtagatgcaaatatgttaagccaacacctgttcagcgtcatgcgattccgatattgcttgaagggagggatttgatggcctgtgctcagacagggtcggggaagacagctgctttttgctttccaatcattagtggaataatgaaagatcagcatgtacagagaccccgtggttcacgaacagtctaccctcttgcagttattctctcaccaacaagagagttggcaagtcagatacatgatgaggctaaaaagttctcttaccaaactggtgtgaaggtggttgttgcatatggaggaacacctattaaccagcagctccgggaacttgagaggggagtcgatattcttgtggcaacgcctggtcgattaaatgatttgctcgagagagctagagtctcaatgcagatgattagatttttagctcttgatgaggccgatagaatgcttgacatgggttttgaaccacaaattagaaagattgtcgaacaaatggacatgcctccacgtggagttagacagacactgttgtttagtgctacatttccaagagaaattcagagactcgcagctgacttcctagcaaattatatatttttggctgtgggtagagtgggttcaagtaccgatttaattgtccaaagggttgagtttgtccttgactctgacaaaagaagtcatctcatggacctgcttcacgctcagagagagaatggcatccaaggcaagcaagccctgaccttagtttttgtggagacaaagagaggagctgactctttggaaaattggttgtgcatcaatgggtttccagcaacctccattcacggtgacagaacacagcaggaaagagaagtggcattgaaagccttcaagagtgggagaacaccgattttggttgcaactgatgtagcagcacgtggccttgacattccccacgtggctcatgtggtcaacttcgatctgccaaatgacattgatgactatgtccaccgtattggacgaacaggacgtgctggcaaatcaggactagcaactgccttcttcaacgatggcaacacctcactggccagaccgctcgctgagctgatgcaagaagctaaccaagaagtccctgagtggctcactcggtatgcgtcacggtcctcttttggtggtggtaagaaccggcggtctggtggtcgatttggtggccgtgactttagaagggaagggtctttcggtagcggtagaggaggctatggcggtggaggaggagggtatggcggcggaggaggctatggtggtggaggaggctatggcggcggaggaggctatggtggtggatatggtggtgcttcaagtggtggatatggtggagaacctccaagtgcttgggactaa

SEQ ID NO: 3591 - protein, 633 aa, Arabidopsis thaliana
MSASWADVADSENTGSGSSNQNSHPSRPAYVPPHLRNRPAASEPVAPLPANDRVGYGGPPSGSRWAPGGSGVGVGGGGGYRADAGRPGSGSGYGGRGGGGWNNRSGGWDRREREVNPFENDDSEPEPAFTEQDNTVINFDAYEDIPIETSGDNVPPPVNTFAEIDLGEALNLNIRRCKYVKPTPVQRHAIPILLEGRDLMACAQTGSGKTAAFCFPIISGIMKDQHVQRPRGSRTVYPLAVILSPTRELASQIHDEAKKFSYQTGVKVVVAYGGTPINQQLRELERGVDILVATPGRLNDLLERARVSMQMIRFLALDEADRMLDMGFEPQIRKIVEQMDMPPRGVRQTLLFSATFPREIQRLAADFLANYIFLAVGRVGSSTDLIVQRVEFVLDSDKRSHLMDLLHAQRENGIQGKQALTLVFVETKRGADSLENWLCINGFPATSIHGDRTQQEREVALKAFKSGRTPILVATDVAARGLDIPHVAHVVNFDLPNDIDDYVHRIGRTGRAGKSGLATAFFNDGNTSLARPLAELMQEANQEVPEWLTRYASRSSFGGGKNRRSGGRFGGRDFRREGSFGSGRGGYGGGGGGYGGGGGYGGGGGYGGGGGYGGGYGGASSGGYGGEPPSAWD

SEQ ID NO: 3592 - DNA, 1629 bp, Arabidopsis thaliana
  CDS (1)..(1629)
atggaagtagatgatggttacgtggagtatgttccagtagaggagcgtctagcgcagatgaagcgaaaggtggtggaagaacctggcaaggggatgatggagcatttatctgacaagaagaagcttatgtctgttggtgaattagccagaggtatcacttatacagagcctctctcaacatggtggaaaccccctctgcacgttaggaagatgtcaaccaaacagatggatttgattaggaagcaatggcatattacagttaacggtgaagatattcctcctccaatcaaaaacttcatggatatgaaatttccgagtccacttctccgtatgctcaaggataaaggaataatgcaccctactcctatccaagttcagggtcttcctgttgttttgtctggcagagatatgattgggattgcgttcactggttccggaaagacgttggttttcgtgcttcctatgatcatattagctctgcaggaggagataatgatgcctatagctgctggagaaggtcccattgcgcttgttatttgtccgtctagagagcttgctaagcagacttacgatgtggttgaacagtttgtggcatctttagtcgaggatggatacccgcggttgaggtcgttgctatgcattggaggagtggatatgagatcacagttggacgttgttaagaaaggtgttcacatcgttgttgctactcctggaaggttgaaggatatcctcgccaagaaaaagatgagcttagatgcttgcaggttgttgacactggatgaagcagataggttggttgatttgggtttcgaagatgacataagacatgtctttgaccactttaagtctcagcgtcaaacacttttgttttctgccacaatgcctgcaaaaatccaaatctttgccacaagtgctctggtgaaacctgtaactgttaatgtaggaagagctggagctgcgaatctcgatgtcatacaggaggttgaatacgtcaagcaagaagcaaagattgtttaccttctggagtgtctgcagaaaaccactccaccggttttaatattctgtgagaacaaagctgatgttgatgatattcacgagtacttgttactgaaaggagtggaagcagtggctatccatggaggaaaagatcaagaagacagagattacgcaatatctttgttcaaagctgggaaaaaagacgttttggtcgcgaccgatgttgcttcaaagggtttagatttccctgatatacaacatgtaatcaactacgacatgcctggggagattgagaactacgtgcataggataggaagaacaggtcgctgtgggaaaactgggatagcaactacgtttataaacaagaaccaaagcgaaatcacgctgctcgatttgaaacacttgttgcaagaagctaaacagaggattccacctgtccttgctgagcttaatggtccaatggaagaaacagaaaccattgctaatgcaagcggtgtcaagggttgtgcttattgtggtggtctcgggcatcggattctacagtgtccaaaatttgaacatcagaagagtgtagctatatctagttctaggaaagaccattttggctctgatggatacagaggagaggtgtaa

SEQ ID NO: 3593 - protein, 542 aa, Arabidopsis thaliana
MEVDDGYVEYVPVEERLAQMKRKVVEEPGKGMMEHLSDKKKLMSVGELARGITYTEPLSTWWKPPLHVRKMSTKQMDLIRKQWHITVNGEDIPPPIKNFMDMKFPSPLLRMLKDKGIMHPTPIQVQGLPVVLSGRDMIGIAFTGSGKTLVFVLPMIILALQEEIMMPIAAGEGPIALVICPSRELAKQTYDVVEQFVASLVEDGYPRLRSLLCIGGVDMRSQLDVVKKGVHIVVATPGRLKDILAKKKMSLDACRLLTLDEADRLVDLGFEDDIRHVFDHFKSQRQTLLFSATMPAKIQIFATSALVKPVTVNVGRAGAANLDVIQEVEYVKQEAKIVYLLECLQKTTPPVLIFCENKADVDDIHEYLLLKGVEAVAIHGGKDQEDRDYAISLFKAGKKDVLVATDVASKGLDFPDIQHVINYDMPGEIENYVHRIGRTGRCGKTGIATTFINKNQSEITLLDLKHLLQEAKQRIPPVLAELNGPMEETETIANASGVKGCAYCGGLGHRILQCPKFEHQKSVAISSSRKDHFGSDGYRGEV

SEQ ID NO: 3594 - DNA, 1809 bp, Oryza sativa subsp
  CDS (1)..(1809)
atggcggcggcggcggcggtggcgaagtcggtggaggccggcggcgaaccgggcggtggtggtggtggtgcgtggtccaccgtctcccgctccggccgctcctcctactccgccggtggtggcgtcggcggcgggaaggtgggggagctcgcggaggggttggcgggggtggagatcggcggggaacggaggctggacaagtacgacatccccgtggaggtgagcggcgaggacgtgcccccgcccgcggacgggttcgaggcggccgggctggtggaggccgtgctccggaacgtggcgaggtgcgggtacgagagccccacgcccgtgcagcgctactcgatgccgatcgcgctcgccggcagggacctgatggcgtgcgcgcagacggggtccgggaagacggccgcgttctgcctccccgtcgtgagcggcctcgtcgcggcgggagggagcggaatcggccaccgggagaggtcgtcgttcaaccgcgccgccgcgaagccccgcgcgctcgtgctagcgcccacgagggagctcgccgcgcagattaatgaggaggccaagaagttctctttccaaactggacttagagttgtggtggcctatggaggaactccaatgtataaccagctccgtgatctagagaggggcgctgatattcttgttgctacacccggtcgccttgtggacatggttgaaagatcaaaagtctcccttgaggcaatcaagtacctggtaatggatgaagccgacaggatgctggatatgggctttgagcctcagataaggaagattgttgaaagaatgaacatgccaaggaagtctgtgagacaaactatgcttttcagtgcaaccttcccaccagagattcagagactggcttcggactttttgtcgaactacatatttatcactgttgggagggtgggttcaagtactgacctaattatgcagaaggttgaactcctctctgacggggagaaacgaggctacctgcttgatcttttacagaggcaatctgtcggtgtggctaacagtaagctgcagcaacctctgacattggtgtttgtggagacaaaacgagaggccgactctctgaggtactggctatacagcaaaggtttccctgcaacagcgatccatggtgacagaacacagcaggaaagggagagcgcactgagatcctttaagactggcctcactcctataatggttgccactgatgtagcctcacggggcctggatgtcccaaatgttgctcatgtgatcaactacgatcttcccaagagcatagaggactacgtccacaggattggaagaactggcagagctgggaaggctgggtcagccacggccttcttcactgagtctgaccactcgctggcgaagggcttactggagctgatgaccgaggcgaaacaggatgttcctgactggctcgtacagtatgcagagaggccgtactatggaggttcaagctacggtggaagaaaccggaggtctggtggcgggggcaacaggtttgccggcagagatttccgccagggcagtggcggcggctactcaggtggtggtggtggcggcggctactcaggtggtggtggtggcggcggctactcaggtggtggtggtggctactcaggtggtggccgtggtggtggctactcacgcggtggccgtggtggctactcaggcggaggcggtggcggtggtggagacccctaccgagcaagtgctccacccccgcggtactacccttcgtacccgatgggcacggccgacatcaacgcctctggctgggactaa

SEQ ID NO: 3595 - protein, 602 aa, Oryza sativa subsp
MAAAAAVAKSVEAGGEPGGGGGGAWSTVSRSGRSSYSAGGGVGGGKVGELAEGLAGVEIGGERRLDKYDIPVEVSGEDVPPPADGFEAAGLVEAVLRNVARCGYESPTPVQRYSMPIALAGRDLMACAQTGSGKTAAFCLPVVSGLVAAGGSGIGHRERSSFNRAAAKPRALVLAPTRELAAQINEEAKKFSFQTGLRVVVAYGGTPMYNQLRDLERGADILVATPGRLVDMVERSKVSLEAIKYLVMDEADRMLDMGFEPQIRKIVERMNMPRKSVRQTMLFSATFPPEIQRLASDFLSNYIFITVGRVGSSTDLIMQKVELLSDGEKRGYLLDLLQRQSVGVANSKLQQPLTLVFVETKREADSLRYWLYSKGFPATAIHGDRTQQERESALRSFKTGLTPIMVATDVASRGLDVPNVAHVINYDLPKSIEDYVHRIGRTGRAGKAGSATAFFTESDHSLAKGLLELMTEAKQDVPDWLVQYAERPYYGGSSYGGRNRRSGGGGNRFAGRDFRQGSGGGYSGGGGGGGYSGGGGGGGYSGGGGGYSGGGRGGGYSRGGRGGYSGGGGGGGGDPYRASAPPPRYYPSYPMGTADINASGWD

SEQ ID NO: 3596 - DNA, 1941 bp, Arabidopsis thaliana
  CDS (1)..(1941)
atgagttcaaattcatgggctgatgtttctgaatcagagagggcaccatctggtggtggttggggttattctcgtccgtctcgaaccaactatgttcctccacatcttaggagccgtacaccatcttcggagtttgttgctccttcacctggtaataatgatcgtgggggatatggtggtgcaaatagtggttatggtggtcgaggccaaggttatggtggtcgaggttcgggctatggtggtagaggaggtcctgtgggcggttggaatgccagaagtggaggttgggaccgtcgggatactgaaactaacccgtttggtaatgatggaaatgcagacccggctgttaacgagcaggaaaacactgtcattaactttgaggcctatgaagatattcccatcgagacaagtggggataatgtgccacctcctgttaatacatttgcagagatagacctcggagaagctctcaatctaaatatccagaggtgcaaatacgtgaagccgacccctgtgcagcgtaatgcaattcccatattggctgcaggaagggatttgatggcttgtgctcagacaggctctgggaagacagctgccttttgttttccgattattagtgggattatgaaggatcagcatatagagagaccacgtggagttcggggagtctatcctcttgctgtcattctctcaccaacaagggaattggcttgccagatacatgatgaagccagaaagttctcctatcaaactggagtgaaagttgtggttgcttacggaggaacaccagtcaaccaacagattagggagcttgaaagaggagttgatattcttgttgcaactcctgggagattaaatgatttgcttgagagaggtagagtctcattacagatggtaagattcttggcacttgatgaggcggacagaatgctggacatgggttttgaaccacaaatcaggaagatcgttcagcagatggacatgcctcctcctggtgtccggcagacaatgttgttcagtgctacatttcctagggagatacagagacttgcatctgattttctttcaaattacatatttctggctgttggaagagtgggttcaagtacggatttaattgtccaaagagtagagtttgttcatgattctgacaaaagaagccatctaatggaccttcttcatgcccagagggagaatggtaaccaaggaaagcaagctttgactctagtttttgtggagacaaagaagggagctgactctttggagaattggttgtgcatcaatggtttcccagcaacgaccattcatggtgataggtcacaacaggaaagagaagtggcactgagatcattcaagactgggcggacacctattttggttgcaaccgatgtggcagcacgtggtcttgacattccgcacgtggctcatgtagtgaactttgatctaccaaacgacattgatgactatgtccaccgtatcggacgaacaggacgtgcaggaaattcaggactagcaactgctttcttcaatgacaacaacacaacaatggccaagccactggctgagctaatgcaagaagctaaccaggaggtccctgactggctgactcgatacgcatctcgtgcttcatttggaggtggtaagaaccggcggtctggtggacggtttggtggtcgtgacttcaggagagaatcttttagtcgaggcggtggtggtgctgactactatggtggaggtggtggatatggaggcgttcctggtggtggctatggagcaatgcctggtgggtacggacccgtaccaggtggtggatatggaaatgttccgggtggtggttatgcaccttatggtagaggtggtggtgcttactatggtcctggaggatatggaaccgttcctaaccaagggtatggtcctggagtggctagtgcgtgggactaa

SEQ ID NO: 3597 - protein, 646 aa, Arabidopsis thaliana
MSSNSWADVSESERAPSGGGWGYSRPSRTNYVPPHLRSRTPSSEFVAPSPGNNDRGGYGGANSGYGGRGQGYGGRGSGYGGRGGPVGGWNARSGGWDRRDTETNPFGNDGNADPAVNEQENTVINFEAYEDIPIETSGDNVPPPVNTFAEIDLGEALNLNIQRCKYVKPTPVQRNAIPILAAGRDLMACAQTGSGKTAAFCFPIISGIMKDQHIERPRGVRGVYPLAVILSPTRELACQIHDEARKFSYQTGVKVVVAYGGTPVNQQIRELERGVDILVATPGRLNDLLERGRVSLQMVRFLALDEADRMLDMGFEPQIRKIVQQMDMPPPGVRQTMLFSATFPREIQRLASDFLSNYIFLAVGRVGSSTDLIVQRVEFVHDSDKRSHLMDLLHAQRENGNQGKQALTLVFVETKKGADSLENWLCINGFPATTIHGDRSQQEREVALRSFKTGRTPILVATDVAARGLDIPHVAHVVNFDLPNDIDDYVHRIGRTGRAGNSGLATAFFNDNNTTMAKPLAELMQEANQEVPDWLTRYASRASFGGGKNRRSGGRFGGRDFRRESFSRGGGGADYYGGGGGYGGVPGGGYGAMPGGYGPVPGGGYGNVPGGGYAPYGRGGGAYYGPGGYGTVPNQGYGPGVASAWD

SEQ ID NO: 3598 - DNA, 1851 bp, Arabidopsis thaliana
  CDS (1)..(1851)
atgatcactacagtgctacgacgatctctccttgatgcgtcgaagaggaatctctccgcttcgttgacctcaatcaatactgttctgtttcacaacctggccccagccgccactagagtctccgacctagccttaattggatcttccgatgtcaaagctgggtttccgtttggtgttgaagcgaaaggaattcattttcaatctgggccgttggattttagagcttcgatggtttctcaagctggatttgcgatctctgagagtagcgagagaagggttggtgattcggagagtgttggtggtgatgggcttgcgatatctgagcttgggatatctccggagattgttaaagctttgagtagtaagggtattgagaaactctttcctattcagaaagctgtgctggagccagcgatggagggtcgagatatgattggtcgtgctaggactggaacgggaaagacacttgcttttgggattcctatcattgacaaaatcatcaaatacaacgctaaacatggacgagggaggaatccgctttgtttggttttggcaccgacaagagagcttgctcgccaggttgagaaggagtttagggagtctgctccgagcttggatactatttgtctttatggaggtacaccgattggacagcaaatgaggcagcttgactatggtgttgatgtggcggttggaactccaggtcgtgtcattgatctgatgaagagaggagctttgaatctatcggaagttcagtttgtggttctggatgaagctgatcagatgcttcaagttggatttgctgaggatgttgaaataatattggaaaagttgcctgagaaacgtcagagtatgatgttttctgcaacaatgccgagttggatcagatctctcactaagaagtacctgaataatcctttgacagttgatcttgttggagattctgatcagaaactagcagatggaattacgacatattctatcatagcagattcttatggaagagcatccattattggtcctcttgtaacggagcatgccaaaggaggaaaatgcattgtttttacacaaacaaaacgagatgctgatcgcctttcatatgcattggctagaagcttcaaatgtgaagctttacacggtgatatatcccagagtcagagggaaagaacgcttgctggtttccgagatgggcatttcaatattcttgttgcgactgatgttgctgcccgtggacttgatgtacctaatgtcgatttgatcattcactatgagcttcctaataacacggagacatttgtccatcgaaccgggcgaacgggtcgggctggaaagaaaggaagtgctattctgatctacagtcaagatcaatccagggctgtaaaaataattgagagagaagttgggagccgattcactgagctccctagcattgctgtggaacgtggaagcgcaagcatgtttgaaggaataggttctcgatccggtggttcctttggaggaggcatgagggatcgtggttcaagctttggtggtcgttcaggcggtggtggttatggtggcagcagtggtggttatggtggtgggcgttcaggcggatcaagcaaccgttattctggtgattctgaccgttctggttttgggagcttcggtatgcgttctcctgagggatatggttcggatcgttcatctcagtcaggtggaaggagcagctttggtggtggtcgttcaggcggatcatcaaacaatcgttcctctggtttcggggactttggctctgaccgttcttctcagtcaggcggaaggagcagctttggtgggtttggatcaaatgatgggaaaagatcttactga

SEQ ID NO: 3599 - protein, 616 aa, Arabidopsis thaliana [sequence omitted]

SEQ ID NO: 3600 - DNA, 1614 bp, Arabidopsis thaliana
  CDS (1)..(1614)
atggctggacaaaagcaagagcttcccgtctccggcgaacctttagccgtcgagagtccgatgaccaacaagaagaagaagaaaagcaagaagaacaaacatacagaggaaaatcatgaagtcgaagaagtgcctcaagaggtcactaatggtgtagaggaagagttgagtaataaagagaagaagaagaaacgtaagagagaggagaaagagtctgagaagaataagaagaaggatgtcccggagaagaagcttgaagctgaggatttaggagaaggagagagtgaacaacagaaggttgttgtgactgggaaaggtgtggaagaagcaaagtacgcagctttgaagacttttgctgaatcgaatttgccggagaatgttttagattgttgtaagactttcgagaagccgtctccgattcagtcacatacgtggccgtttttgttagatgggcgtgatcttatcgggattgcgaaaactgggtcaggtaagacattggcttttgggattcctgcgattatgcatgtgttgaagaaaaataagaagattggtggaggatcaaagaaggttaatcctacttgtttagttctttctcctacacgagaattggctgttcagatttctgatgttttgcgtgaagctggagaaccgtgtggtttgaaatcgatttgtgtgtatggtggaagctctaaagggcctcaaataagtgcaattcgatctggagttgatattgtcattggtacgcctggtcgtttgagagacttgattgagtctaatgtgcttcgtctctcggatgtttcctttgtcgtattggatgaagcagatcgaatgcttgatatgggtttcgaggaacctgtccggtttatattgagtaacacaaataaagttcgtcaaatggttatgttcagtgcaacttggcctttggatgttcacaaattggcccaggaattcatggatccaaatccaatcaaggtgatcataggttctgtagacttagctgccaaccacgacgttatgcaaatcattgaggtcttggatgaacgtgcgcgtgatcagcgtctcattgcattactagaaaaataccataaatctcaaaagaacagggttttggtatttgctttatacaaggtggaagctgaacgtctcgagcgttttcttcagcaaagaggttggaaagctgtatctatacacggaaacaaagcacagagcgaacgtaccaggtctttatcattgttcaaagaaggatcctgcccgttactggtggctactgatgttgcagcaagagggcttgatatcccggacgtggaagttgtgataaactacactttccctttaacaacagaggattatgtacacagaatcgggaggacaggaagagcgggtaaaaagggcgttgcacacaccttcttcacgccactgaacaagggtcttgcaggagaacttgtgaatgttcttagggaagcaggacaagtagtgccagctgatcttttgaagtttggcactcatgtaaagaaaaaggaatcaaaattgtatggagctcatttcaaagaaatagctgctgatgctcctaaagctacgaagatcacattcgataattctgatgacgaagactag

SEQ ID NO: 3601 - protein, 537 aa, Arabidopsis thaliana
MAGQKQELPVSGEPLAVESPMTNKKKKKSKKNKHTEENHEVEEVPQEVTNGVEEELSNKEKKKKRKREEKESEKNKKKDVPEKKLEAEDLGEGESEQQKVVVTGKGVEEAKYAALKTFAESNLPENVLDCCKTFEKPSPIQSHTWPFLLDGRDLIGIAKTGSGKTLAFGIPAIMHVLKKNKKIGGGSKKVNPTCLVLSPTRELAVQISDVLREAGEPCGLKSICVYGGSSKGPQISAIRSGVDIVIGTPGRLRDLIESNVLRLSDVSFVVLDEADRMLDMGFEEPVRFILSNTNKVRQMVMFSATWPLDVHKLAQEFMDPNPIKVIIGSVDLAANHDVMQIIEVLDERARDQRLIALLEKYHKSQKNRVLVFALYKVEAERLERFLQQRGWKAVSIHGNKAQSERTRSLSLFKEGSCPLLVATDVAARGLDIPDVEVVINYTFPLTTEDYVHRIGRTGRAGKKGVAHTFFTPLNKGLAGELVNVLREAGQVVPADLLKFGTHVKKKESKLYGAHFKEIAADAPKATKITFDNSDDED

SEQ ID NO: 3602 - DNA, 1833 bp, Arabidopsis thaliana
  CDS (1)..(1833)
atgattagcacagtacttcgccgatctatccttggtacgtcaaggcgtactctcgccgcttcggtgacctccattaacgcagctctatttcataaccttgctccagccgccgccacagtctccgatctagcaaatggagctactaatgtcaagtctctcccttcgaattcgagcccttttggtgttaaagtgagagactttcatgttaaatctgtaccgtcggagtttagatcgtcgattgtttcttctgcgggattcgcggctcaagagtatgctccttcttatgagaacgatggagggattggagattcggagagtgttggtagcagcggtggtggtgatgggcttgcgatagctgatcttggtatatctccggagattgttaaagctttgaagggtaggggtattgagaaactctttcctattcagaaagctgtgttggagccagcgatggagggtcgtgatatgattggccgtgcaaggactggaacgggaaagacacttgcttttgggattcctattattgacaaaatcatcaaattcaacgctaaacatggtcgtgggaagaatcctcagtgcttggttttggcaccgacgagggagcttgctcgtcaggttgagaaagagttcagggaatctgctccaagtttggatactatttgtctctatggaggtacaccaatcgggcaacaaatgagggagctgaactatggtattgatgtggcggttggaactcctggtcgtatcattgatctgatgaaaaggggagctttgaatctatcagaggttcagtttgtggttcttgatgaagctgatcagatgcttcaagttggatttgcggaagatgttgaaataatattgcagaagttgccagcgaagcgtcagagtatgatgttttctgcaacaatgccaagttggatcagatctctcaccaagaagtacctgaacaatcctttgacaattgatcttgttggagattcagatcagaaacttgcagatgggattactatgtattctatcgctgcagattcttatggaagagcatccatcattggtcctcttgtaaaggaacatggcaaaggaggaaaatgcattgtctttacccaaacaaaacgtgatgcagatcgccttgcatttggattggcaaaaagctataaatgtgaagctttacacggtgacatatctcaagctcagagagaaagaacacttgctggtttcagggatgggaatttcagtattcttgttgcaactgatgttgctgcccgtggacttgatgtacctaatgtcgatttagtaattcattatgagcttcctaataacacggagacgtttgttcaccgaacggggcgaactggtcgtgctggaaagaaaggaagcgcgattctcatccacggtcaagatcaaaccagggctgttaaaatgattgagaaagaagtcggaagcagattcaatgagctgcctagcattgctgtggaaagaggaagcgcaagcatgtttgaaggagtaggtgctagatctggtgggtcgttcggaggaggtcgatcaggcggtggtgggtatggtagttacggtagcagcagtggccgttcaggtggtggtagttatggaggttatggtggcagcagtggccgttcaggtggtggtggtggtagttatggaggttcagggggatcaagcagccgttactctggtggttcagaccgctcatctggtttcggaagctttggttcaggcggttcttcaggaggatttggttcagaccgttcttctcagtcaagtggaaggagcagctttggtgggtttggatcaaacgatggtaaaagatcttactga

SEQ ID NO: 3603 - protein, 610 aa, Arabidopsis thaliana
MISTVLRRSILGTSRRTLAASVTSINAALFHNLAPAAATVSDLANGATNVKSLPSNSSPFGVKVRDFHVKSVPSEFRSSIVSSAGFAAQEYAPSYENDGGIGDSESVGSSGGGDGLAIADLGISPEIVKALKGRGIEKLFPIQKAVLEPAMEGRDMIGRARTGTGKTLAFGIPIIDKIIKFNAKHGRGKNPQCLVLAPTRELARQVEKEFRESAPSLDTICLYGGTPIGQQMRELNYGIDVAVGTPGRIIDLMKRGALNLSEVQFVVLDEADQMLQVGFAEDVEIILQKLPAKRQSMMFSATMPSWIRSLTKKYLNNPLTIDLVGDSDQKLADGITMYSIAADSYGRASIIGPLVKEHGKGGKCIVFTQTKRDADRLAFGLAKSYKCEALHGDISQAQRERTLAGFRDGNFSILVATDVAARGLDVPNVDLVIHYELPNNTETFVHRTGRTGRAGKKGSAILIHGQDQTRAVKMIEKEVGSRFNELPSIAVERGSASMFEGVGARSGGSFGGGRSGGGGYGSYGSSSGRSGGGSYGGYGGSSGRSGGGGGSYGGSGGSSSRYSGGSDRSSGFGSFGSGGSSGGFGSDRSSQSSGRSSFGGFGSNDGKRSY

SEQ ID NO: 3604 - DNA, 1887 bp, Oryza sativa subsp
  CDS (1)..(1887)
atgtactctatccttcgccgcgcggcgccgctccggcggcgcgccgtttccgccctggccgccgcggttctccggcgggaggaggcggcggcggaggtggtcgtgtcgcggcgggcgacgatcccggcggcgtggttccactcctccccggcgtggctggggttccgggagacgggggccgcgggggcggcggcgaggccgcagtacgcggcggatgaggggttgttctacgaggaggataagaggggggcgaaggcgggtggagttgctgcgggcggcgcggaggaggggttggaggtggccaagctcgggatctcgcccaagatcgtcagccagctcgcctcgcgcggcataaccaagctgttcccaatccagagagctgtccttgaaccagcaatgcaaggaaaggacatggttggtcgtgccaaaacaggtacaggaaagactttggcttttggaatccccatactggacgcaattattcggcacaatgaaaagaatagccctggtaaatttcccttggctattgttttggccccaacaagagaactcgcgaaacaagttgagagggaattttctgattcttccaatgtggaaacgatctgtgtatatggtggaactccaattagccagcaaataagacaactcaattatggagttgatgttgttattgggacaccaggacgagtaattgacctgcttaaaagaggtgctctgaatctgtcagaggtccggtttgttgttcttgatgaagcagaccagatgttgtcagtgggttttgatgaagatgttgagacaattttggatagagtacctccaaaacgtcaaaccttgatgttctctgcgactatgccaacttggattcagagactcacccagaaataccttaagaatcctgttacaattgaccttgtgggtgaagatgatcagaagctagcagaaggaatcagtctttattctatcgcttcagagggccatgccaaacctgctgtccttggagaattgattaaggagcatgcaaaaggtggtaaatgcattgtatttacacaaacaaaaagagatgctgatcgattgtcctacaccatgggtcggagtttccagtgccaggcccttcatggggacatcacacaagcccaaagagagagaacattaaaaggattccgtgaaggccattttaatattttgattgccactgatgttgctgctcgtggtttggatatcccaaatgtagacttggtgatacattttgaattgccaaactcctcggaattgtttgttcacaggtctggccgaactggccgtgctggaaagaagggtaaggcaattgttatgcacagctatcaacaaagtagagctatcaggatggttgagaatgatgttggctgcaaatttacagagcttccaaagattaatgttgaaggttctgacttgatgagtggtggctttgattccttcggtggtggtggatttggtcgtgaagggggtgggtcctatgggcgtcgtggtagttttggcagctcttcaagccgaggcggtgggtttggtgattcagggtttggtcgttcaggtggtggatttggccgttctggtggtggaggatttggccgttccagtggtggtggcttcggtgattctgggtttggccgttcaggtggtggtggtttcggagactcaggatttggtcgctcaggtggtggcggttacggtgattcaggatttggtagttccggcggtggctcaggccgttctggttttggccggtcaggtggatttggagattctggctcaggtaggtttggtgggggatttggtaactctggctcaggcagttttggcaactttggcggcaacaattctggacaatccggtgggtttggctcctcttag

SEQ ID NO: 3605 - protein, 628 aa, Oryza sativa subsp
MYSILRRAAPLRRRAVSALAAAVLRREEAAAEVVVSRRATIPAAWFHSSPAWLGFRETGAAGAAARPQYAADEGLFYEEDKRGAKAGGVAAGGAEEGLEVAKLGISPKIVSQLASRGITKLFPIQRAVLEPAMQGKDMVGRAKTGTGKTLAFGIPILDAIIRHNEKNSPGKFPLAIVLAPTRELAKQVEREFSDSSNVETICVYGGTPISQQIRQLNYGVDVVIGTPGRVIDLLKRGALNLSEVRFVVLDEADQMLSVGFDEDVETILDRVPPKRQTLMFSATMPTWIQRLTQKYLKNPVTIDLVGEDDQKLAEGISLYSIASEGHAKPAVLGELIKEHAKGGKCIVFTQTKRDADRLSYTMGRSFQCQALHGDITQAQRERTLKGFREGHFNILIATDVAARGLDIPNVDLVIHFELPNSSELFVHRSGRTGRAGKKGKAIVMHSYQQSRAIRMVENDVGCKFTELPKINVEGSDLMSGGFDSFGGGGFGREGGGSYGRRGSFGSSSSRGGGFGDSGFGRSGGGFGRSGGGGFGRSSGGGFGDSGFGRSGGGGFGDSGFGRSGGGGYGDSGFGSSGGGSGRSGFGRSGGFGDSGSGRFGGGFGNSGSGSFGNFGGNNSGQSGGFGSS

SEQ ID NO: 3606 - DNA, 2127 bp, Oryza sativa
  CDS (1)..(2127)
atggcgtcggcggcggcggcggcggcgacggcgagggggccgcggtacgcgccgccagatccgacgctgcccaagccgtggagggggctcatcgacggcaacaccgggtacctctacttctggaacccggagaccaaggccgtgcagtacgaccgccccacggcgccgccgccctcctcccccccggcgcagcagcctccggagaggcctaggaacagcgatcctgctgagtcgcaggcgcaggctggagcgagccgaacgcagaatgctgctcctgctgatgatagggcaaggaatgatcatttgaatgatcatttcgagcggcgcacggaagcggcgggaagtcatgcgcagaacgtgcctttcactgagcaaaatactaggagcaacccttcttcgcagccgtgctctgcagctggagtataccctgcacagaatgtattttcagaggctgccagtggagaccgcacctcaccagaagcgtatcgtgctaagcacgagatcactattgtcggaaatgaggctccagctccattcatgacatttcagtccacaggtttccctccagagattctaagggaggtacagcaagcgggattctctgcaccaactcctatccaagctcaatcatggccaattgctcttaggaatcgtgatattgtagctgtggcgaagacaggttccggaaaaacactgggttatctcattccagggtttatccttcttaagcgccttcaacataattcaagggatggtccaacggtattagtgctttctccaacaagggaattggcaacacaaatccaagatgaagcgaaaaagtttgggagatcgtcaagaatatcgtctgtttgtttatatggaggtgctcctaaaggtcctcagctaagagatctagagcgtggtgcagacattgtggttgcaactcctggaagattgaatgacattttagaaatgcgaagagtgagcctacatcaagtatcttatcttgttcttgatgaggctgaccgcatgcttgatatgggttttgagccacaaataagaaaaattgtgaaacaagtacaacccaaacgacagactcttatgttcactgccacttggccaaaagaggtgaggaaaatagcctcagatttgctgtccaatccagtccaagttaacattgggaacactgatcaactggttgccaataagtcaatcactcagtatgtggatgttatcacacctccggagaaatcgaggcggcttgatcaaatcctaaggtcacaggaacctggatcgaaaatcataatattttgctccacaaagaggatgtgtgatcagctggctcgaaacctagcacggcagtatggtgcttctgctattcatggtgataaatcacaagccgagagggattctgtgttgagtgaatttcgaagtggcagatgccctattcttgttgctactgatgtggctgcccgaggcttggacataaaggatatcagagttgtggtcaactacgatttcccaacaggtgttgaggattacgtccatagaattgggagaacaggacgggctggagcgactggagttgcctatacattcttctgtgatcaggattcaaagtatgcttcagatctcgtgaagattttggagggtgcaaaccagtctgtttcgcaacagttgagagatatggtctcccgtggagggtatggtggaaggtcacggcgctgggcatcttcagatgactcttatggtggtcgaggatatgattcaggctatacttcaaggtcgactgacaactataacagtggttatggcagtcagtctgggaatggttctagctttcatagtagcttccataacagcaacagtggcaatcagtttggcgatacttctggcttccaaaccagctttcataacagcagcagcaacaatcaaaccagtgacaatccaagctttcatgccagcagcaacaacgatcaacctggtgatggtctcagctttcatgccaggttctatagctcttctcgaggcagcgatcagagcagaacaaacaatgctggctttcgtgatagaagtaggagtcctccaagcaatcgcaaccatgaagatcctgggtccaaggctgttggtgtctccaactggtaa

SEQ ID NO: 3607 - protein, 708 aa, Oryza sativa
MASAAAAAATARGPRYAPPDPTLPKPWRGLIDGNTGYLYFWNPETKAVQYDRPTAPPPSSPPAQQPPERPRNSDPAESQAQAGASRTQNAAPADDRARNDHLNDHFERRTEAAGSHAQNVPFTEQNTRSNPSSQPCSAAGVYPAQNVFSEAASGDRTSPEAYRAKHEITIVGNEAPAPFMTFQSTGFPPEILREVQQAGFSAPTPIQAQSWPIALRNRDIVAVAKTGSGKTLGYLIPGFILLKRLQHNSRDGPTVLVLSPTRELATQIQDEAKKFGRSSRISSVCLYGGAPKGPQLRDLERGADIVVATPGRLNDILEMRRVSLHQVSYLVLDEADRMLDMGFEPQIRKIVKQVQPKRQTLMFTATWPKEVRKIASDLLSNPVQVNIGNTDQLVANKSITQYVDVITPPEKSRRLDQILRSQEPGSKIIIFCSTKRMCDQLARNLARQYGASAIHGDKSQAERDSVLSEFRSGRCPILVATDVAARGLDIKDIRVVVNYDFPTGVEDYVHRIGRTGRAGATGVAYTFFCDQDSKYASDLVKILEGANQSVSQQLRDMVSRGGYGGRSRRWASSDDSYGGRGYDSGYTSRSTDNYNSGYGSQSGNGSSFHSSFHNSNSGNQFGDTSGFQTSFHNSSSNNQTSDNPSFHASSNNDQPGDGLSFHARFYSSSRGSDQSRTNNAGFRDRSRSPPSNRNHEDPGSKAVGVSNW

SEQ ID NO: 3608 - DNA, 2379 bp, Oryza sativa
  CDS (1)..(2379)
atgtcggcagggaccgccccggccgcgccgcggtacgcgccggacgacccgtcgctccccaagccgtggcgcgggctcgtcgacggcaccaccggctacctctactactggaacccggagaccaacatcacccagtacgagaagccgctgccgcccgaggaccagctcccgccgcccccgccgctccccccgccgcctccccgctccggccgaggcgaccgagaccgcgaccgccgcgaccgctcccgatcccgcaccccgccgcggcgcgaccaccgggaccgcgaccgggaccgcgacaggcgccacgacgaccacaggtcggcgccttcccaccaccatcctcttccggccgccgccgccatcgccgccgatgatccctccaccgaggcgtatcgccaccgccacgagatcaccgttgtcggggacaacgtgccagctccgataacttcgtttgagactggtggattcccaccggaaatcctcaaggagatacaacgtgctggattctcaagtccaacgccaatccaagctcagtcatggccaattgccttgcagtgtcaagatgttgtagctattgcaaagacaggatctggaaaaactcttgggtatctacttcctggatttatgcatattaaacgcttgcaaaacaacccaaggtctggtccaacagtgctagttttggcaccgacaagggagcttgcaactcagattttggaagaagctgtgaaatttggcagatcatcaagaatttcttccacgtgtctatatggtggtgctccaaaaggcccccagctaagagatttggatagaggggtcgatgtcgttgttgctacaccaggaaggttgaatgacatcctagaaatgcgaaggataagccttaagcaagtgtcgtaccttgttctagatgaagctgaccgtatgttggacatgggatttgaaccacaaattcggaagatagtgaaagaaattcctcctcgtcggcaaaccctcatgtacactgctacttggcctaaggaagtccgacgaattgcagaggatcttcttgttcaccctgtccaggtgaccattggaagtgttgatgagcttgttgctaatagtgctattactcagaatgtggagctgatcacaccgtccgaaaagcttcgccgtctggagcaaattttgcgatcccaggattcaggttcgaaggtactaatattctgtaccactaagagaatgtgcgaccaacttgcaaggacacttactaggcaatttggagcttctgccattcatggtgataagtcccaaagtgaaagagagaaggtcctgagccattttagatctgggcgatctcctattttggttgcaacagatgttgctgcacgaggcttagacatcaaagatatcagggttgtgatcaattatgatttccccactggcattgaagattatgttcaccggattggcaggactggaagggctggtgccactggtgtggcctatacgtttttctgtgaccaggattcaaaatatgctgctgatcttattaaaattctggaaggcgcaaaccaacgtgtgcctcgtgacttggcggacatggcctctcggggtgggcgtggtggtaggaagcgtaaccggtgggcaacccgctctgataggggtggttcgcattctgaactggattctaggtatggtggaagagatggtctgtcagggtcttctggcagattggatagtagtcgcagtagtcgcaggcatgactatggtgatgatggacggtctcgcaggtctgggagaggtcgcagtaggagccgtagcagaagtgacagtgataggtatagccgaagtcctaagaggtcacgccgtcatagccgtagcaggaccaggagtcggagccgaagcaggagcaggagctacactaggaaccgtcgtgctagccgcagcaggagccgtagccctggtgctagccgtaggcatgaaagaagcgctactggctctgggtctgcactgccagactctgggcacggtgagcgcaaaagaacaccagaagctgacccatcaagaaaccatacaaaccactcagacccgaaagatgaccgacacccagaggatgggaaggtgggaaaggttgatctcgatcggtcgcctactccacaagacaagtctggcccatatagtcctgcttacaatggaaaaaccagtcgctcagtgagccctggtaatcaggtggaaggaaacaacaaagctgcggaggtttctaagaatcctgatccttcatcgccaccccatcatggtaagaccagggaggacgaagaggaaggtatgatagatgaagatggagagatagctgatgatcctcgggcaaatgcaaccgtgcagaatggcggtgataattga

SEQ ID NO: 3609 - protein, 792 aa, Oryza sativa
MSAGTAPAAPRYAPDDPSLPKPWRGLVDGTTGYLYYWNPETNITQYEKPLPPEDQLPPPPPLPPPPPRSGRGDRDRDRRDRSRSRTPPRRDHRDRDRDRDRRHDDHRSAPSHHHPLPAAAAIAADDPSTEAYRHRHEITVVGDNVPAPITSFETGGFPPEILKEIQRAGFSSPTPIQAQSWPIALQCQDVVAIAKTGSGKTLGYLLPGFMHIKRLQNNPRSGPTVLVLAPTRELATQILEEAVKFGRSSRISSTCLYGGAPKGPQLRDLDRGVDVVVATPGRLNDILEMRRISLKQVSYLVLDEADRMLDMGFEPQIRKIVKEIPPRRQTLMYTATWPKEVRRIAEDLLVHPVQVTIGSVDELVANSAITQNVELITPSEKLRRLEQILRSQDSGSKVLIFCTTKRMCDQLARTLTRQFGASAIHGDKSQSEREKVLSHFRSGRSPILVATDVAARGLDIKDIRVVINYDFPTGIEDYVHRIGRTGRAGATGVAYTFFCDQDSKYAADLIKILEGANQRVPRDLADMASRGGRGGRKRNRWATRSDRGGSHSELDSRYGGRDGLSGSSGRLDSSRSSRRHDYGDDGRSRRSGRGRSRSRSRSDSDRYSRSPKRSRRHSRSRTRSRSRSRSRSYTRNRRASRSRSRSPGASRRHERSATGSGSALPDSGHGERKRTPEADPSRNHTNHSDPKDDRHPEDGKVGKVDLDRSPTPQDKSGPYSPAYNGKTSRSVSPGNQVEGNNKAAEVSKNPDPSSPPHHGKTREDEEEGMIDEDGEIADDPRANATVQNGGDN

SEQ ID NO: 3610 - DNA, 2001 bp, Oryza sativa
  CDS (1)..(2001)
atgcgtacgagccgcgtcgcgtctccccccccctcccccaaggaccatgacacgtgggccatagcaaccgacctagcccggccccacacgcttcgcatccttacccatcaaaaccaaaccacgggcctcctcaccccgccgcacgccgccttcctcccagatccaaacctccctcgtcgtctccccttcccctcctcctcctcgacccccacggcggcggcgccaccggactccggcgaaccctcgcgcgcgcgcgcacgcaccgagacgtaccgtaccggcgacatgaatccctacgacctccgctacgccgacccttcctcctaccgcgacaggcgcagcgaccttgccggggctcccgtgctcgccgcgtcggcccccgcggccgccaacccctacgccgccgcgtacgcgcccgcgccggctgctcccgtggcccccgctggtggcgacttctcgcgcttcggcgggagaggccgtggtggaggcgcgggcggcggtgggtggggtagaggtggtggtggtggtggtggcgctggcggataccgaggcggcggtgggagaggaggtggaagggacgcgctggactcgctctccttgccgaagcctgacttccggagccttatacccttcgagaagaacttctatgtggagtgccccgccgtgcaggccatgtcagacatggatgtgtcgcagtatcgtcgccagcgtgatatcactgttgaaggccacgacgtgcccaagccggttcgctacttccaggaggccaacttcccagattactgtatgcaagcaatagccaagagtggattcgtagagcccacgcctattcagtcacaaggttggccaatggctttgaagggcagggacatgatcggtatcgcacaaactggctctgggaaaacactatcttaccttctccctgggttggttcatgttggtgcacagcctcgactagaacaaggtgatggcccaattgttctgatccttgctcctacaagagaactggctgttcaaatacaacaagaatctggcaaatttggatcatactcaagaactagaagcacttgtatctatggtggagcacctaagggaccacaaatacgtgaccttaggagaggggttgagattgtcattgcaacacctggtcggttgatcgatatgctggaaggtggtcacactaacctgcgaagagtaacatacctcgtcctggatgaggctgaccgcatgcttgacatgggttttgagccccagattcgtaaaatagtggcacagatccggccagacaggcaaaccttgtattggagtgccacttggccaagagaagtagaatccttggctagacaatttctgcagaacccatacaaggtaatcataggatcacctgatctgaaagctaatcattccatacagcaaattattgaggtcatatctgaacacgaaaagtatcccagactcagtaaacttttatctgatctaatggatggaagcagaatcttgatatttttccaaactaaaaaggactgtgacaaggtcactcgtcaacttagaatggatggatggccagcattatctattcatggtgacaaagctcaagcagaaagggactatgttctggcagagttcaagagtgggaaaagtcctataatggctgccacagatgtagcggcacgtggtcttgatgtcaaggatattaagtgtgtgataaattttgattttccaacaactcttgaagattatattcacagaataggtcgaactggccgcgctggtgctagtggaactgcattcacctttttcacactctccaatgcaaaattctccaggaatcttgttaagatcttgagggaagctggccaggttgtgaatccagcgctagaatctatggctaaatctgccagttctatgggaggaggcaatttccggtcaagggggcgtggtgggtttggtaacagatctggctcaaatagcattcccataagaggaagaaggccatactga

SEQ ID NO: 3611 - protein, 666 aa, Oryza sativa
MRTSRVASPPPSPKDHDTWAIATDLARPHTLRILTHQNQTTGLLTPPHAAFLPDPNLPRRLPFPSSSSTPTAAAPPDSGEPSRARARTETYRTGDMNPYDLRYADPSSYRDRRSDLAGAPVLAASAPAAANPYAAAYAPAPAAPVAPAGGDFSRFGGRGRGGGAGGGGWGRGGGGGGGAGGYRGGGGRGGGRDALDSLSLPKPDFRSLIPFEKNFYVECPAVQAMSDMDVSQYRRQRDITVEGHDVPKPVRYFQEANFPDYCMQAIAKSGFVEPTPIQSQGWPMALKGRDMIGIAQTGSGKTLSYLLPGLVHVGAQPRLEQGDGPIVLILAPTRELAVQIQQESGKFGSYSRTRSTCIYGGAPKGPQIRDLRRGVEIVIATPGRLIDMLEGGHTNLRRVTYLVLDEADRMLDMGFEPQIRKIVAQIRPDRQTLYWSATWPREVESLARQFLQNPYKVIIGSPDLKANHSIQQIIEVISEHEKYPRLSKLLSDLMDGSRILIFFQTKKDCDKVTRQLRMDGWPALSIHGDKAQAERDYVLAEFKSGKSPIMAATDVAARGLDVKDIKCVINFDFPTTLEDYIHRIGRTGRAGASGTAFTFFTLSNAKFSRNLVKILREAGQVVNPALESMAKSASSMGGGNFRSRGRGGFGNRSGSNSIPIRGRRPY

SEQ ID NO: 3612 - DNA, 1914 bp, Oryza sativa
  CDS (1)..(1914)
atgcgatcttcatgggctgattcagttgcgaacgccgaggaatcggcgcccgcgactggtgctgctcccacccctgttgctaatcaccagaactcacgccccactcgcagcgcatacgtgcctcctcacctccgtggccaggcaccaaccacaactgcagctccagctccagctccaggaccagctgctgtccagccctcagcttctgtacagccttctggttacgcagctattgttggtggctctcgctgggctggccctgccagtggtgatggtactggcgctgtaggtggcccacgccagagcgttggtggtcgtggtgggggtgggggtgggggtgggggttggaactcccgccctgggtgggaccggagagaccgtgaacctaacccttttgccaatagcgaggcagaggaagccacagaggttgattttgatacggcaaacactggcatcaactttgatgcctatgaggacattcctgtggaaacaagtggccatgatgtgccaccgccagtcaatactttcgcagagattgatttgggtgatgcgctgaatgagaacatacggaggtgcaaatatgtgaaacctacgccagtgcagcggtatgccattccaatctccattgcagggcgggatctcatggcttgtgctcagacagggtctggaaagacagccgccttttgtttccctatcattagtgggattatgagctctaggccaccacagaggccaaggggatcgaggactgcataccctcttgcattgattttatcccccactcgcgaattatcagtccaaattcatgaagaagcaaggaaattcgcataccagactggtgttagggtggttgttgcgtatggtggagcaccaatacatcaacagttgagggaattggaaaggggcgttgaaatccttgtggcaactcctggtcggttgatggatctgctggagagggctagagtatcactgcaaatggtgaagtacttagctcttgatgaagctgatcgaatgcttgacatggggttcgagccgcaaattcgtaaaattgttgagcagatggacatgccccctcgcggtgtgaggcagacaatgttgtttagtgctacttttccaaaagaaatacagcgcatggcttcagatttccttgcggactacatcttccttgctgtaggaagagttggttcaagtactgacttgattgctcaaagggtagagtttgtccttgaagcggataaaagaagttacctcatggatctcctccatgcccaaaaagcgaatggtactcatgggaagcaagcgcttactctggtctttgtggagacaaagaggggagctgatgctttggagaactggctttacacaaacgggttccctgcaacaagtattcatggcgaccgaacacaacaggaaagagagtacgcgcttagatcattcaagagtggagcaacacccatccttgttgcgactgatgtagctgcccgtggacttgacatacctcatgttgcccatgtcatcaattttgacctcccaaatgacatagatgactatgttcatcgtatcggacgaacaggacgagcagggaagtctggcttggcaactgcatttttcaacgagggcaatctatccctggcgaggccgttatgtgagctaatgcaggaagcaaaccaggaggttcctcaatggcttgaacgatactcggcccgttcttcgttcggaggtggtggtggcagaaaccgccgatcaggcggtgcccgttttggtggccgtgacttccgccgcgacaataggggtggaggcggcggcggttatggtggtggcggtggtggctatggaggcggcggttatggagggggcggtggatatggcggtggctatggtggtggtcaaggctcaactagttcgtgggactga

SEQ ID NO: 3613 - protein, 637 aa, Oryza sativa
MRSSWADSVANAEESAPATGAAPTPVANHQNSRPTRSAYVPPHLRGQAPTTTAAPAPAPGPAAVQPSASVQPSGYAAIVGGSRWAGPASGDGTGAVGGPRQSVGGRGGGGGGGGGWNSRPGWDRRDREPNPFANSEAEEATEVDFDTANTGINFDAYEDIPVETSGHDVPPPVNTFAEIDLGDALNENIRRCKYVKPTPVQRYAIPISIAGRDLMACAQTGSGKTAAFCFPIISGIMSSRPPQRPRGSRTAYPLALILSPTRELSVQIHEEARKFAYQTGVRVVVAYGGAPIHQQLRELERGVEILVATPGRLMDLLERARVSLQMVKYLALDEADRMLDMGFEPQIRKIVEQMDMPPRGVRQTMLFSATFPKEIQRMASDFLADYIFLAVGRVGSSTDLIAQRVEFVLEADKRSYLMDLLHAQKANGTHGKQALTLVFVETKRGADALENWLYTNGFPATSIHGDRTQQEREYALRSFKSGATPILVATDVAARGLDIPHVAHVINFDLPNDIDDYVHRIGRTGRAGKSGLATAFFNEGNLSLARPLCELMQEANQEVPQWLERYSARSSFGGGGGRNRRSGGARFGGRDFRRDNRGGGGGGYGGGGGGYGGGGYGGGGGYGGGYGGGQGSTSSWD

SEQ ID NO: 3614 - DNA, 1917 bp, Oryza sativa
  CDS (1)..(1917)
atgcgatcttcatgggctgactcagctgcgaacgccgaggaatcggcgcccgcggctgctgctaaccacggcaactcgcgcctcccgcgcagctcatacgttcccccgcacctccgcggccaagcggctcctgcagcgccggcgcaagctggcgcgctgccctcggccgccgccgccgcgcagccttctgttggccagcctggtgtggttggtggccctcgctgggcgggcattgtgaatggtggtggtggtggtggtggtgggagcgtaggtggttctcgccagggctttggtgctggtggccgcggtggaggaggtggtggtggcggtggtgcatggaactcccgccctgggggttgggaccgaagagaccgtgaaccggatccttttgccaatagtgaggctgcggaagttgactttgagggcgagaacactggcatcaattttgaagcctatgaagacatccctgttgagacaagtggccatgatgtgcccccaccagccaatacatttgcggagattgatttgggtgacgcgctgaatgagaatatcagaaggtgcaaatatgtgaagccgacaccagtgcagcgttatgccatcccaatctccattgcaggacgggatctcatggcctgtgcacaaacaggatctggaaagacagcagccttttgtttccctatcatcagtggaatcatgaggtcaaggccaccccccaggtcacggggttccaggaccgcatatcctcttgcactaatcctatctcccactcgtgagctttcggtccaaatccatgaagaagcaaggaagtttgcataccagactggtgttaaagtggtcgttgcatacggaggagcgccaattactcagcagctgagggagttagaaagaggtgttgaaatccttgtggcaactcctggccgcttaatggatttgttggagagggctagagtctcactgcagatgataaagtatttagctcttgatgaagctgatcgaatgcttgatatgggatttgagccccagatacgtaaaatagttgagcagatggacatgcctccacgtggagagaggcagacgatgttgtttagtgctacatttccaaaggagatacagagaatggcttcagatttcctcgccgattacatatttcttgctgtcgggagagttggttcaagtactgatttaattgtccagagggttgagtttgtccttgatgctgacaaaagaagctacctcatggaccttcttcatgcacaaagggcaaatggtacacatgggaagcaagctcttaccttggtctttgtggagacaaagaggggagctgatgccctggagaactggctttataacaatgggttcccagcaactagcattcatggagacagaacacaacaggaaagagagtatgccctgagatccttcaagagtggagcaactcccatcctcgtggcaactgatgttgctgctcgtggactggatatacctcatgttgcccacgtcattaattttgacctcccaaatgatatagacgactatgtccatcggataggaaggacagggcgtgcagggaaatctggtctggcaactgcatttttcaacgagagcaacaccccactggcaaggccgctgagtgagctcatgcaggaggctaaccaggaggttcctcaatggcttgagaggtatgctgcccgttcatcgtttggaggcggcggcgggagaaaccgcaggtcaggtggtggtgctaggtttggtggccgggacttccgacgagacagaggcagtggtggtggagggtatggtggtggaggtggaggttatggaggtggcggatatggtggtggtggcggtggaggcggctatggtggcggtagcagctacggaggtggcgggcaaggtttttctagtgcttgggactga

SEQ ID NO: 3615 - protein, 638 aa, Oryza sativa
MRSSWADSAANAEESAPAAAANHGNSRLPRSSYVPPHLRGQAAPAAPAQAGALPSAAAAAQPSVGQPGVVGGPRWAGIVNGGGGGGGGSVGGSRQGFGAGGRGGGGGGGGGAWNSRPGGWDRRDREPDPFANSEAAEVDFEGENTGINFEAYEDIPVETSGHDVPPPANTFAEIDLGDALNENIRRCKYVKPTPVQRYAIPISIAGRDLMACAQTGSGKTAAFCFPIISGIMRSRPPPRSRGSRTAYPLALILSPTRELSVQIHEEARKFAYQTGVKVVVAYGGAPITQQLRELERGVEILVATPGRLMDLLERARVSLQMIKYLALDEADRMLDMGFEPQIRKIVEQMDMPPRGERQTMLFSATFPKEIQRMASDFLADYIFLAVGRVGSSTDLIVQRVEFVLDADKRSYLMDLLHAQRANGTHGKQALTLVFVETKRGADALENWLYNNGFPATSIHGDRTQQEREYALRSFKSGATPILVATDVAARGLDIPHVAHVINFDLPNDIDDYVHRIGRTGRAGKSGLATAFFNESNTPLARPLSELMQEANQEVPQWLERYAARSSFGGGGGRNRRSGGGARFGGRDFRRDRGSGGGGYGGGGGGYGGGGYGGGGGGGGYGGGSSYGGGGQGFSSAWD

SEQ ID NO: 3616 - DNA, 1872 bp, Oryza sativa; identical to SEQ ID NO: 3450
  CDS (1)..(1872)

SEQ ID NO: 3617 - protein, 623 aa, Oryza sativa
MATPSRTSWADVADADPAPAPAPAANGPARPDRSSYVPPHLRNRGASSGGGAAAPPPSSSSSSAPPPRAAPGLLAPRPAAAGMGRMGGGGGGGGFGGPRRWDREPNPFGNDGDAAAGAGDEPEVFDAHQNTGINFDAYEDIPVETSGREVPPPVGTFAEIDLGQALNDNIRRCKYVRPTPVQRYAIPISLAGRDLMACAQTGSGKTAAFCFPIISGIMRGPPAQRPQRGGMRTACPLALILSPTRELSMQIHEEARKFSYQTGVRVVVAYGGAPINQQLRDLERGVDILVATPGRLVDLLERARVSLQSIRYLALDEADRMLDMGFEPQVRRIVEQMDMPPPGARQTMLFSATFPKEIQRMASDFLENYIFLAVGRVGSSTDLIVQRVEFVQEADKRSHLMDLLHAQRDSATPGKPTLTLVFVETKRGADSLEHWLCMNGFPATSIHGDRNQQEREYALRSFKSGHTPILVATDVAARGLDIPHVAHVVNFDLPNDIDDYVHRIGRTGRAGKSGLATAFFNENNSSMARSLAELMQESNQEVPAWLSRYAARPSYGGGGGRNRRSGGGSRFGGRDFRRDSSSGRGGGDYYGGGSSGGAGGYGGSSAYGGGGYGGGAGAPSAWD

SEQ ID NO: 3618 - DNA, 1788 bp, Glycine max
  CDS (1)..(1788)
atgttaaccgcagtcctcagaagaaccagttccaccctctcaaggcgcggtttccccgccgccttaatctctgcctccaccgccaccgccaccgccaccgccggcaaccacttccggctactctccgctgccgtcaattccagaaccttccactccaaccctggccccttgaatttccgcgcctcttcatgtcaccgcgcggaatacgccgtggacgatttcccttacgaagaagggtccaaaggaaacgccgacgaaggcctcgagatcgcgaagctcggaatttcgcaggatattgtctccgctttggccaagaaaggcatcaccaagctcttccccattcagagggctgtgttggaacctgctatgcaaggtcgtgatatgattggtcgagctagaactggaactgggaagactcttgcttttgggatacccatcatggataaggtcattcagtttaatgctaagcatgggcgggggagggatcctttggctttggtgttggctccgaccagagagcttgcgcgacaggttgaatcagagttctgtgagtcggcacctaatttggatacaatttgtgtttatgggggtacacccatttctcagcagatgaggcagcttgattatggggttgatattgctgtggggacgcctggtcggattattgaccttctcaacagaggtgcgctaaatttgaaggatgttcagtttgttgttcttgatgaagctgatcagatgcttcaggtgggctttcaggaagacgtggagaagatcttggagaggttgcccccaaaacgtcagactcttatgttctctgcaacaatgccatcttggataaagcagatttcgcgcaattacttgaataatcccctaaccattgatcttgttggagattctgatcagaaattggcagatggaatttcactgtactccattgcaactgatttgtatgttaaagcgggaattcttgcacctctaataacagaacatgcaaaaggaggaaagtgtattgttttcactcaaacaaaacgtgatgctgatcgattatcgtatgccatggcaagaagtgttaaatgtgaggctttgcatggagacatatcacaagctcaaagggagaaaactcttgctggcttcagaaatggccattttaatgttttagtggcaactgatgttgcctcacgtgggcttgatatacctaatgttgatcttgtaatacattatgatcttcccaacaattcagagatatttgttcatcgttctggacgaacaggtcgtgctggtaagaaaggaactgcaattcttgtgtatacagaagatcaatcgagggctgttaagcttatagagcgtgatgtaggcagtagattttcagagctgccacggattgctgttgatagtgcatcagcggtcatggttgatagcatgggtggcgggcgatttggttcttttggaggtaacagggatcgtcgatacggtgatatgggttttggatctggccattctgggggttacagtaaccctggttctggccgctctagctttggaaattccggtgaaaggtttggtggacagaattataatcgttttggctcatctggtggctttggttctggtcaatcaggaagtagatctggtggatcatccagcaggtctaggtttagtcgctcagatgattttgggggatttggtggttcagatcgttcgggtggttttggagattttggctcaggtcagtctagtggcttcggtggttctcgtggtagtaagcagaacaatagaagacctttttaa

SEQ ID NO: 3619 - protein, 595 aa, Glycine max
MLTAVLRRTSSTLSRRGFPAALISASTATATATAGNHFRLLSAAVNSRTFHSNPGPLNFRASSCHRAEYAVDDFPYEEGSKGNADEGLEIAKLGISQDIVSALAKKGITKLFPIQRAVLEPAMQGRDMIGRARTGTGKTLAFGIPIMDKVIQFNAKHGRGRDPLALVLAPTRELARQVESEFCESAPNLDTICVYGGTPISQQMRQLDYGVDIAVGTPGRIIDLLNRGALNLKDVQFVVLDEADQMLQVGFQEDVEKILERLPPKRQTLMFSATMPSWIKQISRNYLNNPLTIDLVGDSDQKLADGISLYSIATDLYVKAGILAPLITEHAKGGKCIVFTQTKRDADRLSYAMARSVKCEALHGDISQAQREKTLAGFRNGHFNVLVATDVASRGLDIPNVDLVIHYDLPNNSEIFVHRSGRTGRAGKKGTAILVYTEDQSRAVKLIERDVGSRFSELPRIAVDSASAVMVDSMGGGRFGSFGGNRDRRYGDMGFGSGHSGGYSNPGSGRSSFGNSGERFGGQNYNRFGSSGGFGSGQSGSRSGGSSSRSRFSRSDDFGGFGGSDRSGGFGDFGSGQSSGFGGSRGSKQNNRRPF

SEQ ID NO: 3620 - DNA, 2409 bp, Zea mays
  CDS (1)..(2409)
atgtcaggagggactggctcatccgggcgcgcggccccgcggtacgccccggatgacccgacgctgcccaagccgtggcgcggcctcgtcgacggcgccaccggctacctctactactggaacccggagacgaacgtcacgcagtacgagcggcctgtgccccccgagagccagctcctcccgcctccgcctccgttgccacccccgcctccacggagccgcgaccgccgcgacaggtccagatcccgatcccgcaccccaccccggcgcgaccacagggaccgcgaccgtgaccgtgacaggcgccacgacgagcacgcgtcctccaagacggcgtcttcccaccaccatccggctccggtagccgtcgccgacgatccttccaccgaggcataccgccgccgccatgagatcaccgtcacgggggataatgtgccgactccaataacttcatttgaggctggtggcttcccgtcagaaattctgaaggagatacaacgtgctggattcgcaagcccaacacctatccaagcccagtcatggccaattgctatgcaaaatcaagatgtagtagctattgcaaagactggatcaggcaaaactcttgggtatctacttcctgggtttatgcatatcaagcgcctgcagaacagcactaggaatggcccaacagtgctagttttggccccaacaagggaacttgcaacacagattctggatgaagctgtgaaatttggaagatcttcaagaatttcttgcacgtgcttatatggtggtgctcctaaaggtcctcagttgagagatttagatagaggggttgatgttgttgttgcaacacctggaaggttaaatgacatcttggagatgcgaaaggtaagtcttaagcaagtgtcatatcttgttctggatgaggctgatcgcatgctggacatgggctttgagccacaaatacggaagatagtgaaagagatacctcaccgtcggcaaacccttatgtacaccgctacatggcccaaggaagtccgaaggattgcagatgatcttcttgttcatcctgtacaggtgacaattggaagtgttgattcacttgttgctaatagttctattactcagcatgtagagatcataacaccctcagaaaaacaacggcgcctggagcagatattacgatcccaggattcaggttcaaagatattaatattttgtaccaccaagaggatgtgtgaccaacttgcaaggacactcaccaggcagtttggagcttcggccattcatggtgacaagtcccaaagtgaaagggagaaggttctgaatcagtttcgatctgggcggtctcccattttagtggcaactgatgttgctgcgcgaggtttggacatcaaagatatcagggtagtgatcaactatgacttccccactggtgttgaagactacgttcacaggattggcaggacaggaagggctggtgccactggtgttgcatatacatttttttgtgatcaggattcaaaatatgctgctgacctaatcaaaattctggaaggggcaaaccaacgagtgccccgtgatttagaggatatggcttctcgtggcggtggacgaggtaggaagaggaaccattgggcatcccgccctgacaggggtggttcacgttctgaactggattcaaggtacagcagcagagatggactagcatcttctgggaaatcagagagtggtcgcggcagtcgtggaagggatgataatggtagccgtggcaggtacgaccctggtgaaaccgatgggcgatctcgtaggtctactagaggccgcagtagaagccgtagcaaaagtgacagtagaagccgtagcccaagtcccaagaagtcacgtcgtcatgaaggtagacgtagcaggactaagagcaggagcaggagcaggagccgtagaaatcatggtgctagccacagcaagagtcgcagccctgtcgctagccgtaggtatgaaaagactgcttcaggatctgctcggcctaactcggggcatgcagagcacaaaagccctccaagatctcactctagggatgaccatgtgaaccactctgaccacaaggatgaccacaaggatgaccacatggaagatgggaagatggaaagggttgatcttgatcgctcgcccagcccacacgatgacaagtctgctccatatagtcctgtgtacaatggcaaagccagtggctcaatgagccccaacggtcagccagaggcaggtgccaaatttgttgaaccttctgggaaacctgagcctgcatctccagtgcgctgcagcaaaggcagagatgatgatgaggaaggtatcatagacgaggatggagagattggtgaggatgatccgcgtgcaaatgcagctgtgcagaatggtaataactga

SEQ ID NO: 3621 - protein, 802 aa, Zea mays
MSGGTGSSGRAAPRYAPDDPTLPKPWRGLVDGATGYLYYWNPETNVTQYERPVPPESQLLPPPPPLPPPPPRSRDRRDRSRSRSRTPPRRDHRDRDRDRDRRHDEHASSKTASSHHHPAPVAVADDPSTEAYRRRHEITVTGDNVPTPITSFEAGGFPSEILKEIQRAGFASPTPIQAQSWPIAMQNQDVVAIAKTGSGKTLGYLLPGFMHIKRLQNSTRNGPTVLVLAPTRELATQILDEAVKFGRSSRISCTCLYGGAPKGPQLRDLDRGVDVVVATPGRLNDILEMRKVSLKQVSYLVLDEADRMLDMGFEPQIRKIVKEIPHRRQTLMYTATWPKEVRRIADDLLVHPVQVTIGSVDSLVANSSITQHVEIITPSEKQRRLEQILRSQDSGSKILIFCTTKRMCDQLARTLTRQFGASAIHGDKSQSEREKVLNQFRSGRSPILVATDVAARGLDIKDIRVVINYDFPTGVEDYVHRIGRTGRAGATGVAYTFFCDQDSKYAADLIKILEGANQRVPRDLEDMASRGGGRGRKRNHWASRPDRGGSRSELDSRYSSRDGLASSGKSESGRGSRGRDDNGSRGRYDPGETDGRSRRSTRGRSRSRSKSDSRSRSPSPKKSRRHEGRRSRTKSRSRSRSRRNHGASHSKSRSPVASRRYEKTASGSARPNSGHAEHKSPPRSHSRDDHVNHSDHKDDHKDDHMEDGKMERVDLDRSPSPHDDKSAPYSPVYNGKASGSMSPNGQPEAGAKFVEPSGKPEPASPVRCSKGRDDDEEGIIDEDGEIGEDDPRANAAVQNGNN

SEQ ID NO: 3622 - DNA, 1872 bp, Glycine max
  CDS (1)..(1872)
atgcgaacttcatgggctgatttggctgcaaattctgcagccgaaaacgcaggtcctggttcttctgctaacaatgtgggaactggtagcactttagctcccacgcgacctgtttatgtacctccccatctgaggaaccgtcagccagcagcagaatcccctgcccctgctccagcatatagtggcccttcctctggtgctggctctagttctggtgctggtaattctggatcccgttatgctgcacccagaaatgattatcgtcctgggtatggtggtggtggtggacgtacaggtggatggggaaacaaaagtggtggatgggatcgtggcagggagcgggaagtcaatccctttgaagaagaggataacgctgaagaggcattcagtgagcaggagaatacaggaataaattttgatgcatatgaagacattccagtggagaccagtggtgacaatgtgcccccacctgtgaatacgtttgcagagattgatttgggtgaagcacttaatcagaatataagaaggtgcaaatatgtgaagccaacacctgttcagcggcatgccataccgatatctctagctggacgggatttgatggcttgtgcgcagactggttctggaaagacagctgcattctgcttcccgattatcagtggaatcatgaggggccaacctgtgcagaggccacctcgtggggtgcgtacagtgtatccgcttgcgcttgttctttctccaacgagggagttatcaatgcaaatacatgaagaggctaggaagttttcataccaaactggggttagggtagttgttgcatatggtggagcaccaataaaccagcagggagatgcaagggacacttacacagtggcttcaggggtggacattcttgttgcaactcctggaagactggtagatttgctggagagagctagagtttcactgcagatgattcgatatctggcattagatgaggcagatcggatgctggatatgggttttgagccacaaataaggaagattgtagagcaaatggacatgcctccaccaggtgccagacagactatgttgttcagtgcaacatttccaaaagagatacagagattggcttctgatttcctttcaaattatattttccttgctgttggaagagtgggttcaagtactgatttaattgtccaaagagttgagtatgttcaagagtctgacaagagaagtcacctaatggaccttcttcatgcacagagggcaaatggtgtacaaggaaagcaagctttaactttagtttttgtggagactaagaagggagctgattcgctggaacattggttgtgtcttaatggttttccagcaactactattcatggtgacaggtcacagcaggaaagagaattagccttgaggtcatttaaaagtggcaacacccccatattggttgccaccgatgttgctgcacgtggtcttgatattccccatgttgctcatgtggtcaactttgacctgccaaatgacattgatgattatgtacaccgaattggaagaacagggcgagcaggaaagaaaggccttgcaactgcgttctttaatgacaacaatgcatccctggcaagggccttagcagatctgatgcaagaagcaaatcaagaagtacctgattggctctcacggtttgctgctcgctcttcctttggtgggggaaggaaccgtcgatcaggaggaggccgttttggtggccgtgactttcgaagagagggttcttttagtaggggtggttctgattactacagtgcaggaaacaacagtagtggatatggcacttctggtgggtatggtggaggatatggtcctggggtaaccagtgcttgggattga

SEQ ID NO: 3623 - protein, 623 aa, Glycine max
MRTSWADLAANSAAENAGPGSSANNVGTGSTLAPTRPVYVPPHLRNRQPAAESPAPAPAYSGPSSGAGSSSGAGNSGSRYAAPRNDYRPGYGGGGGRTGGWGNKSGGWDRGREREVNPFEEEDNAEEAFSEQENTGINFDAYEDIPVETSGDNVPPPVNTFAEIDLGEALNQNIRRCKYVKPTPVQRHAIPISLAGRDLMACAQTGSGKTAAFCFPIISGIMRGQPVQRPPRGVRTVYPLALVLSPTRELSMQIHEEARKFSYQTGVRVVVAYGGAPINQQGDARDTYTVASGVDILVATPGRLVDLLERARVSLQMIRYLALDEADRMLDMGFEPQIRKIVEQMDMPPPGARQTMLFSATFPKEIQRLASDFLSNYIFLAVGRVGSSTDLIVQRVEYVQESDKRSHLMDLLHAQRANGVQGKQALTLVFVETKKGADSLEHWLCLNGFPATTIHGDRSQQERELALRSFKSGNTPILVATDVAARGLDIPHVAHVVNFDLPNDIDDYVHRIGRTGRAGKKGLATAFFNDNNASLARALADLMQEANQEVPDWLSRFAARSSFGGGRNRRSGGGRFGGRDFRREGSFSRGGSDYYSAGNNSSGYGTSGGYGGGYGPGVTSAWD

SEQ ID NO: 3624 - DNA, 1863 bp, Glycine max
  CDS (1)..(1863)
atgcgaacttcatgggctgatttggctgcaaattctgcagccgaaaacgcaggtcctggttcttctgctaacaatgtgggaactggtagcactttagctcccacgcgacctgtttatgtacctccccatctgaggaaccgtcagccagcagcagaatcccctgcccctgctccagcatatagtggcccttcctctggtgctggctctagttctggtgctggtaattctggatcccgttatgctgcacccagaaatgattatcgtcctgggtatggtggtggtggtggacgtacaggtggatggggaaacaaaagtggtggatgggatcgtggcagggagcgggaagtcaatccctttgaagaagaggataacgctgaagaggcattcagtgagcaggagaatacaggaataaacttcgatgcgtatgaggacattccggtggagacgagcggtgaaaacgtgcccccggctgtgaatacttttgcggagattgacttgggcgacgcgcttagtcagaacattagacgctgcaaatatgtgaagccaacgccggttcagcggcatgccataccgatatcccttgcgggacgggatttgatggcttgtgcgcagactggttccggaaagactgcagcattctgtttcccaatcatcaatgggattatgagaggccaagcccaacccctccagaggccccctcgcggcgtccgcatagtctacccacttgcccttgttctctcaccaactagggagctatccatgcagatacatgaagaggctagaaagttttcataccagacaggggttagggtcgttgttgcttatggtggagctccaattaatcagcagctccgggaacttgagagaggggtggatatccttgttgcaactccaggaagattggtagatttactggagagagctagagtttcactgcagatgatcagatatctggccttagatgaggcagatagaatgctggatatgggttttgagccacaaataaggaagattgtagagcaaatggacatgcctccaccaggtgccagacagactatgttgttcagtgcaacatttccaaaagagatacagagattggcttctgatttcctttcaaattatattttccttgctgttggaagagtgggttcaagtactgatttaattgtccaaagagttgagtatgttcaagagtctgacaagagaagtcacctaatggaccttcttcatgcacagagggcaaatggtgtacaaggaaagcaagctttaactttagtttttgtggagactaagaagggagctgattcgctggaacactggttgtgtcttaatggttttccagcaactactattcatggtgacaggtcacagcaggaaagagaattagccctgaggtcatttaaaagtggcaacacccccatattggttgccaccgatgttgctgcacgtggtcttgatattccccatgttgctcatgtggtcaactttgacctgccaaatgacattgatgattatgtacaccgaattggaagaacagggcgagcaggaaagaaaggccttgcaactgcattctttaatgacaacaatgcatccctagcaagagccttagcagaactgatgcaagaagcaaatcaagaagtacctgattggctctcacggtttgctgctcgctcttcctttggtgggggaaggaaccgtcgatcaggaggaggccgttttggtggccgtgactttcgaagagagggttcttttagtaggggtggttctgattactacagtgcaggaaacaacagtagtggatatggcaattctggtgggtatggtgcaggatacggtcctggggtaaccagtgcatgggactga

SEQ ID NO: 3625 - protein, 620 aa, Glycine max
MRTSWADLAANSAAENAGPGSSANNVGTGSTLAPTRPVYVPPHLRNRQPAAESPAPAPAYSGPSSGAGSSSGAGNSGSRYAAPRNDYRPGYGGGGGRTGGWGNKSGGWDRGREREVNPFEEEDNAEEAFSEQENTGINFDAYEDIPVETSGENVPPAVNTFAEIDLGDALSQNIRRCKYVKPTPVQRHAIPISLAGRDLMACAQTGSGKTAAFCFPIINGIMRGQAQPLQRPPRGVRIVYPLALVLSPTRELSMQIHEEARKFSYQTGVRVVVAYGGAPINQQLRELERGVDILVATPGRLVDLLERARVSLQMIRYLALDEADRMLDMGFEPQIRKIVEQMDMPPPGARQTMLFSATFPKEIQRLASDFLSNYIFLAVGRVGSSTDLIVQRVEYVQESDKRSHLMDLLHAQRANGVQGKQALTLVFVETKKGADSLEHWLCLNGFPATTIHGDRSQQERELALRSFKSGNTPILVATDVAARGLDIPHVAHVVNFDLPNDIDDYVHRIGRTGRAGKKGLATAFFNDNNASLARALAELMQEANQEVPDWLSRFAARSSFGGGRNRRSGGGRFGGRDFRREGSFSRGGSDYYSAGNNSSGYGNSGGYGAGYGPGVTSAWD

SEQ ID NO: 3626 - DNA, 2331 bp, Glycine max
  CDS (1)..(2331)
atggctgccacagcaactgcatctttgatgggtccgaggtatgcaccaccagacccaacactccctaaaccatggcggggtcttgtggatggcaagactgggtatctttacttttggaatcctgagactaatgtcacccagtatgagaggccatcctcaagctcaactgcccagccaaagtcttcttcagtgcccaactcttctgtccaggttcaacaatcgtctcaagggtcgcaatgtggtcgtagtcctgatttcagtgataggtatgatagaaatggcagtggtgggtctaacgaagctggatcacggaataatcagagttccaaagggggaagttatgcttctcatgatgtttcaaatggaacacatgttgctggcaatgttgattcttctgtcagaggtcatggggcttcggatgctggagctggactatctcctgagtcttatcgacatcggcatgaaatatctgtgactggagacaatgtacctccaccccttgcatcatttgggtcaactggctttccatctgagcttctgagagaggtacaaaatgctgggttctcagccccaactccaattcaggcacagtcatggcccattgctcttcaaggtagagatatagttgccattgctaaaacaggctcagggaaaaccttggggtatttagttccggcatttattcacctcaagcgctctggcaataactccaaaatgggccccactgcattggtactttcaccaacaagggagttggcaacacagatacaagatgaagctgtgaaatttgggaaatcatctagaatttcatgtgcttgtttgtatggaggagcaccaaagggtcctcaactgagagacattgatcgtggagcagatattgtggtagccactcctggtcgcttgaatgatattcttgagatgagaagaattagtcttaatcaggtttcttacctggtgctagatgaggcagacaggatgctggatatgggttttgaacctcaaattaggaaaattgtgaatgaggtgcccaatcgcaggcaaactctaatgtttactgcaacatggccaaaggaggttaggaaaattgcagctgatctgctagtcaagcctgtacaggtgaacattgggaatgtagatgagcttgttgctaacaagtctattactcagcatgttgaagtattgccaccaatggagaaacaaagacggctggaacatattttgcggtcacaggatcaaggatcaaagataattattttttgttctaccaagaaaatgtgtgatcaacttgctcgtaatctgacacgtcagtttggagctgctgctattcatggggataaatcccaggctgagagggatcatgtgttgaatcagtttcgaactgggaggtctcctgtgcttgtggccacagatgttgctgcccggggactggatatcaaggacattagggtggttgtcaattatgacttccctacaggagtggaagattatgttcataggattggaaggactggaagagctggagccactgggctagcttacactttctttggtgaccaggatgctaaatatgcttcagatctcatcaaagtcttggaaggtgcaaaccagaaggtacctccagaacttcgtgatatgtcatcacggagtggtggtgggatgggtagatccagacgatggggttctgggggacgaggtggacatggtgattctggatatggtggaaggaataatgactctggatatggtggaagaggtaatgatgcaggatatggtggaagaggcagtgattctaattatggagggagggggactgctgcttctggcagaggtggaggccgtgggtttgaccatgactcccagaggaatgataggggtcggagcccagacaagggatctagttggagtgatcgcttcaaaagcgtcaaccgggatcgcagtcgtagtcctgacagggctgcactacctcaacattcccaaggtggcagctttcacaaggcaatgatggaacgtggtggatgggatagtgatcgcaacaagagctttaaccgggaccgaagccgcagtcctagccctcatagacaggtgaagggcccagcagttcgcgaacattccccagtttacagttttcatcgatcaatgatgggacgaggtcaatcatctccgtcatctcaacggcagcgtgcatgcagtcctcaccgaaactcaaccccctcccagggtgatggaagacatggtggatctcattcatcttacaatggagaagtggaggaagggatgattcccgaggaagaaggaatgataggtcaagatgatcctgtaaatgtggattag

SEQ ID NO: 3627 - protein, 776 aa, Glycine max
MAATATASLMGPRYAPPDPTLPKPWRGLVDGKTGYLYFWNPETNVTQYERPSSSSTAQPKSSSVPNSSVQVQQSSQGSQCGRSPDFSDRYDRNGSGGSNEAGSRNNQSSKGGSYASHDVSNGTHVAGNVDSSVRGHGASDAGAGLSPESYRHRHEISVTGDNVPPPLASFGSTGFPSELLREVQNAGFSAPTPIQAQSWPIALQGRDIVAIAKTGSGKTLGYLVPAFIHLKRSGNNSKMGPTALVLSPTRELATQIQDEAVKFGKSSRISCACLYGGAPKGPQLRDIDRGADIVVATPGRLNDILEMRRISLNQVSYLVLDEADRMLDMGFEPQIRKIVNEVPNRRQTLMFTATWPKEVRKIAADLLVKPVQVNIGNVDELVANKSITQHVEVLPPMEKQRRLEHILRSQDQGSKIIIFCSTKKMCDQLARNLTRQFGAAAIHGDKSQAERDHVLNQFRTGRSPVLVATDVAARGLDIKDIRVVVNYDFPTGVEDYVHRIGRTGRAGATGLAYTFFGDQDAKYASDLIKVLEGANQKVPPELRDMSSRSGGGMGRSRRWGSGGRGGHGDSGYGGRNNDSGYGGRGNDAGYGGRGSDSNYGGRGTAASGRGGGRGFDHDSQRNDRGRSPDKGSSWSDRFKSVNRDRSRSPDRAALPQHSQGGSFHKAMMERGGWDSDRNKSFNRDRSRSPSPHRQVKGPAVREHSPVYSFHRSMMGRGQSSPSSQRQRACSPHRNSTPSQGDGRHGGSHSSYNGEVEEGMIPEEEGMIGQDDPVNVD

SEQ ID NO: 3628 - DNA, 1788 bp, Glycine max
  CDS (1)..(1788)
atgttaaccgcagtcctcagaagaaccagttccaccctctcaaggcgcggtttccccgccgccttaatctctgcctccaccgccaccgccaccgccaccgccggcaaccacttccggctactctccgctgccgtcaattccagaaccttccactccaaccctggccccttgaatttccgcgcctcttcatgtcaccgcgcggaatacgccgtggacgatttcccttacgaagaagggtccaaaggaaacgccgacgaaggcctcgagatcgcgaaggtcggaatttctgaggatattgtctccgctttggccaagaaaggcatcaccaagctcttccccattcagagggctgtgttggaacctgctatgcaaggtcgtgatatgattggtcgagctagaactggaactgggaagactcttgcttttgggatacccatcatggataagatcattcagtttaatgctaagcatgggcgggggagggatcctttggctttggttttggctccgaccagagagcttgctcgacaggttgaaacggagttctgtgagtcggcacctaatttggatacaatttgtgtttatgggggtacacccatctctcggcagatgaggcagcttgattatggggttgatattgctgtggggacgcctggtcggattattgaccttctcaacagaggtgcgctaaatttgaaggatgttcagtttgttgttcttgatgaagctgatcagatgcttcaggtgggctttcaggaagacgtggagaagatcttggagaggttgcccccaaaacgtcagactcttatgttctctgcaacaatgccatcttggataaagcagatttcgcgcaattacttgaataatcccctaaccattgatcttgttggagattctgatcagaaattggcagatggaatttcactgtactccattgcaactgatttgtatgttaaagcgggaattcttgcacctctaataacagaacatgcaaaaggaggaaagtgtattgttttcactcaaacaaaacgtgatgctgatcgattatcgtatgccatggcaagaagtgttaaatgtgaggctttgcatggagacatatcacaagctcaaagggagaaaactcttgctggcttcagaaatggccattttaatgttttagtggcaactgatgttgcctcacgtgggcttgatatacctaatgttgatcttgtaatacattatgatcttcccaacaattcagagatatttgttcatcgttctggacgaacaggtcgtgctggtaagaaaggaactgcaattcttgtgtatacagaagatcaatcgagggctgttaagcttatagagcgtgatgtaggcagtagattttcagagctgccacggattgctgttgatagtgcatcagcggtcatggttgatagcatgggtggcgggcgatttggttcttttggaggtaacagggatcgtcgatacggtgatatgggttttggatctggccattctgggggttacagtaaccctggttctggccgctctagctttggaaattccggtgaaaggtttggtggacagaattataatcgttttggctcatctggtggctttggttctggtcaatcaggaagtagatctggtggatcatccagcaggtctaggtttagtcgctcagatgattttgggggatttggtggttcagatcgttcgggtggttttggagattttggctcaggtcagtctagtggcttcggtggttctcgtggtagtaagcagaacaatagaagacctttttaa

SEQ ID NO: 3629 - protein, 595 aa, Glycine max
MLTAVLRRTSSTLSRRGFPAALISASTATATATAGNHFRLLSAAVNSRTFHSNPGPLNFRASSCHRAEYAVDDFPYEEGSKGNADEGLEIAKVGISEDIVSALAKKGITKLFPIQRAVLEPAMQGRDMIGRARTGTGKTLAFGIPIMDKIIQFNAKHGRGRDPLALVLAPTRELARQVETEFCESAPNLDTICVYGGTPISRQMRQLDYGVDIAVGTPGRIIDLLNRGALNLKDVQFVVLDEADQMLQVGFQEDVEKILERLPPKRQTLMFSATMPSWIKQISRNYLNNPLTIDLVGDSDQKLADGISLYSIATDLYVKAGILAPLITEHAKGGKCIVFTQTKRDADRLSYAMARSVKCEALHGDISQAQREKTLAGFRNGHFNVLVATDVASRGLDIPNVDLVIHYDLPNNSEIFVHRSGRTGRAGKKGTAILVYTEDQSRAVKLIERDVGSRFSELPRIAVDSASAVMVDSMGGGRFGSFGGNRDRRYGDMGFGSGHSGGYSNPGSGRSSFGNSGERFGGQNYNRFGSSGGFGSGQSGSRSGGSSSRSRFSRSDDFGGFGGSDRSGGFGDFGSGQSSGFGGSRGSKQNNRRPF

SEQ ID NO: 3630 - DNA, 2298 bp, Glycine max
  CDS (1)..(2298)
atgggtccgaggtatgcaccaccagacccaacactccctaaaccatggcggggtcttgtggatggcaagactgggtatctttacttttggaatcctgagactaatgtcacccagtatgagaggccctcctcaagctcaactgcccagccaaagtcttcttcagtgcccaattcttctgtccaggttcaacaatcgtctcaagggtcgcaatgtggtcatagtcctgatttcagtgataggtatgatagaaatggcagtggtgggtctaacgaagctggatcacggaataatcagagttccaaagggggaagttatgcttctcatgatgtttcaaatggaacacatgttgctggcaatgttgattcttctgtcagaggtcatggggcttcggatgctggagctggactatctcctgagtcttatcgacatcggcatgaaatatctgtgactggagacaatgtacctccaccccttgcatcatttgggtcaactggctttccatctgagcttctgagagaggtacaaaatgctgggttctcagccccaactccaattcaggcacagtcatggcccattgctcttcaaggtagagatatagttgccattgctaaaacaggctcagggaaaaccttggggtatttagttccggcatttattcacctcaagcgctctggcaataactccaaaatgggccccactgcattggtactttcaccaacaagggagttggcaacacagatacaagatgaagctgtgaaatttgggaaatcatctagaatttcatgtgcttgtttgtatggaggagcaccaaagggtcctcaactgagagacattgatcgtggagcagatattgtggtagccactcctggtcgcttgaatgatattcttgagatgagaagaattagtcttaatcaggtttcttacctggtgctagatgaggcagacaggatgctggatatgggttttgaacctcaaattaggaaaattgtgaatgaggtgcctaatcgcaggcaaactctaatgtttactgcaacatggccaaaggaggttaggaaaattgcagctgatctgctagtcaagcctgtacaggtgaacattgggaatgtagatgagcttgttgctaacaagtctattactcagcatgttgaagtattgccaccaatggagaaacaaagacggctggaacatattttgcggtcacaggatcaaggatcaaagataattattttttgttctaccaagaaaatgtgtgatcaacttgctcgtaatctgacacgtcagtttggagctgctgctattcatggggataaatcccaggctgagagggatcatgtgttgaatcagtttcgaactgggaggtctcctgtgcttgtggccacagatgttgctgcccggggactggatatcaaggacattagggtggttgtcaattatgacttccctacaggagtggaagattatgttcataggattggaaggactggaagagctggagccactgggctagcttacactttctttggtgaccatgatgctaaatatgcttcagatctcatcaaagttttggaaggtgcaaaccagaaggtgcctccagaacttcgtgatatgtcatcacggagtggtggtgggatgggcagatccagacgatggggttctggtggacgaggtggtgattctggatatggtggaaggaataatgactctggatatggtggaaggggtaatgatgcgggatacggtggacgaggtagtgattcaaattatggagggaggggtactgctgcttctggcagaggtggaggccgtgggtttgactatgagtcccagaggaatgatagggatcggagcccagacaagggatcaagttggagtgatcgcttcaaaagcgtcaaccgggatcgcagtcgtagtcctaacagggccgcattacctcaacattcccaaggtggcagctttcacaaggcaatgatggaacgtggtggatgggatagtgatcgcaacaagagctttaaccgggaccgaagccgcagtcctagccctcatagacaggtgaagggcccagcagttcgcgaacattccccagtttacagttttcatcgatcaatgatgggacgaggtcaatcatctccgtcatctcaacggcagcgtgcatgcagtcctcaccgaaactcaaccccctcccagggtgatggaagacatggtggatctcattcatcttacaatggagaagtggaggaagggatgattcccgaggaagaaggaatgataggtcaagatgatcctgtaaatgtggattag

SEQ ID NO: 3631 - protein, 765 aa, Glycine max
MGPRYAPPDPTLPKPWRGLVDGKTGYLYFWNPETNVTQYERPSSSSTAQPKSSSVPNSSVQVQQSSQGSQCGHSPDFSDRYDRNGSGGSNEAGSRNNQSSKGGSYASHDVSNGTHVAGNVDSSVRGHGASDAGAGLSPESYRHRHEISVTGDNVPPPLASFGSTGFPSELLREVQNAGFSAPTPIQAQSWPIALQGRDIVAIAKTGSGKTLGYLVPAFIHLKRSGNNSKMGPTALVLSPTRELATQIQDEAVKFGKSSRISCACLYGGAPKGPQLRDIDRGADIVVATPGRLNDILEMRRISLNQVSYLVLDEADRMLDMGFEPQIRKIVNEVPNRRQTLMFTATWPKEVRKIAADLLVKPVQVNIGNVDELVANKSITQHVEVLPPMEKQRRLEHILRSQDQGSKIIIFCSTKKMCDQLARNLTRQFGAAAIHGDKSQAERDHVLNQFRTGRSPVLVATDVAARGLDIKDIRVVVNYDFPTGVEDYVHRIGRTGRAGATGLAYTFFGDHDAKYASDLIKVLEGANQKVPPELRDMSSRSGGGMGRSRRWGSGGRGGDSGYGGRNNDSGYGGRGNDAGYGGRGSDSNYGGRGTAASGRGGGRGFDYESQRNDRDRSPDKGSSWSDRFKSVNRDRSRSPNRAALPQHSQGGSFHKAMMERGGWDSDRNKSFNRDRSRSPSPHRQVKGPAVREHSPVYSFHRSMMGRGQSSPSSQRQRACSPHRNSTPSQGDGRHGGSHSSYNGEVEEGMIPEEEGMIGQDDPVNVD

SEQ ID NO: 3632 - DNA, 1491 bp, Hordeum vulgare
  CDS (1)..(1491)
atgagccgcttcgacggccgtgcggcggaccccagctcctaccgcgaccgccgcagtgagggggccttcggtggcgggacgagggcgttcgcgccgtcggggagaccggatgctgccgccgcggcggccgcggcagagctggacgggctgccgcgattcgagaagaacttctacgtggaggttcccgcggtggccggcatgacggcggaggaggtcgaggcgtaccgccgccgccgggagatcaccgtcgagggcaacgacgtgcccaagccggtgcgcggcttccgcgacgtcggcttcccagaatacgtgctgcaagaaatcacaaaagctggctttacagaacctacccctatccagtcacaaggttggccaatggcactgaaggggcgtgatcttattggcattgctgaaacaggatctggaaaaacacttgcttaccttttacctgccattgttcatgttaatgctcagcctatcctagctcctggtgatggtccgattgttcttgtgctggcccctacacgtgaacttgctgtccagatacagcaggagacaacaaaatttggtgcatcatcaaagataaaaagcacatgcatatatggtggtgtcccaaaaggtcctcaagttcgtgatcttcaaaaaggtgttgaaattattatagcgacgccagggagactaattgatatgatggaatcacatcatacaaatttgcggagggttacataccttgttttagacgaggcagatcgaatgctagacatgggttttgaacctcagattaagaaaattgtttcacagattcgtccagatcgacaaacactttattggagtgctacctggccaaaggaagttgagctgctagcaaggactttcctttttgatccatacaaggttataattggttctgaagaactgaaagctaatcatgctatctgtcagcatgtagagatattatctgagagtcagaagtataacaagttggtcaatctactggaggatataatggatggcagccgtattttaatatttatggacaccaagaaaggatgcgatcagatcaccagacagcttcgaatggatggttggcctgctctgtctattcatggtgacaagagccaagctgaaagagattgggttctttctgaatttaagtccgggaaaagccctattatgacagctactgatgttgctgctcgaggcctagatgttaaggatgtcaagtatgtcattaactatgactttccggggtctctggaggattatgtccatcgcattggtcgaactggcagagctggagcaacagggacagcttacacctttttcacggctgctaacgccagatttgccaaggatcttattagcattttagttgaagctggacaaaaggtcagccctgaattagctaatatgggccgtggtgcaccacctccttctttgggttatcgtgatagatacagagggcatggaggtggccgttcatggagctga

SEQ ID NO: 3633 - protein, 496 aa, Hordeum vulgare
MSRFDGRAADPSSYRDRRSEGAFGGGTRAFAPSGRPDAAAAAAAAELDGLPRFEKNFYVEVPAVAGMTAEEVEAYRRRREITVEGNDVPKPVRGFRDVGFPEYVLQEITKAGFTEPTPIQSQGWPMALKGRDLIGIAETGSGKTLAYLLPAIVHVNAQPILAPGDGPIVLVLAPTRELAVQIQQETTKFGASSKIKSTCIYGGVPKGPQVRDLQKGVEIIIATPGRLIDMMESHHTNLRRVTYLVLDEADRMLDMGFEPQIKKIVSQIRPDRQTLYWSATWPKEVELLARTFLFDPYKVIIGSEELKANHAICQHVEILSESQKYNKLVNLLEDIMDGSRILIFMDTKKGCDQITRQLRMDGWPALSIHGDKSQAERDWVLSEFKSGKSPIMTATDVAARGLDVKDVKYVINYDFPGSLEDYVHRIGRTGRAGATGTAYTFFTAANARFAKDLISILVEAGQKVSPELANMGRGAPPPSLGYRDRYRGHGGGRSWS

SEQ ID NO: 3634 - DNA, 1887 bp, Oryza sativa
  CDS (1)..(1887)
atgtactctatccttcgccgcgcggcgccgctccggcggcgcgccgtttccgccctggccgccgcggttctccggcgggaggaggcggcggcggaggtggtcgtgtcgcggcgggcgacgatcccggcggcgtggttccactcctccccggcgtggctggggttccgggagacgggggccgcgggggcggcggcgaggccgcagtacgcggcggatgaggggttgttctacgaggaggataagaggggggcgaaggcgggtggagttgctgcgggcggcgcggaggaggggttggaggtggccaagctcgggatctcgcccaagatcgtcagccagctcgcctcgcgcggcataaccaagctgttcccaatccagagagctgtccttgaaccagcaatgcaaggaaaggacatggttggtcgtgccaaaacaggtacaggaaagactttggcttttggaatccccatactggacgcaattattcggcacaatgaaaagaatagccctggtaaatttcccttggctattgttttggccccaacaagagaactcgcgaaacaagttgagagggaattttctgattcttccaatgtggaaacgatctgtgtatatggtggaactccaattagccagcaaataagacaactcaattatggagttgatgttgttattgggacaccaggacgagtaattgacctgcttaaaagaggtgctctgaatctgtcagaggtccggtttgttgttcttgatgaagcagaccagatgttgtcagtgggttttgatgaagatgttgagacaattttggatagagtacctccaaaacgtcaaaccttgatgttctctgcgactatgccaacttggattcagagactcacccagaaataccttaagaatcctgttacaattgaccttgtgggtgaagatgatcagaagctagcagaaggaatcagtctttattctatcgcttcagagggccatgccaaacctgctgtccttggagaattgattaaggagcatgcaaaaggtggtaaatgcattgtatttacacaaacaaaaagagatgctgatcgattgtcctacaccatgggtcggagtttccagtgccaggcccttcatggggacatcacacaagcccaaagagagagaacattaaaaggattccgtgaaggccattttaatattttgattgccactgatgttgctgctcgtggtttggatatcccaaatgtagacttggtgatacattttgaattgccaaactcctcggaattgtttgttcacaggtctggccgaactggccgtgctggaaagaagggtaaggcaattgttatgcacagctatcaacaaagtagagctatcaagatggttgagaatgatgttggctgcaaatttacagagcttccaaagattaatgttgaaggttctgacttgatgagtggtggctttgattccttcggtggtggtggatttggtcgtgaagggggtgggtcctatgggcgtcgtggtagttttggcagctcttcaagccgaggcggtgggtttggtgattcagggtttggtcgttcaggtggtggatttggccgttctggtggtggaggatttggccgttccagtggtggtggcttcggtgattctgggtttggccgttcaggtggtggtggtttcggagactcaggatttggtcgctcaggtggtggcggttacggtgattcaggatttggtagttccggcggtggctcaggccgttctggttttggccggtcaggtggatttggagattctggctcaggtaggtttggtgggggatttggtaactctggctcaggcagttttggcaactttggcggcaacaattctggacaatccggtgggtttggctcctcttag

SEQ ID NO: 3635 - protein, 628 aa, Oryza sativa
MYSILRRAAPLRRRAVSALAAAVLRREEAAAEVVVSRRATIPAAWFHSSPAWLGFRETGAAGAAARPQYAADEGLFYEEDKRGAKAGGVAAGGAEEGLEVAKLGISPKIVSQLASRGITKLFPIQRAVLEPAMQGKDMVGRAKTGTGKTLAFGIPILDAIIRHNEKNSPGKFPLAIVLAPTRELAKQVEREFSDSSNVETICVYGGTPISQQIRQLNYGVDVVIGTPGRVIDLLKRGALNLSEVRFVVLDEADQMLSVGFDEDVETILDRVPPKRQTLMFSATMPTWIQRLTQKYLKNPVTIDLVGEDDQKLAEGISLYSIASEGHAKPAVLGELIKEHAKGGKCIVFTQTKRDADRLSYTMGRSFQCQALHGDITQAQRERTLKGFREGHFNILIATDVAARGLDIPNVDLVIHFELPNSSELFVHRSGRTGRAGKKGKAIVMHSYQQSRAIKMVENDVGCKFTELPKINVEGSDLMSGGFDSFGGGGFGREGGGSYGRRGSFGSSSSRGGGFGDSGFGRSGGGFGRSGGGGFGRSSGGGFGDSGFGRSGGGGFGDSGFGRSGGGGYGDSGFGSSGGGSGRSGFGRSGGFGDSGSGRFGGGFGNSGSGSFGNFGGNNSGQSGGFGSS

SEQ ID NO: 3636 - DNA, 1845 bp, Triticum aestivum
  CDS (1)..(1845)
atgtacgccatgatccgccgcgcggatcccctccggaggcgcgccgcgtcggccatcctggccgcgctgctgcagcacccggcgggcccctccgccgccggggcgtcggcgtcggtcctgcccccaaggtcgccgctcccgccgccggcgatgtggttccactccaggccggccccgctcgggttccgggagacgggggccgcgcgggccggggcgcacgctcagttcgcggcggacgaggggtggaactacgacgataagaggaagcccgcggggggcgtggctggggccggcgccggcgccaaggaggaggggcttgagatcgcaaagctcgggatctcgtccgagatcgtcgacaagctctccgccaagggcatcaccaagctgttccccatccagagagctgtccttgagccagcaatgcaaggcaaggatatggttggccgtgccaaaacggggacagggaaaactttggcatttggaatccccataatggatgcaattattcgccataacgcagctaacaaacctggaatacatcccctggcgatatgtttggcaccaacacgggaacttgcaaaacaagttgagaaagaatttgttgattcttcccggctggatacactctgtgtatatggaggcactccaattcagcaacaaatgagagttcttagccagggtgttgatgtagttgttgggacacctggacgggtaattgatctgctaaatagacgtgctctgaatttgtcaagtgtccagtttgttgttctcgatgaggcagaccagatgctgtcagtgggttttgatgaagccgttgagacaattttgcaaaatgtgcctgcaaaacgtcaaaccttgatgttctccgcaacaatgccaccctggatacgcaagctgatgcagaaatacctcaaagatcctgtcatagtcgatcttgtgggtgaagatgaccagaagctagcagaagggattagtctgttgtctattgctacagagaatcatgcaaaacctgctgtccttggacaattgattcaggaccatgctaaaggtggcaagtgcattgtatttacgcaaacaaaaagggatgctgatcggttgtcatacactatgggtcgaagtgtccagtgtcaggctcttcatggagatattacacaacaacaaagagagaggacacttcaaggatttcgtgaagggcgctttaatactttgattgccactgatgttgctgctcgtggtttggatattccaaatgttgatctggtgatacactatgaattgccaaacaattcagagatattcgttcacaggtctggccgtactggccgtgctgggaagaagggcactgcaattgtgatgtacagctacaaccaaagtagagctgtcaggggcatcgagaatgatgttggaggcaagtttaaggagcttccaaagatcaacgttgaaggttctgacttgacaatgtctagtggttttgattcgtttggaggtggaggtggaggtgggcgctcacgtggtggtggttttggtggccgcggtggtggttttggcaactcttccagcagaggtggcgggtttggtgattccggttttggtcgttcaggtggtgggtttggtcgttcaggcggcggcggcggatttggcgattcagggtttggccgatcaggtggtggtggtggattcggcgattcagggtttggccgatcaggtggtggtggaggtggatttggctcaagtggtgggtttggggattctggttcagggcggtctggtgggtttggtagcggctctggtagctctggctctagctggggtggattcggcagctttggaggcaaaagctcttga

SEQ ID NO: 3637 - protein, 614 aa, Triticum aestivum
MYAMIRRADPLRRRAASAILAALLQHPAGPSAAGASASVLPPRSPLPPPAMWFHSRPAPLGFRETGAARAGAHAQFAADEGWNYDDKRKPAGGVAGAGAGAKEEGLEIAKLGISSEIVDKLSAKGITKLFPIQRAVLEPAMQGKDMVGRAKTGTGKTLAFGIPIMDAIIRHNAANKPGIHPLAICLAPTRELAKQVEKEFVDSSRLDTLCVYGGTPIQQQMRVLSQGVDVVVGTPGRVIDLLNRRALNLSSVQFVVLDEADQMLSVGFDEAVETILQNVPAKRQTLMFSATMPPWIRKLMQKYLKDPVIVDLVGEDDQKLAEGISLLSIATENHAKPAVLGQLIQDHAKGGKCIVFTQTKRDADRLSYTMGRSVQCQALHGDITQQQRERTLQGFREGRFNTLIATDVAARGLDIPNVDLVIHYELPNNSEIFVHRSGRTGRAGKKGTAIVMYSYNQSRAVRGIENDVGGKFKELPKINVEGSDLTMSSGFDSFGGGGGGGRSRGGGFGGRGGGFGNSSSRGGGFGDSGFGRSGGGFGRSGGGGGFGDSGFGRSGGGGGFGDSGFGRSGGGGGGFGSSGGFGDSGSGRSGGFGSGSGSSGSSWGGFGSFGGKSS

SEQ ID NO: 3638 - DNA, 1911 bp, Triticum aestivum
  CDS (1)..(1911)
atgcgatcttcatgggctgattcagttgcgaacgccgaggaatcggcgcccgcgactggtgctgctcccgcccctgttgccaatcaccagaactcgcgtcccactcgcagctcttacgtccctcctcacctccgtggcggtggccgctcaccagagaatcaagtgccagctgctgctccaacaccagctggcgcatacccctcaggtgctgtgcagccttctggtgggtacgcagctgctgttggtggtactcgctgggctgcccctcctggtgctcctagcgctggcgtaggcgttgtccgccagggtggtggtggacgtggtgctgttggtggcggtggtggcggctggaactcccgccctggtgggtggggggaccgcagggaccgtgaaccaaacccttttggcgatagtgagccggcggctgtggatgttgactttgagagtcaacagaacacaggcatcaattttgacgcctatgaggacattcctgtggagacaagtggccacgatgtgcctccagcagtcaacacgtttgcagagattgacttgggtgatgcactgaatgagaatatacggaggtgcaagtatgtgaggcctacacctgtgcagcggcatgccattccgattgtcattggaggcagggatctgatggcctgcgctcagactgggtctgggaagacagctgctttttgtttcccgatcatcagtgggatccttaagtcaaggccaccacagaggcctagagctaggactgcatttcctcttgctctgatattatctcctactcgcgagctatcagtccaaattcatgaagaagcaaagaaatttgcataccagactggtgttaaggcttgtgttgcatatggtggagcaccaattcatcagcagttgagagaactggaaagaggtgttgatatactagtggcaactcctggtcgtttgatggatctgctggagagagctagagtatcactgcaaatggtgaattacttggctcttgatgaagctgaccggatgctcgatatggggtttgagccacagatacgcaagattgttgagcagatggacatgccccctcgtggtgtgagacagaccatgctgttcagtgctacttttccaaaggagatacaacgcctggcatcagatttccttgcagactacatcttccttgctgttggaagagttggttcaagtaccgatttgattgctcaaagggtggagtttgtccttgaagcggataaaagaagttacctcatggaccttattcatgcgcagaaggctaatgatgttcctggaaagaattctcttactttggtcttcgtggagacaaagaggggtgctgatgctctggagaactggctgtatacaaatgggttccctgcaacaagtattcatggagatcgtacacaacaggaaagggagtatgcgctgagatccttcaagagtggagcaactcccatcctggttgcaactgacgttgctgctcgtgggcttgacattccagatgtcgcccacgtcatcaattttgatctgccaaatgacattgatgactatgttcaccgcattggaagaactggaagagctgggaagtctggtctggcaactgcatttttcaatgagggcaacatgtcactggccaggccgttatgtgaactgatgcaggaagccaatcaggaggttcctcagtggctggagcgctattctgcccgttcctcattcggaggcggcggaggaggcagaaaccgcaggtcaggaggcggcggtggtgctcgatttggtggacgtgacttccgtcgcgacacgaggggcggtggcggtggaggaggtggcggttacggcggtggtggtggtggcgggtacggtggtggtggaggttatggtggaggtgcgtctagctcgtgggactga

SEQ ID NO: 3639 - protein, 636 aa, Triticum aestivum
MRSSWADSVANAEESAPATGAAPAPVANHQNSRPTRSSYVPPHLRGGGRSPENQVPAAAPTPAGAYPSGAVQPSGGYAAAVGGTRWAAPPGAPSAGVGVVRQGGGGRGAVGGGGGGWNSRPGGWGDRRDREPNPFGDSEPAAVDVDFESQQNTGINFDAYEDIPVETSGHDVPPAVNTFAEIDLGDALNENIRRCKYVRPTPVQRHAIPIVIGGRDLMACAQTGSGKTAAFCFPIISGILKSRPPQRPRARTAFPLALILSPTRELSVQIHEEAKKFAYQTGVKACVAYGGAPIHQQLRELERGVDILVATPGRLMDLLERARVSLQMVNYLALDEADRMLDMGFEPQIRKIVEQMDMPPRGVRQTMLFSATFPKEIQRLASDFLADYIFLAVGRVGSSTDLIAQRVEFVLEADKRSYLMDLIHAQKANDVPGKNSLTLVFVETKRGADALENWLYTNGFPATSIHGDRTQQEREYALRSFKSGATPILVATDVAARGLDIPDVAHVINFDLPNDIDDYVHRIGRTGRAGKSGLATAFFNEGNMSLARPLCELMQEANQEVPQWLERYSARSSFGGGGGGRNRRSGGGGGARFGGRDFRRDTRGGGGGGGGGYGGGGGGGYGGGGGYGGGASSSWD

SEQ ID NO: 3640 - DNA, 2301 bp, Zea mays
  CDS (1)..(2301)
atgtcgaagcggccgaagctcgagggtttcagcatcccgcggcccacctcctacaacttcgagcgctcgcagtccgtgcagcggctctaccgtccgaccgatgacccagacctcgacgacatcgccttctccgacgacgccccctcagatgcccaagccagcaccgcggtagaaggaaaggccgagaatgaggaggagatggacccgctcgacgccttcatggccgagatccaggaggagatccgtgcgccgcccccgccgcccaagcccgaggcgcttcgccgcacggattccgacgatgacgaggatgaccccgtcgagagcttcctgcgggccaagaaggacgctggcctcacgctggccgccgacgtcatgcgcgctggttacgactccgatgaggaggtctacgccgctgccaaggccgtcgacgccggcatgatggaatacgactctgatgacaaccccatagtcatcgacaagaagaaaatagagcccataccagcactcgatcactcgaccattgagtatgacgccttcacaaaagatttctacgaggagaagccatcgatttcaggtatgagtgaccaagaggtaacagattatatgaaaagtttgtcaattcgtgtttctggttttgatgtgccgaggccaataaaaaactttgaggattgtgggtttcatgtacctctaatgaatgctattgccaaacaagcttatgaaaaaccaactacaattcagtgccaggctttacctattgtactttcagggagagatatcattggtattgcaaaaactggctctggtaaaactgcagcttttgtgctccctatgattgttcatattatggatcagcctgagcttgagaaagaagaaggtccaataggagtcatttgtgctccaacaagagaattggcacatcagatatatctcgaagctaagaagtttgcaaagccttacaaccttcgagttgctgctatatatggtggtgtttccaaatttgaccagtttaaagaactgaaagcaggttgtgaaatagtcattgcaactccagggagattaatagacttgctgaagatgaaggcattgaagatgttcagggcaacttatctggttcttgatgaagctgatcgaatgttcgatcttggatttgagccacaaatacgatccattgttggtcaaattagaccagatcgacaaactttacttttttctgcaacaatgccatacaaagtagagcgtttggcaagagaaatattaactgatcctattagagttacagttggtcaagttggcggtgctaatgaagacattaaacaagttgttaatgtactcccttctgatgttgagaaaatgccttggcttttggagaaattgcctggaatgattgatgatggagatgttcttgtattcgcatctaaaaaggctagagtggacgagatagagaaagagttgaatcagagaggattcagaattgctgcgcttcatggcgacaaggatcaagcttctcgtatggagaccctgcagaagttcaaatctgggacatttcatgttctggttgcaactgatgttgctgcacgaggtcttgacatcaaatcgattaaaacagttgtcaactttgatattgcaaaagagatggatatgcatattcaccgaattggaagaactggtcgtgctggcgataaagatggcactgcatatactctgattacacagaaggaggcacattttgctggtgaactggttcacagtttgattgctgctggccaggatgtacccaatgaactcatggatctggctatgaaggatggaagattcagagcaaaacgagactccaggaaaggtgggaagaaaggtggcaaaggaaaaggtggtgttggcggtgctgggcgcgggcgcggtgtgcgtggagttgattttggcctcggcataggttacaatgccgaatctggttcacaagtgcctgctgcaagatctgctgctgtaaattctctgaagacagggatgttgcaacgatttaagagcagctttgtctctggatcttcaaatacaccaagcagcagtgcaccttcctttgtaagaccagcactccgtggctttgtgtctggcggcaccattggaggagacacacggcctgcacaggcagcccccactttcatccctgcatcccggcctgcacagcctgcccccgcggtccctgcatcccagcctgcaggaaataacaacgaaaatgggaacccgaatccagaaagttcacgggatcagttcagggagagaaaacgaccatcaggttgggatcgctag

SEQ ID NO: 3641 - protein, 766 aa, Zea mays
MSKRPKLEGFSIPRPTSYNFERSQSVQRLYRPTDDPDLDDIAFSDDAPSDAQASTAVEGKAENEEEMDPLDAFMAEIQEEIRAPPPPPKPEALRRTDSDDDEDDPVESFLRAKKDAGLTLAADVMRAGYDSDEEVYAAAKAVDAGMMEYDSDDNPIVIDKKKIEPIPALDHSTIEYDAFTKDFYEEKPSISGMSDQEVTDYMKSLSIRVSGFDVPRPIKNFEDCGFHVPLMNAIAKQAYEKPTTIQCQALPIVLSGRDIIGIAKTGSGKTAAFVLPMIVHIMDQPELEKEEGPIGVICAPTRELAHQIYLEAKKFAKPYNLRVAAIYGGVSKFDQFKELKAGCEIVIATPGRLIDLLKMKALKMFRATYLVLDEADRMFDLGFEPQIRSIVGQIRPDRQTLLFSATMPYKVERLAREILTDPIRVTVGQVGGANEDIKQVVNVLPSDVEKMPWLLEKLPGMIDDGDVLVFASKKARVDEIEKELNQRGFRIAALHGDKDQASRMETLQKFKSGTFHVLVATDVAARGLDIKSIKTVVNFDIAKEMDMHIHRIGRTGRAGDKDGTAYTLITQKEAHFAGELVHSLIAAGQDVPNELMDLAMKDGRFRAKRDSRKGGKKGGKGKGGVGGAGRGRGVRGVDFGLGIGYNAESGSQVPAARSAAVNSLKTGMLQRFKSSFVSGSSNTPSSSAPSFVRPALRGFVSGGTIGGDTRPAQAAPTFIPASRPAQPAPAVPASQPAGNNNENGNPNPESSRDQFRERKRPSGWDR

SEQ ID NO: 3642 - DNA, 2301 bp, Zea mays
  CDS (1)..(2301)
atgtcgaagcggccgaagctcgagggtttcagcatcccgcggcccacctcctacaacttcgagcgctcgcagtccgtgcagcggctctaccgtccgaccgatgacccagacctcgacgacatcgccttctccgacgacgccccctcagatgcccaagccagcaccgcggtagaaggaaaggccgagaatgaggaggagatggacccgctcgacgccttcatggccgagatccaggaggagatccgtgcgccgcccccgccgcccaagcccgaggcgcttcgccgcacggattccgacgatgacgaggatgaccccgtcgagagcttcctgcgggccaagaaggacgctggcctcacgctggccgccgacgtcatgcgcgctggttacgactccgatgaggaggtctacgccgctgccaaggccgtcgacgccggcatgatggaatacgactctgatgacaaccccatagtcatcgacaagaagaaaatagagcccataccagcactcgatcactcgaccattgagtatgacgccttcacaaaagatttctacgaggagaagccatcgatttcaggtatgagtgaccaagaggtaacagattatatgaaaagtttgtcaattcgtgtttctggttttgatgtgccgaggccaataaaaaactttgaagattgtgggtttcatgtacctctaatgaatgctattgccaaacaagcttatgaaaaaccaactacaattcagtgccaggctttacctattgtactttcagggagagatatcattggtattgcaaaaactggctctggtaaaactgcagcttttgtgctccctatgattgttcatattatggatcagcctgagcttgagaaagaagaaggtccaataggagtcatttgtgctccaacaagagaattggcacatcagatatatctcgaagctaagaagtttgcaaagccttacaaccttcgagttgctgctatatatggtggtgtttccaaatttgaccagtttaaagaactgaaagcaggttgtgaaatagtcattgcaactccagggagattaatagacttgctgaagatgaaggcattgaagatgttcagggcaacttatctggttcttgatgaagctgatcgaatgttcgatcttggatttgagccacaaatacgatccattgttggtcaaattagaccagatcgacaaactttacttttttctgcaacaatgccatacaaagtagagcgtttggcaagagaaatattaactgatcctattagagttacagttggtcaagttggcggtgctaatgaagacattaaacaagttgttaatgtactcccttctgatgttgagaaaatgccttggcttttggagaaattgcctggaatgattgatgatggagatgttcttgcattcgcatctaaaaaggctagagtggacgagatagagaaagagttgaatcagagaggattcagaattgcagcacttcatggcgacaaggatcaagcttctcgtatggagaccctgcagaagttcaaatctgggacataccatgttctggttgcaactgatgttgccgcacgaggtcttgacatcaaatcgattaaaacagttgtcaactttgatatcgcaaaagagatggatatgcatattcaccgaattggaagaactagtcgtgctggcgataaagatggcactgcatatactctgattacacagaaggaggcacactttgccggtgaactggttcaaagtttgattgctgctggccaggatgtacccaatgaactcatggatctggctatgaaggatggaagattcagagcaaaacgagactccaggaaaggtgggaagaaaggtggcaaaggaaaaggtggtgttggcggtgctgggcgcgggcgcggtgtgcgtggagttgattttggcctcggcataggttacaatgccgaatctggttcacaagtgcctgctgcaagatctgctgctgtaaattctctgaagacagggatgttgcaacgatttaagagcagctttgtctctggatcttcaaatacaccaagcagcagtgcaccttcctttgtaagaccagcactccgtggctttgtgtctggcggcaccattggaggagacacacggcctgcacaggcagcccccactttcatccctgcatcccggcctgcacagcctgcccccgcggtccctgcatcccagcctgcaggaaataacaacgaaaatgggaacccgaatccagaaagttcacgggatcagttcagggagagaaaacgaccatcaggttgggatcgctag

SEQ ID NO: 3643 - protein, 766 aa, Zea mays
MSKRPKLEGFSIPRPTSYNFERSQSVQRLYRPTDDPDLDDIAFSDDAPSDAQASTAVEGKAENEEEMDPLDAFMAEIQEEIRAPPPPPKPEALRRTDSDDDEDDPVESFLRAKKDAGLTLAADVMRAGYDSDEEVYAAAKAVDAGMMEYDSDDNPIVIDKKKIEPIPALDHSTIEYDAFTKDFYEEKPSISGMSDQEVTDYMKSLSIRVSGFDVPRPIKNFEDCGFHVPLMNAIAKQAYEKPTTIQCQALPIVLSGRDIIGIAKTGSGKTAAFVLPMIVHIMDQPELEKEEGPIGVICAPTRELAHQIYLEAKKFAKPYNLRVAAIYGGVSKFDQFKELKAGCEIVIATPGRLIDLLKMKALKMFRATYLVLDEADRMFDLGFEPQIRSIVGQIRPDRQTLLFSATMPYKVERLAREILTDPIRVTVGQVGGANEDIKQVVNVLPSDVEKMPWLLEKLPGMIDDGDVLAFASKKARVDEIEKELNQRGFRIAALHGDKDQASRMETLQKFKSGTYHVLVATDVAARGLDIKSIKTVVNFDIAKEMDMHIHRIGRTSRAGDKDGTAYTLITQKEAHFAGELVQSLIAAGQDVPNELMDLAMKDGRFRAKRDSRKGGKKGGKGKGGVGGAGRGRGVRGVDFGLGIGYNAESGSQVPAARSAAVNSLKTGMLQRFKSSFVSGSSNTPSSSAPSFVRPALRGFVSGGTIGGDTRPAQAAPTFIPASRPAQPAPAVPASQPAGNNNENGNPNPESSRDQFRERKRPSGWDR

SEQ ID NO: 3644 - DNA, 2409 bp, Zea mays
  CDS (1)..(2409)
atgtcaggagggactggctcatccgggcgcgcggccccgcggtacgccccggatgacccgacgctgcccaagccgtggcgcggcctcgtcgacggcaccaccggctacctctactactggaacccggagacgaacgtcacgcagtacgagcggcctgtgccccccgagagccagctcctcccgcctccgcctccgttgccacccccgcctccacggagccgcgaccgccgcgacaggtccagatcccgatcccgcaccccaccccggcgcgaccacagggaccgcgaccgtgaccgtgacaggcgccacgacgagcacgcgtcctccaagacggcgtcttcccaccaccatccggctccggtagccgtcgccgacgatccttccaccgaggcataccgccgccgccatgagatcaccgtcacgggggataatgtgccgactccaataacttcatttgaggctggtggcttcccgtcagaaattctgaaggagatacaacgtgctggattcgcaagcccaacacctatccaagcccagtcatggccaattgctatgcaaaatcaagatgtagtagctattgcaaagactggatcaggcaaaactcttgggtatctacttcctgggtttatgcatatcaagcgcctgcagaacagcactaggaatggcccaacagtgctagttttggccccaacaagggaacttgcaacacagattctggatgaagctgtgaaatttggaagatcttcaagaatttcttgcacgtgcctatatggtggtgctcctaaaggtcctcagttgagagatttagatagaggggttgatgttgttgttgcaacacctggaaggttaaatgacatcttggagatgcgaaaggtaagtcttaagcaagtgtcatatcttgttctggatgaggctgatcgcatgctggacatgggctttgagccacaaatacggaagatagtgaaagagatacctcaccgtcggcaaacccttatgtacaccgctacatggcccaaggaagtccgaaggattgcagatgatcttcttgttcatcctgtacaggtgacaattggaagtgttgattcacttgttgctaatagttctattactcagcatgtagagatcataacaccctcagaaaaacaacggcgcctggagcagatattacgatcccaggattcaggttcaaagatattaatattttgtaccaccaagaggatgtgtgaccaacttgcaaggacactcaccaggcagtttggagcttcggccattcatggtgacaagtcccaaagtgaaagggagaaggttctgaatcagtttcgatctgggcggtctcccattttagtggcaactgatgttgctgcgcgaggtttggacatcaaagatatcagggtagtgatcaactatgacttccccactggtgttgaagactacgttcacaggattggcaggacaggaagggctggtgccactggtgttgcatatacatttttttgtgatcaggattcaaaatatgctgctgacctaatcaaaattctggaaggggcaaaccaacgagtgccccgtgatttagaggatatggcttctcgtggcggtggacgaggtaggaagaggaaccattgggcatcccgccctgacaggggtggttcacgttctgaactggattcaaggtacagcagcagagatggactagcatcttctgggaaatcagagagtggtcgcggcagtcgtggaagggatgataatggtagccgtggcaggtacgaccctggtgaaaccgatgggcgatctcgtaggtctactagaggccgcagtagaagccgtagcaaaagtgacagtagaagccgtagcccaagtcccaagaagtcacgtcgtcatgaaggtagacgtagcaggactaagagcaggagcaggagcaggagccgtagaaatcatggtgctagccacagcaagagtcgcagccctgtcgctagccgtaggtatgaaaagactgcttcaggatctgctcggcctaactcggggcatgcagagcacaaaagccctccaagatctcactctagggatgaccatgtgaaccactctgaccacaaggatgaccacaaggatgaccacatggaagatgggaagatggaaagggttgatcttgatcgctcgcccagcccacacgatgacaagtctgctccatatagtcctgtgtacaatggcaaagccagtggctcaatgagccccaacggtcagccagaggcaggtgccaaatttgttgaaccttctgggaaacctgagcctgcatctccagtgcgctgcagcaaaggcagagatgatgatgaggaaggtatcatagacgaggatggagagattggtgaggatgatccgcgtgcaaatgcagctgtgcagaatggtaataactga

SEQ ID NO: 3645 - protein, 802 aa, Zea mays
MSGGTGSSGRAAPRYAPDDPTLPKPWRGLVDGTTGYLYYWNPETNVTQYERPVPPESQLLPPPPPLPPPPPRSRDRRDRSRSRSRTPPRRDHRDRDRDRDRRHDEHASSKTASSHHHPAPVAVADDPSTEAYRRRHEITVTGDNVPTPITSFEAGGFPSEILKEIQRAGFASPTPIQAQSWPIAMQNQDVVAIAKTGSGKTLGYLLPGFMHIKRLQNSTRNGPTVLVLAPTRELATQILDEAVKFGRSSRISCTCLYGGAPKGPQLRDLDRGVDVVVATPGRLNDILEMRKVSLKQVSYLVLDEADRMLDMGFEPQIRKIVKEIPHRRQTLMYTATWPKEVRRIADDLLVHPVQVTIGSVDSLVANSSITQHVEIITPSEKQRRLEQILRSQDSGSKILIFCTTKRMCDQLARTLTRQFGASAIHGDKSQSEREKVLNQFRSGRSPILVATDVAARGLDIKDIRVVINYDFPTGVEDYVHRIGRTGRAGATGVAYTFFCDQDSKYAADLIKILEGANQRVPRDLEDMASRGGGRGRKRNHWASRPDRGGSRSELDSRYSSRDGLASSGKSESGRGSRGRDDNGSRGRYDPGETDGRSRRSTRGRSRSRSKSDSRSRSPSPKKSRRHEGRRSRTKSRSRSRSRRNHGASHSKSRSPVASRRYEKTASGSARPNSGHAEHKSPPRSHSRDDHVNHSDHKDDHKDDHMEDGKMERVDLDRSPSPHDDKSAPYSPVYNGKASGSMSPNGQPEAGAKFVEPSGKPEPASPVRCSKGRDDDEEGIIDEDGEIGEDDPRANAAVQNGNN

SEQ ID NO: 3646 - DNA, 2019 bp, Zea mays
  CDS (1)..(2019)
atgacgtcgtcggcgtccgcgccggcgtccaatggaccgcgctacgcgccgccggatccaacgctgcccaagccgtggagggggctcatcgacggcaacacggggtacctctacttctggaaccctgagaccaaggttacgcagtacgagcgccccgtcgcggccgtgcccaactccccgccgcagccgcctggctactccaggcccgaggagaggccgagaagcagcacaccttccgagcggagctcggaaaccacggtgagccgcccgcagtatgcacctctctcggataacagggcaaggaatgaccactcggagccacattatgcatctggagtgaacccttcacaaagtgctccttccactaatcaagtttctcaggctgccagtggaaaccaaatgtcgacagaagcatatcgtgctaagcatgagattaccatcatcggcaacgagtcacctgcaccattcatgacatttcagtccacatgcttcccatcagatattctaagggaggttctgcaagcaggattctctgcaccaactcctatccaagctcagtcatggccaattgctatgaagggtagggatatagtagctgtggcaaagacaggttcaggaaaaacactgggctatctcctcccagggtttattcttctgaagcgcctgcatcataattcaagggaaggtccaacagtattagttttgtccccaaccagggaattggcaacacaaattcaagatgaagcaatcaagtttggcagatcttcaagaatatcttctacttgcttatatggaggtgctccaaaaggtcctcagctaagggagttggagcgtggtgccgatgttgttgttgcaactcctgggagattgaacgacattttggaaatgaataaagtgagcctgcgccaagtatcatatcttgtccttgatgaagctgaccgtatgcttgatatgggatttgagccacaaataagaaaaattgtgaaacaaataccacctagacggcaaactcttatgtacactgccacatggccaaaagaggttagaaaaatagcgtcggatttactgaataacccagttcaagttaacattggaaacactgatcagctggttgcaaataaatcaattactcagcatgtggaagttatcccacatatggagaaatcaagacgacttgatcagatcttgcgttcacaagatcctggatcaaaaatcataatattttgctccaccaagaggatgtgtgatcagttggctagaaacctatcacggcagtatggtgcttctgctattcatggtgataaatcacaggctgagagggattctgtgttgaatgacttccgaagcggcaggtgtccagtactcgtagccactgatgtggccgctcgaggcttggacataaaggacatcaggatcgtggttaattatgatttcccaactggtgtggaggactatgtccatcgaattgggagaacaggtagggctggcgcaacaggatctgcctacacattctttggtgaccaggattcaaagtacgcttcagaacttgtgaagattttggagggtgcaaaccagtctgtgccaccacaattaaaagaaatggcccttcgtggaggatatggtggaagatcacgtcgatgggcatcttctgatgactcttatggtagtcagggatatggtgctaaaagatcaactgatagtttcaagaacagcagcttcggcaaccaggccgggggtggttcaagctttcactcgagcttccataacagctctagtggcaatcagttcggtgatactacaagctttcatgccagctatggtaacagcagccagaacaatcagacgggtgacaatccgagcttcccacccagctccagcaacaatcagtccggggatggtctcagttttcatgaaaggttctatggatcacgcggaagggacgagagcagatcaaacaatgatggattccgtgctaggagcagaagtcctggcaagcctgtggaagtttccaactggtga

SEQ ID NO: 3647 - protein, 672 aa, Zea mays
MTSSASAPASNGPRYAPPDPTLPKPWRGLIDGNTGYLYFWNPETKVTQYERPVAAVPNSPPQPPGYSRPEERPRSSTPSERSSETTVSRPQYAPLSDNRARNDHSEPHYASGVNPSQSAPSTNQVSQAASGNQMSTEAYRAKHEITIIGNESPAPFMTFQSTCFPSDILREVLQAGFSAPTPIQAQSWPIAMKGRDIVAVAKTGSGKTLGYLLPGFILLKRLHHNSREGPTVLVLSPTRELATQIQDEAIKFGRSSRISSTCLYGGAPKGPQLRELERGADVVVATPGRLNDILEMNKVSLRQVSYLVLDEADRMLDMGFEPQIRKIVKQIPPRRQTLMYTATWPKEVRKIASDLLNNPVQVNIGNTDQLVANKSITQHVEVIPHMEKSRRLDQILRSQDPGSKIIIFCSTKRMCDQLARNLSRQYGASAIHGDKSQAERDSVLNDFRSGRCPVLVATDVAARGLDIKDIRIVVNYDFPTGVEDYVHRIGRTGRAGATGSAYTFFGDQDSKYASELVKILEGANQSVPPQLKEMALRGGYGGRSRRWASSDDSYGSQGYGAKRSTDSFKNSSFGNQAGGGSSFHSSFHNSSSGNQFGDTTSFHASYGNSSQNNQTGDNPSFPPSSSNNQSGDGLSFHERFYGSRGRDESRSNNDGFRARSRSPGKPVEVSNW

SEQ ID NO: 3648 - DNA, 1845 bp, Zea mays
  CDS (1)..(1845)
atggcgtcctcccgcacctcctgggccgacgtcgccgacgccgagcccgccccgcctcccccggtcgccgcccccgccgccgcatccaacggccccgcgcgttcctcctacgttccgccccacctccgcaaccgcccaccagccgccgccgccgccgcgcccgcctccgccgccccgccgccgcgctccaccgccggcctcctcacccgcaccggcggcggcagcagcttcggtgcgggcggcggcggaggattcggcgggggccgcgcccgcggcggtgcccggtgggaccgcgagccggacccgttcgcggactccgccgccgacgccgaggtcccgttcgacgagcaccagaacacggggatcaacttcgacgcgtacgaggacatcccggtcgagatgtccggccgcgacatcccgccccccgtctccaccttcgccgacattgacctcggcgacgcgctcaacgaaaacatccgccggtgcaagtacgtccgccccacccccgtgcagcgccacgccatcccgatctcgctcgccggccgcgacctcatggcctgcgcgcagacgggctccgggaagaccgccgccctctgcttccccatcatcagcggcatcatgaaggccccgtccgcgggaaggccgcagcggggcggcggcatggggatgaggaccgcttacccgtccgcgctcatcctctccccgactagagagctctctatgcagattcatgaagaggcgaggaagttttcgtatcagactggtgttagggtagttgtcgcttatggaggagcgccaattactcagcagttaagagagcttgagagaggtgttgacattcttgtggctacacctggccgattggttgatttattggaaagggcaagagtatctttacagtcaattagataccttgctcttgatgaggcagatagaatgcttgatatggggtttgaaccacaagttagaagaattgttgagcaaatggacatgccacttccaggtgccaggcagacaatgctgtttagtgcgacgttcccaaaagagatccagaaaatggcatcggatttcctggataactacatcttcctggctgttggaagagttgggtcaagtactgatttgattgcccagcgagttgagtttgtgcaggaggcagataaaagaagccacctgatggatcttcttcatgcacaaagagatacaggaaagcaaactctcacgcttgtctttgtggaaaccaagaggggcgctgattcattggaaagctggttgtgcatgaatgggtttccagctacttctattcatggagatagaaaccagcaggaaagagaatatgctctgaggtccttcaagagtgggcaaactcctattttagttgcaactgatgtggcagctcggggcctcgacattcctcatgttgctcatgttgtcaactttgatctccccaatgatattgatgactacgtacacaggattggaagaactggaagagctgggaagagcggacttgccactgccttcttcaatgataataactcatcactggcaagatctcttgctgacctaatgcaagaatctaaccaagaggtacctgcatggctattgcgctatgcagctcgtccttcttatggtggtggtggtggtgggaggaaccggcgatcagggggagggagccgctttggtggccgtgacttccgcaatgattcttcgtcatttggcaaggggggatcccgtggtggtggtgactactatggtggaggcagcagtggtggttatggtggtggctcctcatatggtggtggcggacacggtggagctggggctccgagtgcctgggattga

SEQ ID NO: 3649 - protein, 614 aa, Zea mays
MASSRTSWADVADAEPAPPPPVAAPAAASNGPARSSYVPPHLRNRPPAAAAAAPASAAPPPRSTAGLLTRTGGGSSFGAGGGGGFGGGRARGGARWDREPDPFADSAADAEVPFDEHQNTGINFDAYEDIPVEMSGRDIPPPVSTFADIDLGDALNENIRRCKYVRPTPVQRHAIPISLAGRDLMACAQTGSGKTAALCFPIISGIMKAPSAGRPQRGGGMGMRTAYPSALILSPTRELSMQIHEEARKFSYQTGVRVVVAYGGAPITQQLRELERGVDILVATPGRLVDLLERARVSLQSIRYLALDEADRMLDMGFEPQVRRIVEQMDMPLPGARQTMLFSATFPKEIQKMASDFLDNYIFLAVGRVGSSTDLIAQRVEFVQEADKRSHLMDLLHAQRDTGKQTLTLVFVETKRGADSLESWLCMNGFPATSIHGDRNQQEREYALRSFKSGQTPILVATDVAARGLDIPHVAHVVNFDLPNDIDDYVHRIGRTGRAGKSGLATAFFNDNNSSLARSLADLMQESNQEVPAWLLRYAARPSYGGGGGGRNRRSGGGSRFGGRDFRNDSSSFGKGGSRGGGDYYGGGSSGGYGGGSSYGGGGHGGAGAPSAWD

SEQ ID NO: 3650 - DNA, 2397 bp, Zea mays
  CDS (1)..(2397)
atgtcgggagggagtggctcatccgggcgcgcggccccgcggtacgccccggatgacccgacgctgcccaagccgtggcgcggcctcgtcgacggcaccaccggctacctctactactggaacccggagacgaacgtcacgcagtacgagcggcctgtgccccccgagagccagctcctcccgcctccgcctccgttgccacccccgcctccacggagccgcgaccgccgcgacaggtccagatcccgatcccgcaccccaccccggcgcgaccacagggaccgcgaccgtgaccgtgacaggcgccacgacgagcacgcgtcctccaagacggcgtcttcccaccaccatccggctccggtagccgtcgccgacgatccttccaccgaggcataccgccgccgccatgagatcaccgtcacgggggataatgtgccgactccaataacttcatttgaggctggtggcttcccgtcagaaattctgaaggagatacaacgtgctggattcgcaagcccaacacctatccaagcccagtcatggccaattgctatgcaaaatcaagatgtagtagctattgcaaagactggatcaggcaaaactcttgggtatctacttcctgggtttatgcatatcaagcgcctgcagaacagcactaggaatggcccaacagtgctagttttggccccaacaagggaacttgcaacacagattctggatgaagctgtgaaatttggaagatcttcaagaatttcttgcacgtgcctatatggtggtgctcctaaaggtcctcagttgagagatttagatagaggggttgatgttgttgttgcaacacctggaaggttaaatgacatcttggagatgcgaaaggtaagtcttaagcaagtgtcatatcttgttctggatgaggctgatcgcatgctggacatgggctttgagccacaaatacggaagatagtgaaagagatacctcaccgtcggcaaacccttatgtacaccgctacatggcccaaggaagtccgaaggattgcagatgatcttcttgttcatcctgtacaggtgacaattggaagtgttgattcacttgttgctaatagttctattactcagcatatagagatcataacaccctcagaaaaacaacggcgcctggagcagatattacgatcccaggattcaggttcaaagatattaatattttgtaccaccaagaggatgtgtgaccaacttgcaaggacactcaccaggcagtttggagcttcggccattcatggtgacaagtcccaaagtgaaagggagaaggttctgaatcagtttcgatctgggcggtctcccattttagtggcaactgatgttgctgcgcgaggtttggacatcaaagatatcagggtagtgatcaactatgacttccccactggtgttgaagactacgttcacaggattggcaggacaggaagggctggtgccactggtgttgcatatacatttttttgtgatcaggattcaaaatatgctgctgacctaatcaaaattctggaaggggcaaaccaacgagtgccccgtgatttagaggatatggcttctcgtggcggtggacgaggtaggaagaggaaccattgggcatcccgccctgacaggggtggttcacgttctgaactggattcaaggtacagcagcagagatggactagcatcttctgggaaatcagagagtggtcgtggcagtcgtggaagggatgataatggtagccgtggcaggtacgaccctggtgaaaccgatgggcgatctcgtaggtctactagaggccgcagtagaagccgtagcaaaagtgacagtagaagccgtagcccaagtcccaagaagtcacgtcgtcatgaaggtagacgtagcaggactaagagcaggagcaggagcaggagccgtagaaatcatggtgctagccacagcaagagtcgcagccctgtcgctagccgtaggtatgaaaagactgcttcaggatctgcccggcctaactcggggcatgcagagcacaaaagccctccaagatctcactctagggatgaccatgtgaaccactctgaccacaaggatgaccacatggaagatgggaagatggaaagggttgatcttgatcgctcgcccagcccacacgatgacaagtctgctccatatagtcctgtgtacaatggcaaagccagtggctcaatgagccccaacggtcagccagaggcaggtgccaaatttgttgaaccttctgggaaacctgagcctgcatctccagtgcgctgcagcaaaggcagagatgatgatgaggaaggtatcatagacgaggatggagagattggtgaggatgatccgcgtgcaaatgcagctgtgcagaatggtaataactga

SEQ ID NO: 3651 - protein, 798 aa, Zea mays
MSGGSGSSGRAAPRYAPDDPTLPKPWRGLVDGTTGYLYYWNPETNVTQYERPVPPESQLLPPPPPLPPPPPRSRDRRDRSRSRSRTPPRRDHRDRDRDRDRRHDEHASSKTASSHHHPAPVAVADDPSTEAYRRRHEITVTGDNVPTPITSFEAGGFPSEILKEIQRAGFASPTPIQAQSWPIAMQNQDVVAIAKTGSGKTLGYLLPGFMHIKRLQNSTRNGPTVLVLAPTRELATQILDEAVKFGRSSRISCTCLYGGAPKGPQLRDLDRGVDVVVATPGRLNDILEMRKVSLKQVSYLVLDEADRMLDMGFEPQIRKIVKEIPHRRQTLMYTATWPKEVRRIADDLLVHPVQVTIGSVDSLVANSSITQHIEIITPSEKQRRLEQILRSQDSGSKILIFCTTKRMCDQLARTLTRQFGASAIHGDKSQSEREKVLNQFRSGRSPILVATDVAARGLDIKDIRVVINYDFPTGVEDYVHRIGRTGRAGATGVAYTFFCDQDSKYAADLIKILEGANQRVPRDLEDMASRGGGRGRKRNHWASRPDRGGSRSELDSRYSSRDGLASSGKSESGRGSRGRDDNGSRGRYDPGETDGRSRRSTRGRSRSRSKSDSRSRSPSPKKSRRHEGRRSRTKSRSRSRSRRNHGASHSKSRSPVASRRYEKTASGSARPNSGHAEHKSPPRSHSRDDHVNHSDHKDDHMEDGKMERVDLDRSPSPHDDKSAPYSPVYNGKASGSMSPNGQPEAGAKFVEPSGKPEPASPVRCSKGRDDDEEGIIDEDGEIGEDDPRANAAVQNGNN

SEQ ID NO: 3652 - DNA, 2019 bp, Zea mays
  CDS (1)..(2019)
atgacgtcgtcggcgtccgcgccggcgtccaatggaccgcgctacgcgccgccggatccaacgctgcccaagccgtggagggggctcatcgacggcaacacggggtacctctacttctggaaccctgagaccaaggttacgcagtacgagcgccccgtcgcggccgtgcccaactccccgccgcagccgcctggctactccaggcccgaggagaggccgagaagcagcacaccttccgagcggagctcggaaaccacggtgagccgcccgcagtatgcacctctctcggataacagggcaaggaatgaccactcggagccacattatgcatctggagtgaacctttcacaaagtgctccttccactaatcaagtttctcaggctgccagtggaaaccaaatgtcgacagaagcatatcgtgctaagcatgagattaccatcatcggcaacgagtcacctgcaccattcatgacatttcagtccacatgcttcccatcagatattctaagggaggttctgcaagcaggattctctgcaccaactcctatccaagctcagtcatggccaattgctatgaagggtagggatatagtagctgtggcaaagacaggttcaggaaaaacactgggctatctcctcccagggtttattcttctgaagcgcctgcatcataattcaagggaaggtccaacagtattagttttgtccccaaccagggaattggcaacacaaattcaagatgaagcaatcaagtttggcagatcttcaagaatatcttctacttgcttatatggaggtgctccaaaaggtcctcagctaagggagttggagcgtggtgccgatgttgttgttgcaactcctgggagattgaacgacattttggaaatgaataaagtgagcctgcgccaagtatcatatcttgtccttgatgaagctgaccgtatgcttgatatgggatttgagccacaaataagaaaaattgtgaaacaaataccacctagacggcaaactcttatgtacactgccacatggccaaaagaggttagaaaaatagcgtcggatttactgaataacccagttcaagttaacattggaaacactgatcagctggttgcaaataaatcaattactcagcatgtggaagttatcccacatatggagaaatcaagacgacttgatcagatcttgcgttcacaagatcctggatcaaaaatcataatattttgctccaccaagaggatgtgtgatcagttggctagaaacctatcacggcagtatggtgcttctgctattcatggtgataaatcacaggctgagagggattctgtgttgaatgacttccgaagcggcaggtgtccagtactcgtagccactgatgtggccgctcgaggcttggacataaaggacatcaggatcgtggttaattatgatttcccaactggtgtggaggactatgtccatcgaattgggagaacaggtagggctggcgcaacaggatctgcctacacattctttggtgaccaggattcaaagtacgcttcagaacttgtgaagattttggagggtgcaaaccagtctgtgccaccacaattaaaagaaatggcccttcgtggaggatatggtggaagatcacgtcgatgggcatcttctgatgactcttatggtagtcagggatatggtgctaaaagatcaactgatagtttcaagaacagcagcttcggcaaccaggccgggggtggttcaagctttcactcgagcttccataacagctctagtggcaatcagttcggtgatactacaagctttcatgccagctatggtaacagcagccagaacaatcagacgggtgacaatccgagcttcccacccagctccagcaacaatcagtccggggatggtctcagttttcatgaaaggttctatggatcacgcggaagggacgagagcagatcaaacaatgatggattccgtgctaggagcagaagtcctggcaagcctgtggaagtttccaactggtga

SEQ ID NO: 3653 - protein, 672 aa, Zea mays
MTSSASAPASNGPRYAPPDPTLPKPWRGLIDGNTGYLYFWNPETKVTQYERPVAAVPNSPPQPPGYSRPEERPRSSTPSERSSETTVSRPQYAPLSDNRARNDHSEPHYASGVNLSQSAPSTNQVSQAASGNQMSTEAYRAKHEITIIGNESPAPFMTFQSTCFPSDILREVLQAGFSAPTPIQAQSWPIAMKGRDIVAVAKTGSGKTLGYLLPGFILLKRLHHNSREGPTVLVLSPTRELATQIQDEAIKFGRSSRISSTCLYGGAPKGPQLRELERGADVVVATPGRLNDILEMNKVSLRQVSYLVLDEADRMLDMGFEPQIRKIVKQIPPRRQTLMYTATWPKEVRKIASDLLNNPVQVNIGNTDQLVANKSITQHVEVIPHMEKSRRLDQILRSQDPGSKIIIFCSTKRMCDQLARNLSRQYGASAIHGDKSQAERDSVLNDFRSGRCPVLVATDVAARGLDIKDIRIVVNYDFPTGVEDYVHRIGRTGRAGATGSAYTFFGDQDSKYASELVKILEGANQSVPPQLKEMALRGGYGGRSRRWASSDDSYGSQGYGAKRSTDSFKNSSFGNQAGGGSSFHSSFHNSSSGNQFGDTTSFHASYGNSSQNNQTGDNPSFPPSSSNNQSGDGLSFHERFYGSRGRDESRSNNDGFRARSRSPGKPVEVSNW

SEQ ID NO: 3654 - DNA, 1998 bp, Zea mays
  CDS (1)..(1998)
atggcgtcgtcggcgtccgcgccagcgtccacgggcccgcgctacgccccgccggatccgacgctgcccaagccgtggagggggctaatcgacggcaacacggggtacctctacttctggaacccggagacaaaggttacgcagtacgagcgtcccgtcgctgccgtgcccgccccccaatcgcagccgcttgtctactccaggcccgatgatgtgccgagaagcagcgcacctgccgagcagcgctcggaagctgcggtgagccgcccgcaatttgtgcctccctccgataacaggacaaggattgatcactcagagtcaagctctgcatctggagtgaacctttcacaaagtgctctgtccaccaatcaagtttctcagtatgccaatgggagccaaatgtcaacagaagcatatcgtgccaagcatgagattactatcgtcggcaatgaggcacctgcaccattcatgacatttcaatccacaggcttcccatcagagattctaagggaggttctgcaagcaggattctctgcaccaactcctatccaagctcaatcatggccaattgctctaaggggtcgtgatatagtagctgtggcgaagacaggttcaggaaaaacactaggctatcttctcccaggttttattcttttgaagcgcctgcagcataattcaagggaaggtccaacagtattagttttgtctccaaccagggaattggcgacacaaattcaagatgaaacaatcaagtttggcagatcttcaagaatatcttctacttgcttatatggaggtgctccaaaaggccctcagctaagagagttggagcgtggtgctgacattgttgtcgcaactcctgggagattaaatgacattttggaaatgaatagagtgagcctgcaccaagtatcatatcttgtccttgatgaagccgaccgtatgcttgatatgggatttgagccacaaataaggaaaattgtgaaacaaataccaccgaaacggcaaactcttatgtatactgccacatggccaagagaggttagaaaaatagcgtctgatttactggctaacccagttcaagttaacattggaaacactgatcagctagttgcaaataagtcaattacacagcatgtggaagttatcccacatatggagaaatcaagacgacttgatcagatcttgcgctcacaagatcctggatcaaaaagcataatattttgctccactaagaggatgtgtgatcagttagctcgaaacctatcacggcagtatcgtgcttctgctattcatggtgataaatcacaggctgagagggattctgtgttgaatgactttcgaagcggcaggtgtccagtacttgtagccactgatgtggccgctcgaggcttggacataaaggacatcagggtcgtggttaactatgatttcccaactggtgtggaggactatgtccatagaattgggaggacaggtagggctggtgcaacaggatctgcctacacattcttcggtgaccaggattcaaagtacgcttcagaccttgtgaagattttggagggtgcaaaccaatctgtgccgccacagttgaaagaaatggctcttcgtggaggatatggtggaagatcacgtcggtgggcatcttctgatgactcttatggtggtcagggatatggtgctaaaagatcaactgatagcttcaataataacaacttcggcaaccaggctggaggtggttcaagctttcactcgagctccagtggcggtcagtttggtgatactacgagcttccatggcagtgtccgcaacaatcagacgggggacaatgcgagctttccacccagctccagcaacaatcaggctggcgatggtctcagttttcatgaaaggttctatggatcacgtggaagggaccagagcagaacaagcaatgatggattccgtgccaggagcagaagtcctcctggcaagcccgtggaagtttccaactggtga

SEQ ID NO: 3655 - protein, 665 aa, Zea mays
MASSASAPASTGPRYAPPDPTLPKPWRGLIDGNTGYLYFWNPETKVTQYERPVAAVPAPQSQPLVYSRPDDVPRSSAPAEQRSEAAVSRPQFVPPSDNRTRIDHSESSSASGVNLSQSALSTNQVSQYANGSQMSTEAYRAKHEITIVGNEAPAPFMTFQSTGFPSEILREVLQAGFSAPTPIQAQSWPIALRGRDIVAVAKTGSGKTLGYLLPGFILLKRLQHNSREGPTVLVLSPTRELATQIQDETIKFGRSSRISSTCLYGGAPKGPQLRELERGADIVVATPGRLNDILEMNRVSLHQVSYLVLDEADRMLDMGFEPQIRKIVKQIPPKRQTLMYTATWPREVRKIASDLLANPVQVNIGNTDQLVANKSITQHVEVIPHMEKSRRLDQILRSQDPGSKSIIFCSTKRMCDQLARNLSRQYRASAIHGDKSQAERDSVLNDFRSGRCPVLVATDVAARGLDIKDIRVVVNYDFPTGVEDYVHRIGRTGRAGATGSAYTFFGDQDSKYASDLVKILEGANQSVPPQLKEMALRGGYGGRSRRWASSDDSYGGQGYGAKRSTDSFNNNNFGNQAGGGSSFHSSSSGGQFGDTTSFHGSVRNNQTGDNASFPPSSSNNQAGDGLSFHERFYGSRGRDQSRTSNDGFRARSRSPPGKPVEVSNW

SEQ ID NO: 3656 - DNA, 2301 bp, Zea mays
  CDS (1)..(2301)
atgtcgaagcggccgaagctcgagggtttcagcatcccgcggcccacctcctacaacttcgagcgctcgcagtccgtgcagcggctctaccgtccgaccgatgacccagacctcgacgacatcgccttctccgacgacgccccctcagatgcccaagccagcaccgcggtagaaggaaaggccgagaatgaggaggagatggacccgctcgacgccttcatggccgagatccaggaggagatccgtgcgccgcccccgccgcccaagcccgaggcgcttcgccgcacggattccgacgatgacgaggatgaccccgtcgagagcttcctgcgggccaagaaggacgctggcctcacgctggccgccgacgtcatgcgcgctggttacgactccgatgaggaggtctacgccgctgccaaggccgtcgacgccggcatgatggaatacgactctgatgacaaccccatagtcatcgacaagaagaaaatagagcccataccagcactcgatcactcgaccattgagtatgacgccttcacaaaagatttctacgaggagaagccatcgatttcaggtatgagtgaccaagaggtaacagattatatgaaaagtttgtcaattcgtgtttctggttttgatgtgccgaggccaataaaaaactttgaggattgtgggtttcatgtacctctaatgaatgctattgccaaacaagcttatgaaaaaccaactacaattcagtgccaggctttacctattgtactttcagggagagatatcattggtattgcaaaaactggctctggtaaaactgcagcttttgtgctccctatgattgttcatattatggatcagcctgagcttgagaaagaagaaggtccaataggagtcatttgtgctccaacaagagaattggcacatcagatatatctcgaagctaagaagtttgcaaagccttacaaccttcgagttgctgctatatatggtggtgtttccaaatttgaccagtttaaagaactgaaagcaggttgtgaaatagtcattgcaactccagggagattaatagacttgctgaagatgaaggcattgaagatgttcagggcaacttatctggttcttgatgaagctgatcgaatgttcgatcttggatttgagccacaaatacgatccattgttggtcaaattagaccagatcgacaaactttacttttttctgcaacaatgccatacaaagtagagcgtttggcaagagaaatattaactgatcctattagagttacagttggtcaagttggcggtgctaatgaagacattaaacaagttgttaatgtactcccttttgatgttgagaaaatgccttggcttttggggaaattgcctggaatgattgatgatggagatgttcttgcatttgcatctaaaaaggctagagtggacgagatagagaaagagttgaatcagagaggattcagaattgctgcgcttcatggcgacaaggatcaagcttctcgtatggagaccctgcagaagttcaaatctgggacatttcatgttctggttgcaactgatgttgctgcacgaggtcttgacatcaaatcgattaaaacagttgtcaactttgatattgcaaaagagatggatatgcatattcaccgaattggaagaactggtcgtgctggcgataaagatggcactgcatatactctgattacacagaaggaggcacattttgctggtgaactggttcacagtttgattgctgctggccaggatgtacccaatgaactcatggatctggctatgaaggatggaagattcagagcaaaacgagactccaggaaaggtgggaagaaaggtggcaaaggaaaaggtggtgttggcggtgctgggcgcgggcgcggtgtgcgtggagttgattttggcctcggcataggttacaatgccgaatctggttcacaagtgcctgctgcaagatctgctgctgtaaattctctgaagacagggatgttgcaacgatttaagagcagctttgtctctggatcttcaaatacaccaagcagcagtgcaccttcctttgtaagaccagcactccgtggctttgtgtctggcggcaccattggaggagacacacggcctgcacaggcagcccccactttcatccctgcatcccggcctgcacagcctgcccccgcggtccctgcatcccagcctgcaggaaataacaacgaaaatgggaacccgaatccagaaagttcacgggatcagttcagggagagaaaacgaccatcaggttgggatcgctag

SEQ ID NO: 3657 - protein, 766 aa, Zea mays
MSKRPKLEGFSIPRPTSYNFERSQSVQRLYRPTDDPDLDDIAFSDDAPSDAQASTAVEGKAENEEEMDPLDAFMAEIQEEIRAPPPPPKPEALRRTDSDDDEDDPVESFLRAKKDAGLTLAADVMRAGYDSDEEVYAAAKAVDAGMMEYDSDDNPIVIDKKKIEPIPALDHSTIEYDAFTKDFYEEKPSISGMSDQEVTDYMKSLSIRVSGFDVPRPIKNFEDCGFHVPLMNAIAKQAYEKPTTIQCQALPIVLSGRDIIGIAKTGSGKTAAFVLPMIVHIMDQPELEKEEGPIGVICAPTRELAHQIYLEAKKFAKPYNLRVAAIYGGVSKFDQFKELKAGCEIVIATPGRLIDLLKMKALKMFRATYLVLDEADRMFDLGFEPQIRSIVGQIRPDRQTLLFSATMPYKVERLAREILTDPIRVTVGQVGGANEDIKQVVNVLPFDVEKMPWLLGKLPGMIDDGDVLAFASKKARVDEIEKELNQRGFRIAALHGDKDQASRMETLQKFKSGTFHVLVATDVAARGLDIKSIKTVVNFDIAKEMDMHIHRIGRTGRAGDKDGTAYTLITQKEAHFAGELVHSLIAAGQDVPNELMDLAMKDGRFRAKRDSRKGGKKGGKGKGGVGGAGRGRGVRGVDFGLGIGYNAESGSQVPAARSAAVNSLKTGMLQRFKSSFVSGSSNTPSSSAPSFVRPALRGFVSGGTIGGDTRPAQAAPTFIPASRPAQPAPAVPASQPAGNNNENGNPNPESSRDQFRERKRPSGWDR

SEQ ID NO: 3658 - DNA, 1944 bp, Zea mays
  CDS (1)..(1944)
atgcgatcttcatgggctgactcagttgcgaacgccgaggaatcggcgcccgcgactgctgctgctaatggctctgttgcaactcatagcacctcgcgccctacgcgcagctcctacgtgcctccacatcttcgtggccgctcagctggtgctgctgttgaagctcaagcaggcttagtagcaccagcacaaggtggaccactgccattggctgctgcacaaccttctggtcagggtgctgctgttggtggccctcgctgggctggcattgtgaatggtggtggtggtggtggcagcattggtgctcctcgccagggccatggtggcggaggcgggggccgtggtgcttggaactcccgtcctggtggttgggaccgcagagaccgggagccagatccgtttgcgaaagccgaggctgaagaaattgatttcgacggccaggagaatactggcatcaattttgatgcctatgaagacatccctgttgagaccagtggccatgatgtgcctgcaccagtcaacacatttgcagagattgatttgggtgatgcattgaatgacaatatccggaggtgcaagtatgtgaaaccaacaccagtgcagcgttacgccatcccaatctccattgctgggcgggatctcatggcctgcgcacagactggatccggaaaaaccgccgcattctgttttccaatcatcagtgggatcttgaagtcaccaaagccacaccagaggtcacggagtacaaggaccgcttgccctctagctctgatcttatcacccactcgtgagctttcagtccaaatccatgaagaagcaaggaagtttgcataccagactggtgtcagagttgtggttgcatatggtggcgcaccaataactaaccagctgagggagttagagagaggtgtggaaatcctggtggcaactcctggtcgcttgatggatctgttggagagggctagagtctcacttcaaatgataaagtatttagctcttgatgaagctgatcggatgcttgatatgggttttgagccacagatacgtaaaattgttgagggcatggacatgcctcaacgtggtgagaggcagacaatgttgttcagtgcaacattcccaaaagagatacagaggatggccgcagatttccttgctgattacatctttcttgctgttgggagagttggttcaagcaccgatttgattgttcagagggtggagtttgtcctcgcttcagacaaacgaagctacctcatggatcttctgcatgcacaaaaggctaatggcacacatggaaagcacgctcttacattggtctttgtggagacaaagaggggggctgatgccttggaagacgggttttttagaaatggacatccatggactagcattcatggagacaggacacaacaggaaagggagcatgcccttaggtccttcaagagcggagcaactcccatccttgtggcgactgatgttgctgctcgtggtcttgacataccacatgttgcccatgtgattaattttgacctccctaatgatatagatgactatgttcatcggattggaaggactggacgtgctgggaaatctggtcttgcgactgcattcttcaacgagagcaacactacgcttgcaaggccgttgagtgatctcatgaaagaggccaaccaggaggttcctaagtggcttgagggatacgctgcccgatcagcctacggaggtggaggtggtagaaaccgcagacaaggtagcagtgccagatttggtggccgtgatttccggcgagataggggcagtggtggaggatatggtggtggttcctacggaggaggtggtggtggtggatatgggggatcatcaggatacggtggtgcctatggcggcggtggcagcagcggcggcggctatggtggtggtcagagtacgagttcttgggactga

SEQ ID NO: 3659 - protein, 647 aa, Zea mays
MRSSWADSVANAEESAPATAAANGSVATHSTSRPTRSSYVPPHLRGRSAGAAVEAQAGLVAPAQGGPLPLAAAQPSGQGAAVGGPRWAGIVNGGGGGGSIGAPRQGHGGGGGGRGAWNSRPGGWDRRDREPDPFAKAEAEEIDFDGQENTGINFDAYEDIPVETSGHDVPAPVNTFAEIDLGDALNDNIRRCKYVKPTPVQRYAIPISIAGRDLMACAQTGSGKTAAFCFPIISGILKSPKPHQRSRSTRTACPLALILSPTRELSVQIHEEARKFAYQTGVRVVVAYGGAPITNQLRELERGVEILVATPGRLMDLLERARVSLQMIKYLALDEADRMLDMGFEPQIRKIVEGMDMPQRGERQTMLFSATFPKEIQRMAADFLADYIFLAVGRVGSSTDLIVQRVEFVLASDKRSYLMDLLHAQKANGTHGKHALTLVFVETKRGADALEDGFFRNGHPWTSIHGDRTQQEREHALRSFKSGATPILVATDVAARGLDIPHVAHVINFDLPNDIDDYVHRIGRTGRAGKSGLATAFFNESNTTLARPLSDLMKEANQEVPKWLEGYAARSAYGGGGGRNRRQGSSARFGGRDFRRDRGSGGGYGGGSYGGGGGGGYGGSSGYGGAYGGGGSSGGGYGGGQSTSSWD

SEQ ID NO: 3660 - DNA, 23 bp, Artificial sequence
  primer
atggcagacttgccacagaaggt

SEQ ID NO: 3661 - DNA, 25 bp, Artificial sequence
  primer
ttaccaccatgaagcgttgctattt

SEQ ID NO: 3662 - protein, 414 aa, Artificial sequence
  consensus sequence
  Variant (2)..(18): Xaa in position 2 to 18 is any amino acid
  Variant (19)..(21): Xaa in position 19 to 21 is any or no amino acid
  Variant (25)..(25): Xaa in position 25 is any amino acid
  Variant (27)..(30): Xaa in position 27 to 30 is any amino acid
  Variant (32)..(34): Xaa in position 32 to 34 is any amino acid
  Variant (35)..(35): Xaa in position 35 is any or no amino acid
  Variant (39)..(42): Xaa in position 39 to 42 is any amino acid
  Variant (44)..(44): Xaa in position 44 is any amino acid
  Variant (51)..(52): Xaa in position 51 to 52 is any amino acid
  Variant (53)..(55): Xaa in position 53 to 55 is any or no amino acid
  Variant (57)..(67): Xaa in position 57 to 67 is any amino acid
  Variant (68)..(93): Xaa in position 68 to 93 is any or no amino acid
  Variant (95)..(95): Xaa in position 95 is any amino acid
  Variant (96)..(96): Xaa in position 96 is any or no amino acid
  Variant (98)..(98): Xaa in position 98 is any amino acid
  Variant (100)..(100): Xaa in position 100 is any amino acid
  Variant (106)..(107): Xaa in position 106 to 107 is any amino acid
  Variant (109)..(124): Xaa in position 109 to 124 is any amino acid
  Variant (125)..(134): Xaa in position 125 to 134 is any or no amino acid
  Variant (137)..(141): Xaa in position 137 to 141 is any amino acid
  Variant (143)..(154): Xaa in position 143 to 154 is any amino acid
  Variant (155)..(159): Xaa in position 155 to 159 is any or no amino acid
  Variant (166)..(166): Xaa in position 166 is any amino acid
  Variant (168)..(175): Xaa in position 168 to 175 is any amino acid
  Variant (177)..(181): Xaa in position 177 to 181 is any amino acid
  Variant (183)..(183): Xaa in position 183 is any amino acid
  Variant (193)..(193): Xaa in position 193 is any amino acid
  Variant (197)..(199): Xaa in position 197 to 199 is any amino acid
  Variant (201)..(202): Xaa in position 201 to 202 is any amino acid
  Variant (204)..(210): Xaa in position 204 to 210 is any amino acid
  Variant (211)..(214): Xaa in position 211 to 214 is any or no amino acid
  Variant (218)..(220): Xaa in position 218 to 220 is any amino acid
  Variant (224)..(224): Xaa in position 224 is any amino acid
  Variant (226)..(231): Xaa in position 226 to 231 is any amino acid
  Variant (233)..(235): Xaa in position 233 to 235 is any amino acid
  Variant (237)..(245): Xaa in position 237 to 245 is any amino acid
  Variant (246)..(257): Xaa in position 246 to 257 is any or no amino acid
  Variant (259)..(262): Xaa in position 259 to 262 is any amino acid
  Variant (263)..(272): Xaa in position 263 to 272 is any or no amino acid
  Variant (274)..(276): Xaa in position 274 to 276 is any amino acid
  Variant (278)..(286): Xaa in position 278 to 286 is any amino acid
  Variant (287)..(309): Xaa in position 287 to 309 is any or no amino acid
  Variant (311)..(312): Xaa in position 311 to 312 is any amino acid
  Variant (315)..(317): Xaa in position 315 to 317 is any amino acid
  Variant (319)..(323): Xaa in position 319 to 323 is any amino acid
  Variant (325)..(332): Xaa in position 325 to 332 is any amino acid
  Variant (333)..(333): Xaa in position 333 is any or no amino acid
  Variant (338)..(342): Xaa in position 338 to 342 is any amino acid
  Variant (343)..(351): Xaa in position 343 to 351 is any or no amino acid
  Variant (353)..(355): Xaa in position 353 to 355 is any amino acid
  Variant (357)..(358): Xaa in position 357 to 358 is any amino acid
  Variant (360)..(361): Xaa in position 360 to 361 is any amino acid
  Variant (363)..(366): Xaa in position 363 to 366 is any amino acid
  Variant (371)..(371): Xaa in position 371 is any amino acid
  Variant (377)..(377): Xaa in position 377 is any amino acid
  Variant (379)..(384): Xaa in position 379 to 384 is any amino acid
  Variant (386)..(386): Xaa in position 386 is any amino acid
  Variant (388)..(388): Xaa in position 388 is any amino acid
  Variant (390)..(390): Xaa in position 390 is any amino acid
  Variant (392)..(396): Xaa in position 392 to 396 is any amino acid
  Variant (409)..(410): Xaa in position 409 to 410 is any amino acid
  Variant (411)..(411): Xaa in position 411 is any or no amino acid
  Variant (413)..(413): Xaa in position 413 is any amino acid
FXXXXXXXXXXXXXXXXXXXXPTPXQXXXXPXXXXGRDXXXXAXTGSGKTXXXXXPXXXXXXXXXXXXXXXXXXXXXXXXXXXXXXXXXXXXXPXXLXLXPTRELXXQXXXXXXXXXXXXXXXXXXXXXXXXXXGGXXXXXQXXXXXXXXXXXXXXXXXATPGRLXDXXXXXXXXLXXXXXLXLDEADRMLDXMGFXXXIXXIXXXXXXXXXXXRQTXXXSATXPXXXXXXAXXXLXXXXXXXXXXXXXXXXXXXXXQXXXXXXXXXXXXXXLXXXLXXXXXXXXXXXXXXXXXXXXXXXXXXXXXXXXFXXTKXXXDXXXXXLXXXXXXXXXIHGDXXXXXXXXXXXXXXRXXXLXXFXXGXXXXLVATXVAARGXDXXXXXXVXNXDXPXXXXXYVHRIGRTGRAGXXXGXA

SEQ ID NO: 3663 - protein, 36 aa, Artificial sequence
  protein pattern
  Variant (2)..(3): Xaa in position 2 to 3 is any or no amino acid
  Variant (10)..(10): Xaa in position 10 is any amino acid
  Variant (12)..(19): Xaa in position 12 to 19 is any amino acid
  Variant (20)..(20): Xaa in position 20 is Phe, Leu or Met
  Variant (21)..(25): Xaa in position 21 to 25 is any amino acid
  Variant (26)..(26): Xaa in position 26 is Ile, Leu or Val
  Variant (27)..(27): Xaa in position 27 is any amino acid
  Variant (28)..(28): Xaa in position 28 is Phe, Ile, Leu or Met
  Variant (33)..(33): Xaa in position 33 is Gln or Arg
  Variant (35)..(35): Xaa in position 35 is Phe, Ile, Leu or Val
VXXATPGRLXDXXXXXXXXXXXXXXXXXDEADXMXD

SEQ ID NO: 3664 - protein, 21 aa, Artificial sequence
  protein pattern
  Variant (2)..(2): Xaa in position 2 is any amino acid
  Variant (4)..(5): Xaa in position 4 to 5 is Ile, Leu, Met or Val
  Variant (6)..(6): Xaa in position 6 is Ala or Gly
  Variant (7)..(7): Xaa in position 7 is any amino acid
  Variant (9)..(9): Xaa in position 9 is any amino acid
  Variant (12)..(12): Xaa in position 12 is Ser or Thr
  Variant (16)..(16): Xaa in position 16 is Ala, Gly, Ile or Leu
  Variant (17)..(17): Xaa in position 17 is Ala, Gly, Ser, Thr or Val
  Variant (18)..(20): Xaa in position 18 to 20 is any amino acid
GXDXXXXAXTGXGKTXXXXXP

SEQ ID NO: 3665 - protein, 22 aa, Artificial sequence
  protein pattern
  Variant (4)..(4): Xaa in position 4 is any amino acid
  Variant (5)..(5): Xaa in position 5 is Phe, Leu or Met
  Variant (6)..(6): Xaa in position 6 is Phe, Trp or Tyr
  Variant (7)..(7): Xaa in position 7 is Ser or Thr
  Variant (10)..(16): Xaa in position 10 to 16 is any amino acid
  Variant (17)..(21): Xaa in position 17 to 21 is any or no amino acid
RQTXXXXATXXXXXXXXXXXXL

SEQ ID NO: 3666 - protein, 12 aa, Artificial sequence
  protein pattern
  Variant (2)..(2): Xaa in position 2 is Ile or Val
  Variant (3)..(3): Xaa in position 3 is Ile, Leu, Met or Val
  Variant (4)..(4): Xaa in position 4 is any amino acid
  Variant (10)..(10): Xaa in position 10 is Ala, Ser, Thr or Val
  Variant (11)..(11): Xaa in position 11 is any amino acid
LXXXPTRELXXQ

SEQ ID NO: 3667 - protein, 13 aa, Artificial sequence
  protein pattern
  Variant (3)..(3): Xaa in position 3 is Asp or Asn
  Variant (4)..(4): Xaa in position 4 is Lys or Arg
  Variant (5)..(5): Xaa in position 5 is any amino acid
  Variant (7)..(8): Xaa in position 7 to 8 is any amino acid
  Variant (10)..(11): Xaa in position 10 to 11 is any amino acid
  Variant (12)..(12): Xaa in position 12 is Ala, Gly, Ser, Thr or Val
HGXXXQXXRXXXL

SEQ ID NO: 3668 - DNA, 153 bp, Escherichia coli
  CDS (1)..(153): transl_table=11
atgtccgatccatttggtacgaatacctggttctatgtcttccgccagcaaccaggtcatgaaggtgtaactcagcaaacgctgacgctgacctttaacagtagcggtgtgttgaccaatattgataacaaacctgcgctgagtggtaactaa

SEQ ID NO: 3669 - protein, 50 aa, Escherichia coli
MSDPFGTNTWFYVFRQQPGHEGVTQQTLTLTFNSSGVLTNIDNKPALSGN

SEQ ID NO: 3670 - DNA, 345 bp, Xenorhabdus bovienii
  CDS (1)..(345): transl_table=11
atgcgctgtaaattgttgactgccgctaccgtatcacttgttatgctgactgcgggttgctccatgtttgagcgagttgtttatcgtcctgatattaatcaagggaattacctgacaccggctgcggtatcaaaaatccacaaaggaatgactcaacaacaagtcgcttacactttgggaacaccaatgctgaccgatccgtttggaagtcaaatttggtactacatattccgtgagcagccaggccataagaaggccacacaagaaacattgactctcacctttgataataatggtgtgttgactgatatcaagaatgaaaaagctctgccagaggatcagtaa

SEQ ID NO: 3671 - protein, 114 aa, Xenorhabdus bovienii
MRCKLLTAATVSLVMLTAGCSMFERVVYRPDINQGNYLTPAAVSKIHKGMTQQQVAYTLGTPMLTDPFGSQIWYYIFREQPGHKKATQETLTLTFDNNGVLTDIKNEKALPEDQ

SEQ ID NO: 3672 - DNA, 339 bp, Salmonella typhimurium LT2
  CDS (1)..(339): transl_table=11
atgcgctgtaaaacgctgactgctgccgcagcagtactcctgatgttgaccgcaggctgttccactctggagcgagtggtttaccgacctgacatcaatcaggggaactatcttacacctacggatgtcgccaaagtgcgtgttggtatgacgcaacaacaggttgcgtatgctttaggcacgccgatgatgaccgatccttttggtacgaacacctggttttatgtcttccgccagcagccaggacatgagaacgtgacgcagcagactctgacgctcacctttaacagcagcggcgtgttaaccaatattgataacaaaccggcgttgacgaagtaa

SEQ ID NO: 3673 - protein, 112 aa, Salmonella typhimurium LT2
MRCKTLTAAAAVLLMLTAGCSTLERVVYRPDINQGNYLTPTDVAKVRVGMTQQQVAYALGTPMMTDPFGTNTWFYVFRQQPGHENVTQQTLTLTFNSSGVLTNIDNKPALTK

SEQ ID NO: 3674 - DNA, 348 bp, Photorhabdus luminescens subsp. laumondii TTO1
  CDS (1)..(348): transl_table=11
atgcgctgtaaaatgttgactgccgctgctgtatcatttgtcatgctgactgcgggttgctctacgttggaacgggctgtttatcgccctgacattaatcaggggaactacctaacaccgacgagtgtatcaaaaatccacaaaggaatgacccagcaacaggtagcttacacattaggaacaccaatgttacaagacccgtttgggactcaaacgtggttttatgtatttcgtcagcaacctgggcacgaaaaagtgactcagcaaactctgaccctgacatttgacagtaatggtgtactgactgacattaaaaacgaaaattcacttaccgaagatcttcaataa

SEQ ID NO: 3675 - protein, 115 aa, Photorhabdus luminescens subsp. laumondii TTO1
MRCKMLTAAAVSFVMLTAGCSTLERAVYRPDINQGNYLTPTSVSKIHKGMTQQQVAYTLGTPMLQDPFGTQTWFYVFRQQPGHEKVTQQTLTLTFDSNGVLTDIKNENSLTEDLQ

SEQ ID NO: 3676 - DNA, 342 bp, Klebsiella pneumoniae subsp. pneumoniae MGH 78578
  CDS (1)..(342): transl_table=11
atgcgctgtaaaacgctgactgctgccgcagcggttcttcttatgttgaccgcaggctgttccactctggaacgagtggtttaccgtcctgacatcaaccagggtaactatctggcaccaaacgatgtagcaaaaattcgtgtcggtatgacgcaacagcaggtagcttatgctctggggacgccaatgatgacggatccgttcggcaccaatacctggttctatgtcttccgtcaggagccgggccaccagaaagtgactcagcagaccctaaccctgaccttcaacagcggcggtgtgttgactaacattgataacaagcctgcgctgaccagtcagtaa

SEQ ID NO: 3677 - protein, 113 aa, Klebsiella pneumoniae subsp. pneumoniae MGH 78578
MRCKTLTAAAAVLLMLTAGCSTLERVVYRPDINQGNYLAPNDVAKIRVGMTQQQVAYALGTPMMTDPFGTNTWFYVFRQEPGHQKVTQQTLTLTFNSGGVLTNIDNKPALTSQ

SEQ ID NO: 3678 - DNA, 336 bp, Pectobacterium atrosepticum SCRI1043
  CDS (1)..(336): transl_table=11
atgcgctgtaaaacgctgactgtcgtcgccgcggtggttgttatgctgaccgccggttgttccacgctggaaaaggtggtgtatcggccggacatcaatcagggaaactatctggcaccggctgacgttgcgaaaattcacaccggcatgaccaaacaacaggtcgcttatacgctgggtacgcctatgatgcaggatccgtttggcagcgatacctggttttacgtcttccgccagcagcctggccatgaatcggtaaaacaacagacgctgacgctaacgttcagcggcagtggcgtgttaaccaacatcaacaacaagcctgcactggattaa

SEQ ID NO: 3679 - protein, 111 aa, Pectobacterium atrosepticum SCRI1043
MRCKTLTVVAAVVVMLTAGCSTLEKVVYRPDINQGNYLAPADVAKIHTGMTKQQVAYTLGTPMMQDPFGSDTWFYVFRQQPGHESVKQQTLTLTFSGSGVLTNINNKPALD

SEQ ID NO: 3680 - DNA, 351 bp, Yersinia pseudotuberculosis IP 32953
  CDS (1)..(351): transl_table=11
gtgattactatgcgctgtaaaatgctgactgccgccgctgtgatgcttgcaatgcttactgcgggttgttcaacgttggagaaggtggtctaccggcctgatattaatcagggtaactatttatcacctattgatgcctccaaaattcataaaggtatgacacagcaacaagtggcgtataccttaggcacaccgatgctacaagatccgtttggcactcaaacctggttctacgttttccgccaacaacctggtcacgaaaaaataacgcaacaaacgttaacgttgacctttgatagcagtggtgtactgactgatatcaaaaatgagcccgcgttaaccggaagctaa

SEQ ID NO: 3681 - protein, 116 aa, Yersinia pseudotuberculosis IP 32953
MITMRCKMLTAAAVMLAMLTAGCSTLEKVVYRPDINQGNYLSPIDASKIHKGMTQQQVAYTLGTPMLQDPFGTQTWFYVFRQQPGHEKITQQTLTLTFDSSGVLTDIKNEPALTGS

SEQ ID NO: 3682 - DNA, 297 bp, Salmonella paratyphi A
  CDS (1)..(297): transl_table=11
atgttgaccgcaggctgttccactctggagcgagtggtttaccaacctgacatcaatcaggggaactatcttacacctacggatgtcgccaaagtgcgtgttggtatgacgcaacaacaggttgcgtatgctttaggcacgccgatgatgaccgatccttttggtacgaatacctggttttatgtcttccgccagcagccaggacacgagaacgtgacgcagcagactctgacgctcacctttaacagcagcggcgtgttaaccaatattgataacaaaccggcgttgacgaagtaa

SEQ ID NO: 3683 - protein, 98 aa, Salmonella paratyphi A
MLTAGCSTLERVVYQPDINQGNYLTPTDVAKVRVGMTQQQVAYALGTPMMTDPFGTNTWFYVFRQQPGHENVTQQTLTLTFNSSGVLTNIDNKPALTK

SEQ ID NO: 3684 - DNA, 342 bp, Escherichia coli O6
  CDS (1)..(342): transl_table=11
atgcgctgtaaaacgctgactgctgcagcagcagtactattgatgttgaccgcaggctgttccactctggagcgagtggtttaccgtcctgacatcaaccaggggaactatctgaccgctaacgacgtatccaaaatacgtgttggcatgacgcaacaacaagttgcgtacgcattgggtacaccgctgatgtccgatccatttggtacaaatacctggttctatgtcttccgccagcaacctggtcatgaaggtgtaacgcagcaaacgctgacgctgacctttaacagtagcggtgtgttgaccaacattgataacaaacctgcgctgagtggtaactaa

SEQ ID NO: 3685 - protein, 113 aa, Escherichia coli O6
MRCKTLTAAAAVLLMLTAGCSTLERVVYRPDINQGNYLTANDVSKIRVGMTQQQVAYALGTPLMSDPFGTNTWFYVFRQQPGHEGVTQQTLTLTFNSSGVLTNIDNKPALSGN

SEQ ID NO: 3686 - DNA, 24 bp, Artificial sequence
  primer
atgtccgatccatttggtacgaat

SEQ ID NO: 3687 - DNA, 23 bp, Artificial sequence
  primer
ttagttaccactcagcgcaggtt

SEQ ID NO: 3688 - protein, 96 aa, Artificial sequence
  consensus sequence
  Variant (8)..(9): Xaa in position 8 to 9 is any amino acid
  Variant (11)..(12): Xaa in position 11 to 12 is any amino acid
  Variant (15)..(15): Xaa in position 15 is any amino acid
  Variant (25)..(30): Xaa in position 25 to 30 is any amino acid
  Variant (32)..(34): Xaa in position 32 to 34 is any amino acid
  Variant (38)..(38): Xaa in position 38 is any amino acid
  Variant (44)..(44): Xaa in position 44 is any amino acid
  Variant (49)..(50): Xaa in position 49 to 50 is any amino acid
  Variant (51)..(51): Xaa in position 51 is any or no amino acid
  Variant (56)..(57): Xaa in position 56 to 57 is any amino acid
  Variant (70)..(72): Xaa in position 70 to 72 is any amino acid
  Variant (82)..(84): Xaa in position 82 to 84 is any amino acid
  Variant (89)..(89): Xaa in position 89 is any amino acid
  Variant (91)..(91): Xaa in position 91 is any amino acid
  Variant (93)..(94): Xaa in position 93 to 94 is any amino acid
MLTAGCSXXEXXVYXPDINQGNYLXXXXXXKXXXGMTXQQVAYXLGTPXXXDPFGXXTWFYVFRQQPGHXXXTQQTLTLTFXXXGVLTXIXNXXAL

SEQ ID NO: 3689 - protein, 43 aa, Artificial sequence
  protein pattern
  Variant (5)..(6): Xaa in position 5 to 6 is any or no amino acid
  Variant (8)..(9): Xaa in position 8 to 9 is any or no amino acid
  Variant (17)..(17): Xaa in position 17 is Glu or Gln
  Variant (21)..(21): Xaa in position 21 is Glu or Gln
  Variant (22)..(22): Xaa in position 22 is any amino acid
  Variant (23)..(23): Xaa in position 23 is Ile or Val
  Variant (24)..(24): Xaa in position 24 is any amino acid
  Variant (33)..(33): Xaa in position 33 is Asp, Asn or Ser
  Variant (34)..(34): Xaa in position 34 is Gly or Ser
  Variant (35)..(35): Xaa in position 35 is Gly, Asn or Ser
  Variant (40)..(40): Xaa in position 40 is Asp or Asn
  Variant (42)..(42): Xaa in position 42 is any amino acid
DPFGXXTXXWFYVFRQXPGHXXXXQQTLTLTFXXXGVLTXIXN

SEQ ID NO: 3690 - DNA, 912 bp, Synechocystis sp.
  CDS (1)..(912): transl_table=11
atgaagttaggccgaattttaaaaatgtcagaattcatgagcaactccattcccctggtgggattaaaggcagaccatttccgccatcctttggaccaaatggccaccaccaacttgaagcaaattcccggcctagacctgatggtgcggggactgttgggctccgtggcagaacagttttttgccctcaataatttggcggccagtgtccgggtgggagaaaaacaattaccccatcttcatcaactgcttttggatgcttgcaaaattctcgacctggaagcgccggaactctacattcaacaaaatccccaacccaatgcctacacttttgccatgcgaggtaaaaagcctttcatggtgatgcacacttccctggtggatatgttgactccggcggaaattcaagcggtgatggcccatgagttgggacacctcaaatgtgaacatggggtgtatttaaccctggctaacattatggtcttagcagcggggctaattcccaactggggagcagtgttgacccaatccctccagtcccagatgttggagtgggtgcgctgtgctgaatttagctgtgaccgggcagccctgttggcggtgcaagacccgaaagtggtgatgtcggtgctgatgaagttggccggtggttctccccaattggctcctttactaaacttggatgctttcattgaccaagcccgggaatacgatcgcctgggggaagatgaaatgggggcaatgctgaggaatatgcagacccaaaacctgacccatccggtgccggtactccgggccagggaaattgatcgttggagtgattcccaaacctatcaaaacttgctcaagggccgcaaaaatgcgtataatctgaacaccgaagaaaacaagggcggctggcggaattggtaa

SEQ ID NO: 3691 - protein, 303 aa, Synechocystis sp.
MKLGRILKMSEFMSNSIPLVGLKADHFRHPLDQMATTNLKQIPGLDLMVRGLLGSVAEQFFALNNLAASVRVGEKQLPHLHQLLLDACKILDLEAPELYIQQNPQPNAYTFAMRGKKPFMVMHTSLVDMLTPAEIQAVMAHELGHLKCEHGVYLTLANIMVLAAGLIPNWGAVLTQSLQSQMLEWVRCAEFSCDRAALLAVQDPKVVMSVLMKLAGGSPQLAPLLNLDAFIDQAREYDRLGEDEMGAMLRNMQTQNLTHPVPVLRAREIDRWSDSQTYQNLLKGRKNAYNLNTEENKGGWRNW

SEQ ID NO: 3692 - DNA, 1647 bp, Zea mays subsp. mays
  CDS (60)..(1067)
aaaaacacctgtggcagcggccgcgctgcttgcctcgccttgctctcggttcgtggggcatggcggcttcgccggcttgtgctccggggctcatctccggccccaccctccctcccctgcccgttgccttccgctgctactgggcccaaaagccctcctccgcgtcgacctcctccaggcgcccgtgccgcaggcggttcgttcccgttgcagctgcctccacccgcacctcctctgcggctgctcggggcctcgacgccgacgacttccgccacccgctcgacaagcagaacactcttctgctgagagcaattccagggctcaacgacgtgggcaaagctttgctaggacccgtctcggagcaagttatggtactccagaacattggaacatcagttctcgtctccccgaaccagcttccagatctccaccaactgctggttgaggctgcgaagctcttgaacaccgaagctcctgacttgtacataaggcagaatcctgttccaaatgcctacaccttagcaatcaacggcaaaaaaccattcattgtcgttcacacaagccttgtggagctgcttactccaagggaattgcaggctgttttggctcatgagctgggtcacctcaagtgcgatcatggtgtttggctcacttttgccaatatactcacaatgggagcatacactgtccctggttttggcatggttgctggcttcctggaagagcagctatacagatggctacgagctgcagagctgacttgtgacagggcagctcttcttgtggtgcaagatccgaaggtagtcatctctgttctgatgaaattggccggaggatgcccatctcttgccgacaagctaaatgtggatgccttcctggagcaagctcgttcgtacgacaaggctgcatcgaacccagttgggtggtacatccggaatgcacaaaccagagagctttcacaccctttgcctgtgatgcgagccagagagatcgatgagtggtcaagaagccaggagtacaaaaccgtaatgcaaaaaatgcttaagatggggctgaacagagtatagttagtgatgacacatacgaagaggtctgtacacggaatccatcatgtttctttgcaaggatttagctttagatcatgggcctgtttggttcagcttttttctaaccagcttttctgaaaatctggctgtggggagaatctgagtatcattacgattacatatgaaggaagataaagttgttcatagggctcaggatctagaaagtgacagattcctactattacaacgactgaaccgattatgtgtttatgttgattttggatggtttttgtcctcaacgaattttatagaagttggctgaaaagctgagcgtttggcagtctgcagcagcttttggtggtcagaagctaccagaagccgaaacaaacaggccccatgactgtcctttcctgtatatctgatcatgaatttgtgattttctcctgggtggctgggcaccgttttttttcaggactgtagagtctgtatatggagaatgtatgtatatggaagggaatgtctgtatatggagaaggctggtgtttctgaaaaaaaaacagatacaaacatagacatactgtatatatttgcagttgaattt

SEQ ID NO: 3693 - protein, 335 aa, Zea mays subsp. mays
MAASPACAPGLISGPTLPPLPVAFRCYWAQKPSSASTSSRRPCRRRFVPVAAASTRTSSAAARGLDADDFRHPLDKQNTLLLRAIPGLNDVGKALLGPVSEQVMVLQNIGTSVLVSPNQLPDLHQLLVEAAKLLNTEAPDLYIRQNPVPNAYTLAINGKKPFIVVHTSLVELLTPRELQAVLAHELGHLKCDHGVWLTFANILTMGAYTVPGFGMVAGFLEEQLYRWLRAAELTCDRAALLVVQDPKVVISVLMKLAGGCPSLADKLNVDAFLEQARSYDKAASNPVGWYIRNAQTRELSHPLPVMRAREIDEWSRSQEYKTVMQKMLKMGLNRV

SEQ ID NO: 3694 - DNA, 1424 bp, Glycine max
  CDS (175)..(1035)
gcacaagtcccaacctaaacccgcgtctcttcactcttcaattcaatggcttccacgcccttctccactttctgccacttccacaaacccaccctccttttcttagcttccgacgggttcaggctcggtggcgctccggcgatcgccttcggaaaggttcggaagaaccgcaaaatgggaatattccccgtttgcagagctggttctgccgtcgtcttccgcgacctcgacgccgacgactttcgccaccctcttgatcaacagaatacgctgctactgagagcaattccgggattgaacgaactgggaaaagctcttctaggaactgtatctgagcaggttatgctccttgaaaacattgggacatccgtccttgtttctaaaaatcagcttcctgatctttaccacctaatggtcgaagctgccgaaatattaaatgtagatgcccctgatctatatgttcgtcaaagtcctgtgccaaatgcatatacattagctataagtggtaaacgacctttcgttgtcattcatactagccttgtggagctcctgacaaaagcagagttgcaggctgttttggctcatgagctgggtcacctaaaatgtgatcatggtgtgtggcttacatatgcaaatattctaacccttggagcctattctgtacctggtattggcggtatgatagctcagactttggaagagcagctgttccgctggcttcgagcagctgagttgacttgtgatcgtgcagctcttcttgttgctcaagaccctaaggttgtcatctctgtcctcatgaaattagctgggggatgtccatctatggctgatcaactaaatgtggatgcattcctggagcaagctcgctcttatgaaaaagctgcttccagcccaattgggtggtatataaggaatgcacaaacaaggcaactgtcacatcctctgcctgttctacgtgctagcgaaattgatgaatggtcaagaactccagcttataaatctcttttgaaacgaggaattcagatcaaatcttagaacgaaatgtctagcagtgcatgcatggaatttgttgaaagtgcacagcagctcaaggttcttcaagttagtgcgtggtggcagatgttcaaatggtttcaggcggaagtagcatttattatgcatctatctacggctgctgcaaacatgtatgtattcactgtgttatattagtcaacccgtaagtagaattttggtgagttggattattatttcatagaaatattggttttggaaagaaaagaattacctgtacaattctagcttagaaaatttctcggagtagaaaacactattatgtaagttttatgaccgaaaatttttatttgttgtattttacactataagctaagctctttttgaatagtactaaaacattgactgtttcc

SEQ ID NO: 3695 - protein, 286 aa, Glycine max
MGIFPVCRAGSAVVFRDLDADDFRHPLDQQNTLLLRAIPGLNELGKALLGTVSEQVMLLENIGTSVLVSKNQLPDLYHLMVEAAEILNVDAPDLYVRQSPVPNAYTLAISGKRPFVVIHTSLVELLTKAELQAVLAHELGHLKCDHGVWLTYANILTLGAYSVPGIGGMIAQTLEEQLFRWLRAAELTCDRAALLVAQDPKVVISVLMKLAGGCPSMADQLNVDAFLEQARSYEKAASSPIGWYIRNAQTRQLSHPLPVLRASEIDEWSRTPAYKSLLKRGIQIKS

SEQ ID NO: 3696 - DNA, 1351 bp, Sorghum bicolor
  CDS (82)..(1089)
tctggctccttccttcggctcctcctggacctgtggccgcggccgcgctgctggccttgactttactctcgattcgtgggcatggcggcttcgccggcttgtgctccggtcctcgtctccggccccacgctccctccgcagcccgttcccttccgctgctaccgggcccaaaagccttcctccgcgtcgtccacctcctggcgcccgcgccgcaggcggttcgttccggttgcagctgcctccacccgcacctcccctgcggccgctcggggcctcgacgccgacgacttccgccacccgctcgacaagcagaacactctgctgctaagagcgattcctgggctcaacgacatcggcaaagctttgttaggacccgtctcggagcaagttatggtcctccagaacattggaacatcagttctcgtctccccaaaccagcttccagatctccaccaactgctggctgaggctgcaacgctcttgaacacggaagctcctgacttgtacataaggcagaatcctgttccaaatgcttacaccttagcaatcaatggcaaaaaaccattcattgtcgttcacacaagccttgtcgagctgcttactccaaaggaattgcaggctggtttggctcatgagctgggtcacctcaagtgcgatcatggtgtatggctcactttcgccaatatactcacaatgggagcatacactgtccctggttttggcatggttgctggcttcctggaagagcagctatacaggtggctacgtgctgcagagctgacttgtgacagggcagctcttcttgtggtgcaagacccaaaggttgtcatctctgttctgatgaaattggccggaggatgcccatctcttgccgaccagttaaacgtggatgccttcttggagcaagctcgttcctacgacaaagctgcatcaaacccagttgggtggtacatccggaatgcacaaaccagagagctttcacaccctttgcctgtgatgcgagcccgagagatcgatgagtggtcaagaagccaggagtacaagaccacaatgcaaaaaatgcttcagctggggctaaatagggtatagttagcggcgacacatacgaaaaggactgtagtgtgtgtagcttgtgtatggaagggaatgcatgtatttggagaaggctggtgcagctggaaaacagatacaagcatagacatatactgtatatatttttacagttgaatttagtttccttgtatatgctctctttttctttctttctttttgtcactgtacaatattgtaactagaattgaatgaataaaagtttatttgggttgccggataactggaaggatccgcatga

SEQ ID NO: 3697 - protein, 335 aa, Sorghum bicolor
MAASPACAPVLVSGPTLPPQPVPFRCYRAQKPSSASSTSWRPRRRRFVPVAAASTRTSPAAARGLDADDFRHPLDKQNTLLLRAIPGLNDIGKALLGPVSEQVMVLQNIGTSVLVSPNQLPDLHQLLAEAATLLNTEAPDLYIRQNPVPNAYTLAINGKKPFIVVHTSLVELLTPKELQAGLAHELGHLKCDHGVWLTFANILTMGAYTVPGFGMVAGFLEEQLYRWLRAAELTCDRAALLVVQDPKVVISVLMKLAGGCPSLADQLNVDAFLEQARSYDKAASNPVGWYIRNAQTRELSHPLPVMRAREIDEWSRSQEYKTTMQKMLQLGLNRV

SEQ ID NO: 3698 - DNA, 1434 bp, Glycine max
  CDS (32)..(1021)
ctaaacccgcgtctcttcactcttcaattcaatggcttccacgcccttctccactttctgccacttccacaaacccaccctccttttcttagcttccgacgggttcaggctcggtggcgctccggcgatcgccttcggaaaggttcggaagaaccgcaaaatgggaatattccccgtttgcagagctggttctgccgtcgtcttccgcgacctcgacgccgacgactttcgccaccctcttgatcaacagaatacgctgctactgagagcaattccgggattgaacgaactgggaaaagctcttctaggaactgtatctgagcaggttatgctccttgaaaacattgggacatccgtccttgtttctaaaaatcagcttcctgatctttaccacctaatggtcgaagctgccgaaatattaaatgtagatgcccctgatctatatgttcgtcaaagtcctgtgccaaatgcatatacattagctataagtggtaaacgacctttcgttgtcattcatactagccttgtggagctcctgacaaaagcagagttgcaggctgttttggctcatgagctgggtcacctaaaatgtgatcatggtgtgtggcttacatatgcaaatattctaacccttggagcctattctgtacctggtattggcggtatgatagctcagactttggaagagcagctgttccgctggcttcgagcagctgagttgacttgtgatcgtgcagctcttcttgttgctcaagaccctaaggttgtcatctctgtcctcatgaaattagctgggggatgtccatctatggctgatcaactaaatgtggatgcattcctggagcaagctcgctcttatgaaaaagctgcttccagcccaattgggtggtatataaggaatgcacaaacaaggcaactgtcacatcctctgcctgttctacgtgctagcgaaattgatgaatggtcaagaactccagcttataaatctcttttgaaacgaggaattcagatcaaatcttagaacgaaatgtctagcagtgcatgcatggaatttgttgaaagtgcacagcagctcaaggttcttcaagttagtgcgtggtggcagatgttcaaatggtttcaggcggaagtagcatttattatgcatctatctacggctgctgcaaacgtgtatgtattcactgtgttatattagtcaacctgtaagtagaattttggtgagttggattattatttcatagaaatattggttctggaaagaaaagaattacctgtacaattctagcttagaaaatttctcggagtagaaaacactattatgtaagttttatgaccgaaaatttttatttgttgtattttacactataagctaagctctttttgaatagtactaaaacattgactgttacaaaaaaaaaaaaaaaaaaaaaaaaa

SEQ ID NO: 3699 - protein, 329 aa, Glycine max
MASTPFSTFCHFHKPTLLFLASDGFRLGGAPAIAFGKVRKNRKMGIFPVCRAGSAVVFRDLDADDFRHPLDQQNTLLLRAIPGLNELGKALLGTVSEQVMLLENIGTSVLVSKNQLPDLYHLMVEAAEILNVDAPDLYVRQSPVPNAYTLAISGKRPFVVIHTSLVELLTKAELQAVLAHELGHLKCDHGVWLTYANILTLGAYSVPGIGGMIAQTLEEQLFRWLRAAELTCDRAALLVAQDPKVVISVLMKLAGGCPSMADQLNVDAFLEQARSYEKAASSPIGWYIRNAQTRQLSHPLPVLRASEIDEWSRTPAYKSLLKRGIQIKS

SEQ ID NO: 3700 - DNA, 1047 bp, Mycobacterium tuberculosis CDC1551
  CDS (1)..(1047): transl_table=11
atgtctcagacacccgctacaacccgcaaaacgtttcccgagatcagctcaagagcgtgggagcaccccgccgaccggaccgccctttccgcgctgcgccggctcaaaggcttcgaccagatcttgaagctgatgtcggggatgttgcgggaacggcagcaccggctgctgtacctggccagcgcggcacgggtcgggccgcggcagttcgccgacctcgacgcgctgctggacgaatgcgtggatgtgctggacgcgtcggcgaaacccgaactctacgtgatgcagtcaccaatcgcggatgccttcaccatcggcatgggcaagccattcaccgtgatcacctcggggctgtacgacctggtgacacacgacgagatgcggttcgtgatgggccacgagctcggccacgcactgtccggccacgcggtgtaccgcacgatgatgatgcatctgctgcggttggcccggtcattcggcgtcttgccggttggcggctgggcgctgcgcgcaatcgtggctgcgctgctggaatggcagcgcaaatcggagctgtccggcgatcgcgctgggttgctgtgcgcgcaggatttggacaccgcgctcagggtggagatgaagctcgctggcggctgccggctggacaagctggactcggaggccttcttggctcaggcccgggaatacgagacatccggcgatatgcgcgacggggtgctcaagctgctcaacctggagctgcagacccatccgttctcggtgctgcgggctgccgccttgactcactgggtggacaccggcggctatgccaaggtgatagccggcgagtacccgcgtcgggccgacgacggcaacgccaaatttgcagacgaccttggcgcggccgcccggtactaccgggacggcttcgaccagtccaacgacccgctgatcaaaggtatccgcgacggattcggtggcatcgtcgagggcgtgggacgggcagcctcgaacgcggccgattcattgggccgcaagatcaccgagtggcggcagccctcgaagtga

SEQ ID NO: 3701 - protein, 348 aa, Mycobacterium tuberculosis CDC1551
MSQTPATTRKTFPEISSRAWEHPADRTALSALRRLKGFDQILKLMSGMLRERQHRLLYLASAARVGPRQFADLDALLDECVDVLDASAKPELYVMQSPIADAFTIGMGKPFTVITSGLYDLVTHDEMRFVMGHELGHALSGHAVYRTMMMHLLRLARSFGVLPVGGWALRAIVAALLEWQRKSELSGDRAGLLCAQDLDTALRVEMKLAGGCRLDKLDSEAFLAQAREYETSGDMRDGVLKLLNLELQTHPFSVLRAAALTHWVDTGGYAKVIAGEYPRRADDGNAKFADDLGAAARYYRDGFDQSNDPLIKGIRDGFGGIVEGVGRAASNAADSLGRKITEWRQPSK

SEQ ID NO: 3702 - DNA, 876 bp, Nostoc sp. PCC 7120
  CDS (1)..(876): transl_table=11
atgtccttgtttaaatctccgctcatcggtttaaaagctgactcgtttcgtcatccactagacctggaagctactacatctctcaagcaaataccaggcttagatatgttggtacgaaatttactagggccaatggcggaacaagttttttatgtggaaaatattgcttcgagtgttttagtaggggaaaaacaactgcctgatttacacaagctgttgttagaagcctgcaaaattttggatattgagcctccccagttgtatgtcagacagcatccggctcctaacgcctacacctttgctatgcggggtaagcaaccttttgtggtgctgcacacttccttaattgatattctgaccccagaggaaattcaggcggttattgcccatgaattaggacatctcaagtgtgaccacagtgtttatctgacacctgtaaatttattagtattagccgcctcagcagtccccaatattggggcttttatggctcaagctatccaggcacaacttttagaatgggtacgctgtgctgagtttacctgcgatcgcgccgcattactagctacccaagacccaaaagtagtgatgtcagttttaatgaagctcgctggaggttcccccaccctagcaccgcagcttaatctggatgcttttattgaccaggctcgtgcttacgacgatattagtaaaaacgaaatgggggaaatggttaaagctgcccgtactgctcaattaacccaccctgtaccagtccttagagccagagaaattgacagttgggcaagtagccaagaataccagtctttattgcaaaatcatggtcagaaatacaccagtgaagtagcaccaaaaggtggatggcgcaattggtaa

SEQ ID NO: 3703 - protein, 291 aa, Nostoc sp. PCC 7120
MSLFKSPLIGLKADSFRHPLDLEATTSLKQIPGLDMLVRNLLGPMAEQVFYVENIASSVLVGEKQLPDLHKLLLEACKILDIEPPQLYVRQHPAPNAYTFAMRGKQPFVVLHTSLIDILTPEEIQAVIAHELGHLKCDHSVYLTPVNLLVLAASAVPNIGAFMAQAIQAQLLEWVRCAEFTCDRAALLATQDPKVVMSVLMKLAGGSPTLAPQLNLDAFIDQARAYDDISKNEMGEMVKAARTAQLTHPVPVLRAREIDSWASSQEYQSLLQNHGQKYTSEVAPKGGWRNW

SEQ ID NO: 3704 - DNA, 963 bp, Nostoc sp. PCC 7120
  CDS (1)..(963): transl_table=11
atgccaacttacacaggaatttccagcgaagccttcagacatccactggatcgccaagccgagcaagctttgcgaaatctaccaggatttgatttgattgctcgtaaatttgtggaatttgtctacgaacgccctcagctagtctatctaatgggcaacaccatccaagtagggcctcggcaatattccactatttaccagatgtttcgggagtgtgtgcgggatttggatatttatccagaacctacactgtttgtttcacaaaatcctcaggcaaatagctacgcattaggtcaagagaatccttacatagtcataaatacagggatactagacttgctcaacgaagccgaaattcgggcggtgttagcccatgaactgggacatattaaatgtggccatactattctaattcaaatggcgatgtgggcgatgagtgcggcttcagccttaggagaattaacctttggcattggtaattttgtctctcaagccttgatttatgcgttttttgagtggcggcgcaaggctgagttaacggcagatagagcagcgctgttggtggttgatgacctaaatactgttttatcgtcaatgatgaagatttctggcggtagcagcaaatatgccaatgaatgcagtttgcaggagtttattaagcagtccgaaaattatcaggcattagacgaagatgggctaaatcaagtgtataaattcttaatgtacaacggcgctcaaggcatgatgttaagccatccgttcgctgtagaaagagtccaatacctacaacaatgggcagtatcctcagaatatcaacaaattcgccaaggtaattaccagcgatcgcctgcctctggttctgtagacgtgaaagcctctaccgccgaagctgaagccgaaagattacgccgccaaattgaagaattacaacaagaaattaacaaaatgaaacggtctgactaa

SEQ ID NO: 3705 - protein, 320 aa, Nostoc sp. PCC 7120
MPTYTGISSEAFRHPLDRQAEQALRNLPGFDLIARKFVEFVYERPQLVYLMGNTIQVGPRQYSTIYQMFRECVRDLDIYPEPTLFVSQNPQANSYALGQENPYIVINTGILDLLNEAEIRAVLAHELGHIKCGHTILIQMAMWAMSAASALGELTFGIGNFVSQALIYAFFEWRRKAELTADRAALLVVDDLNTVLSSMMKISGGSSKYANECSLQEFIKQSENYQALDEDGLNQVYKFLMYNGAQGMMLSHPFAVERVQYLQQWAVSSEYQQIRQGNYQRSPASGSVDVKASTAEAEAERLRRQIEELQQEINKMKRSD

SEQ ID NO: 3706 - DNA, 1035 bp, Arabidopsis thaliana
  CDS (1)..(1035)
atggcggtttcagtctcagctccggttttgtccctctgttacaatcagagcggcgaattgtctcgtagtttgggatatagactaccgaagaaagtgggatttagctctggtcgtcgttcagtgagttatatcggtttcggtgcggagaaagttggaagatttagggttagggttccgatttgcagagctgtacctcctctcttgttcaaagatctcgatgctgatgatttccgacatccttttgataagcagaacacgttgttactaagggctataccggggttgaacgaattcggcaaagctcttttagggtcaatgacggagcagattatgcttcttgagaacattgggacttctgttcttgtttccaagaatcagctctctgatcttcacggtttgttggttgaggctgctgagattttgaatatagaggctcctgatctatatgtgcgacagagtcctgttcctaatgcgtatacgctggcaataagcggtaagaagccgtttattgttgtccacaccagcttgatcgagcttcttactagcgcggagctacaggctgtcttagcccatgaactaggccatctgaagtgtgatcacggcgtgtggctcacatttgcaaatattcttactcttggggcttatacagttcctgcttttgggcaaatgatagctcgaaccttggaagaacagttacttcgttggctacgttcagcagagctgacttgtgatcgcgcagcactactcgtcgcccaagatccaaaggttgttgtatctgttctgatgaaattagccggaggatgtccatcaatcgctgatcagctaaatgttgacgcatttctagaacaagcccgttcatatgacaaagcttcttcaagccccttgggatggtacataagaaatgctcagactagtcaactttcgcatccattgccggttcttcgtgcacgtgagattgatgagtggtccaggagtctcgagtacaaaagtctcctgaaacgggcaaatcgaaaaagcacagtacagaaggtttag

SEQ ID NO: 3707 - protein, 344 aa, Arabidopsis thaliana
MAVSVSAPVLSLCYNQSGELSRSLGYRLPKKVGFSSGRRSVSYIGFGAEKVGRFRVRVPICRAVPPLLFKDLDADDFRHPFDKQNTLLLRAIPGLNEFGKALLGSMTEQIMLLENIGTSVLVSKNQLSDLHGLLVEAAEILNIEAPDLYVRQSPVPNAYTLAISGKKPFIVVHTSLIELLTSAELQAVLAHELGHLKCDHGVWLTFANILTLGAYTVPAFGQMIARTLEEQLLRWLRSAELTCDRAALLVAQDPKVVVSVLMKLAGGCPSIADQLNVDAFLEQARSYDKASSSPLGWYIRNAQTSQLSHPLPVLRAREIDEWSRSLEYKSLLKRANRKSTVQKV

SEQ ID NO: 3708 - DNA, 831 bp, Thermosynechococcus elongatus BP-1
  CDS (1)..(831): transl_table=11
atgcctgtttcagcatcttccagcctcagggctgatcagtttcgtcatccccgcgatcgcgaggccacccaagcgctccaacaactgccggggttaaatcttcttgtgcgatcgctcctaggctcagtggcagagcaggccttttacctggaaaacattggcagtagtctgcgccttagtgaacagcaacttccagatatttaccatctccacactgaggcttgccgtattttaggcctagagcccccccaactctatctcaagcaacatcccgtccccaatgcctatacctttgccatgcggggtaagcagccctttgtggtactacactcggccctagttgagctactgaccccccaagagttgcaggcagtcctggcgcacgagttgggacatctaaagtgtgagcatggcgtgtatctgacgatcgccaacctgctgctttttgccgctagccaactttccccttggggcttgctcttggcccaggggctgcaaacgcaattgctccactggctgcgctgtgctgaactcacctgcgatcgcgcggcattgttggtaacccaagacccacggattgtggcctcggtactcatgaaactctgtggtggctctccgcagtggagcgatcgcctcaatctcgacgcctttattgcccaagcccgggaatatgaggctgccgatcggggttggtactatcttttcaaggaattgcaggccagtcaactcacccaccccctaccggttctgcgggcccgggagattcttgattgggcggaaactcagcagtacgatcgcctcctgaagcagttacaccccactcgtcaataa

SEQ ID NO: 3709 - protein, 276 aa, Thermosynechococcus elongatus BP-1
MPVSASSSLRADQFRHPRDREATQALQQLPGLNLLVRSLLGSVAEQAFYLENIGSSLRLSEQQLPDIYHLHTEACRILGLEPPQLYLKQHPVPNAYTFAMRGKQPFVVLHSALVELLTPQELQAVLAHELGHLKCEHGVYLTIANLLLFAASQLSPWGLLLAQGLQTQLLHWLRCAELTCDRAALLVTQDPRIVASVLMKLCGGSPQWSDRLNLDAFIAQAREYEAADRGWYYLFKELQASQLTHPLPVLRAREILDWAETQQYDRLLKQLHPTRQ

SEQ ID NO: 3710 - DNA, 1131 bp, Streptomyces avermitilis MA-4680
  CDS (1)..(1131): transl_table=11
atgtccgacgacagccatgagcacaacgggcacgagaacgtgccgagcaggcagcgcaggcgctttgcggggatctcctcgcgcgcgtacgaacatccggccgaccgatcggcgcttgtcgccctgcgtaagctcagcggcttcgacacggtcttcaaggcactcagcggtctgctgcccgagcgcagccttcggctgctgttcctgtccgactccgtacgggtctcggacgcacagttcgcgcacctcaacgacatgctgcgggacgcctgttacatcctggacctggagaaggtcccgccgatgtacgtcaaccaggacccacagccgaacgcgatgtgcatcggcctggacgagccgatcatcgtcgtcacgaccgggctcgtcgagctgctggacgaggaggagatgcgggcggtcatcggccacgaggtgggccacgcgctgtccggccactcggtgtaccgcacgatcctgctcttcctgacgagcctggcgctgcgggtggcgtggatcccgctgggcagcctcgcgatcatggccatcgtgacggccctgcgcgagtggttccgcaagtcggagctgtccgcggaccgcgcgggtctgctggtcggccaggatctgcgggcctcgatgcgcggtctgatgaagatcgcgggcggcaaccacctgcacgagatgaacgtggacgcgttcctcgcgcaggccgaggagtacgaggccggaggtgacctgcgcgactccgtgctgaagatcctcaacgtcctcccccgttcgcaccccttcaccacggtccgggccgccgagctgaagaagtggggcgaatcccgcgactaccagcggatcatggacggtcactacccgcgccggaccgaggacaaggacgcctcggtcagcgactccttccggcagtcggcggccagctacgccagcgacgtgaagaactccaaggacccgctgatgaagctggtcagcgacatcgcgggcggcgcgggcgacctcggcggacgggtacggcgcggcttcggcggcttcgccggcagctcccccggggacgcgggtggctccgcccaggacgccccgccccacgacgcccacccggacgacgagagccccaacggcaacggctga

SEQ ID NO: 3711 - protein, 376 aa, Streptomyces avermitilis MA-4680
MSDDSHEHNGHENVPSRQRRRFAGISSRAYEHPADRSALVALRKLSGFDTVFKALSGLLPERSLRLLFLSDSVRVSDAQFAHLNDMLRDACYILDLEKVPPMYVNQDPQPNAMCIGLDEPIIVVTTGLVELLDEEEMRAVIGHEVGHALSGHSVYRTILLFLTSLALRVAWIPLGSLAIMAIVTALREWFRKSELSADRAGLLVGQDLRASMRGLMKIAGGNHLHEMNVDAFLAQAEEYEAGGDLRDSVLKILNVLPRSHPFTTVRAAELKKWGESRDYQRIMDGHYPRRTEDKDASVSDSFRQSAASYASDVKNSKDPLMKLVSDIAGGAGDLGGRVRRGFGGFAGSSPGDAGGSAQDAPPHDAHPDDESPNGNG

SEQ ID NO: 3712 - DNA, 1026 bp, Gloeobacter violaceus PCC 7421
  CDS (1)..(1026): transl_table=11
atgaccaccagcagcagcactgcgcctacgccctaccggctgaccggcatcagccccaaagcctacgagcacccggccgaccgcgccgccaccgccgccctcaagcaaatcccgtttatcgacgtgctcatcaagaagctcttcgaattcggcctggagcgctccttcaagcagcagttgctgggtaacggcatccggttggggccgaaccagctgccgaaaatccatcaagcgtacctctcctgcctcgacacgctcgatatgccctcggtctacgagctgtatctattgcagacgccccaggtcaacgccatggccttcggggccgaccggccaatcatcatcctcaactcgggcctcgcttcgatcctcgaagaggacgaactgaagtcggtgcttgcccacgaggtggggcatattctctcggagcacgtcctctaccgcacggtgctcgctctgctgctcaacgtcagcctcagtaccctgcccttaccacccctgggtaatctgcccattcaagcgatcatcctggtgttgcaggagtggtcgcgcgcttcggaattgagctgcgaccgggctgccgcgctggtggtgcgcgacccgcgcattcactgccgcaccttgatgaagctcgcgggcggcaacgtcgaggggctcaacgtcgatgcttttatccagcaggcgagccagtacgagacctgggacgactacgtcgatcggggattgcgcttttttggcgaactgggcaccacccacccctacgccgtgcgccgcgtctccgagttgacccgctggatccaatcgggtgaattcgaccggatcatcggcggcaattatgtgcgccgcggccaggagccgcccccgaccgccgaattcgagcgggccgtcgatttctacgcagcccaattccgccacctgatcggcgagacggggttgggggtgcagcagttgtcgcgtcagatcaccgattggctgcgcgagctgcagcgcaccacggcgggcggggcgcgcgaggcgcagcgctag

SEQ ID NO: 3713 - protein, 341 aa, Gloeobacter violaceus PCC 7421
MTTSSSTAPTPYRLTGISPKAYEHPADRAATAALKQIPFIDVLIKKLFEFGLERSFKQQLLGNGIRLGPNQLPKIHQAYLSCLDTLDMPSVYELYLLQTPQVNAMAFGADRPIIILNSGLASILEEDELKSVLAHEVGHILSEHVLYRTVLALLLNVSLSTLPLPPLGNLPIQAIILVLQEWSRASELSCDRAAALVVRDPRIHCRTLMKLAGGNVEGLNVDAFIQQASQYETWDDYVDRGLRFFGELGTTHPYAVRRVSELTRWIQSGEFDRIIGGNYVRRGQEPPPTAEFERAVDFYAAQFRHLIGETGLGVQQLSRQITDWLRELQRTTAGGAREAQR

SEQ ID NO: 3714 - DNA, 867 bp, Gloeobacter violaceus PCC 7421
  CDS (1)..(867): transl_table=11
atgtccagaaagcatttcagcggtctccatcccgacagcttccgccatcccctcgacacccaggcgacccggtcgctcgccgcgttgccgggtctcgactggctcatccgctacggcctggccccggcggcgggacggttgttctatctggagaacatctcctcgagcatccgggtgggcgaaaaacagcttccccacctgcacgcgctgctgcgcgaagcctgcgcggtgctcgacatcgccgagccgcaactttacgtcaagcagcatccggtcccgaacgcctacacttttgctgtgcccgacgagcgcgccttcgtggtcgtgcacacttcgctgttggaactgctcaccgacgccgaaattcaggcggtgatcgcccacgaactgggccatctcaagtgcgaccacggcgtgtacctgactttggccaatttgttcgtgctcgccaccgcccagatcccccagtacggtcccctgcttgcccagcctctgcgtcaggcgatgctgggctggttgaggtcggcggaattcagctgcgatcgggccgccctgctggtcacccaggatgtgaaagtgctggtgtcgctgatgatgaagctgtgcggcggttcgccctcgctggtgcacaaactggatgccgaagccttcctggaacaggcccgcgcctacgaggcggtggacgaggacgaattgagcctggcgctcaaaatcgccgccaacgccgaaaaatcccacccggtaccggtgctgcgggctaaggagatcgaccgctggacgcgctcggagaactaccgccgcctgatgggaggcgagcactatcgcccgctggagcgcgagagcgcccgccccgtcgctgctggctga

SEQ ID NO: 3715 - protein, 288 aa, Gloeobacter violaceus PCC 7421
MSRKHFSGLHPDSFRHPLDTQATRSLAALPGLDWLIRYGLAPAAGRLFYLENISSSIRVGEKQLPHLHALLREACAVLDIAEPQLYVKQHPVPNAYTFAVPDERAFVVVHTSLLELLTDAEIQAVIAHELGHLKCDHGVYLTLANLFVLATAQIPQYGPLLAQPLRQAMLGWLRSAEFSCDRAALLVTQDVKVLVSLMMKLCGGSPSLVHKLDAEAFLEQARAYEAVDEDELSLALKIAANAEKSHPVPVLRAKEIDRWTRSENYRRLMGGEHYRPLERESARPVAAG

SEQ ID NO: 3716 - DNA, 867 bp, Synechococcus sp. PCC 7002
  CDS (1)..(867): transl_table=11
gtgaagcattattttaccggcctaaccgcagatcagtttcgccatcccctagatcaagaagccactgccgctctccgccgcctccctggtttggatctgttggtacgctcttttttggggtcaacggcagagcaggtttttcagttcaataatctcgcgtcgagcattttggtgggcgatcgccaattgccccacctccatcacctcctccaggaagccgcccaagtactggatctgacgccgccggatctctacatccaacaaaatcctgtgcccaatgcctatacctttgccatgcggggccaaaaaccctttatggtgatccacacggccctggtagaaatcctcacagaagcagaactccaggcggttatggcccacgaactggggcacctcaagtgcgaacatggcgtctatctgaccctagcgaatctgctaatgctagccaccaatgccctcccggtatggggaagcctactgtcccggtctctgcaaaatcagatgttggcctggttacgctgtgcggaactgagttgcgatcgcgctgcttttttggtgagtcaggatccgaaaattatgatgtcggtgctgatgaaattagcagggggatcgccgagtttagccccgttgttgaacctggatgcgttcatggaacaggccaaaacctacgaacatttgagtcaaaatcagttgggtcaactgttgcaggaaactcaaaccacccaactcacccatcccctgccggtggtgcgcgcccaggaaatctggcggtgggcgagttcccaggaatattccctcttgcttcaaaacagagattcagtttataatcacgaaggttcatccaagggcggatggcgaaattggtag

SEQ ID NO: 3717 - protein, 288 aa, Synechococcus sp. PCC 7002
MKHYFTGLTADQFRHPLDQEATAALRRLPGLDLLVRSFLGSTAEQVFQFNNLASSILVGDRQLPHLHHLLQEAAQVLDLTPPDLYIQQNPVPNAYTFAMRGQKPFMVIHTALVEILTEAELQAVMAHELGHLKCEHGVYLTLANLLMLATNALPVWGSLLSRSLQNQMLAWLRCAELSCDRAAFLVSQDPKIMMSVLMKLAGGSPSLAPLLNLDAFMEQAKTYEHLSQNQLGQLLQETQTTQLTHPLPVVRAQEIWRWASSQEYSLLLQNRDSVYNHEGSSKGGWRNW

SEQ ID NO: 3718 - DNA, 957 bp, Synechococcus sp. PCC 7002
  CDS (1)..(957): transl_table=11
atgccgacctatcccggaatttctagcgaagcctttcgtcatcccctcgatcgccaagcagaagaagccctccgtaacctgcccggttttaagctgttggctagtcgttttgtggaatatatctacgaacgaccccagcaggtttttttaatgggcaacaatatcaaagcaggcccccgtcagtattcaaccctgtacggcatttttcgggaatgtgtccatgatttggatatttccccagagccgaccctttatgtcaaccaaaatccgatggtcaatagctatgccctcggccatgatcatccttacattgtggtgaatacggggttaatggatttactcgatgaaacagagttacggacggtgatggcccatgagttgggacacattaaatgcgaccatacgattttgatccaaatggcaatgtgggccatgggggcagcttctttcctgggggaaattacccttggcctcggtaatgtcatcaccacagggttactttacgctttttatgaatggcggcggaaggcagaactttcggcggatcgggccgctctcctggtgatggatgatctcaaccccattttgcataccatgatgaagctcgccggcggcagtgcgaaatacggccacgaaatgagtttgactgagtttacccaacagtctcaggattacgatgagcttgatcaggatcaattgaaccaaatttataagtttttaatctacaacggcggtaatgggacatttctaagtcatcctttcccggtggagcgattgagctttatcaaaacctgggaagcctctgaagaatatcaacggattaaacagggtcattatgcccaagccggtactggttcagtagacgtgaatgccgaagatgaaagtgatctagatagtttgcgtcgtcaaattgaagaacttaaagcagaaatcaaaaaggccaaaggaaccgaataa

SEQ ID NO: 3719 - protein, 318 aa, Synechococcus sp. PCC 7002
MPTYPGISSEAFRHPLDRQAEEALRNLPGFKLLASRFVEYIYERPQQVFLMGNNIKAGPRQYSTLYGIFRECVHDLDISPEPTLYVNQNPMVNSYALGHDHPYIVVNTGLMDLLDETELRTVMAHELGHIKCDHTILIQMAMWAMGAASFLGEITLGLGNVITTGLLYAFYEWRRKAELSADRAALLVMDDLNPILHTMMKLAGGSAKYGHEMSLTEFTQQSQDYDELDQDQLNQIYKFLIYNGGNGTFLSHPFPVERLSFIKTWEASEEYQRIKQGHYAQAGTGSVDVNAEDESDLDSLRRQIEELKAEIKKAKGTE

SEQ ID NO: 3720 - DNA, 966 bp, Cyanothece sp. ATCC 51142
  CDS (1)..(966): transl_table=11
atgtctagttatcctggactttcaagcgaagcgtttcgtcatcccttagataaacaagcagaacaaactttaagaagtgttcctgggtttgatattgttgctagtagcttcatggagtatctttatgaaagacctcagcaaatttctttaatgggaaatagtattaaagtcggtccccgtcaatatggaactttatatggtattttcagagaaacagtttatgatttagatattaatcctgaacccttaatttatgttagtcaaaacccgattgctaatgcttattctttgggtaaacaacagccttatattgttttaaatgctggtttattagacttatctgatgaaatcgaattgagaaccgtcattgcccatgaattaggtcatataaaatgtgatcatagtttattaattcaaatggcaatttgggcgatgggtgcagcttctttatttggagaattaactttaggcttaggtaatattattagtagtggtttgatttttgctttttatgaatggcgaagaaaggcagaattatcggctgatagggctgctttattagtcattgatgatcctgaacccatttttaggatgatgatgaaaatggctggaggaagtcataaatatgcccatgaatgtcatttagatgagttcttaaaacaggcagataagtatcgggaattagatgaagatgatctcaatcaactttataaatttctgatttataatggaggtaatggagtatttttaagtcatccttttccagttgatcgagtccattatttacaaaattgggcgaattctaatgactatcaaaatattcgtcaaggaaattataaaacatctcaaaaaagtgaggctgtaacagttgatcagactgaggaagcagaaaacttaaggaaacaaattgaagaattacaaaaagagattcaacgaattaaaaatcaaaacaaaaatcaagattaa

SEQ ID NO: 3721 - protein, 321 aa, Cyanothece sp. ATCC 51142
MSSYPGLSSEAFRHPLDKQAEQTLRSVPGFDIVASSFMEYLYERPQQISLMGNSIKVGPRQYGTLYGIFRETVYDLDINPEPLIYVSQNPIANAYSLGKQQPYIVLNAGLLDLSDEIELRTVIAHELGHIKCDHSLLIQMAIWAMGAASLFGELTLGLGNIISSGLIFAFYEWRRKAELSADRAALLVIDDPEPIFRMMMKMAGGSHKYAHECHLDEFLKQADKYRELDEDDLNQLYKFLIYNGGNGVFLSHPFPVDRVHYLQNWANSNDYQNIRQGNYKTSQKSEAVTVDQTEEAENLRKQIEELQKEIQRIKNQNKNQD

SEQ ID NO: 3722 - DNA, 1047 bp, Mycobacterium marinum M
  CDS (1)..(1047): transl_table=11
atgtctcagacaccggccaccacccgcaccgcttttggcggtatcagctccagggcatgggagcatccggccgaccgcaccgcactatcggcactgcgccgtctcaaaggcttcgaccagatcctgaaactgctctccggaatgctgcgggagcgccaacaccggctgctgtatctggccagcgcggcacgagtcggcccacgccagttcgcagacctcgacgcgctgctcgacgaatgcgtggatgtcctggacgcgccgaccaaacccgaggtctacgtcacgcagtcgccgatggtgaatgcgtacaccatcgggatggacgccccgttcatcgtgatcacctccgggctctacgacctgatgacccatgacgagctgcgctttgtcgtgggtcacgagctcggtcacgcgctatcgggtcacgccacctaccgcacgatgctgatgcacctgatgcggctggcgggttccctgggctttctcccgatcggcggctgggcgctacgcgcgatcgtggcggccctactggaatggcaacgcaagtccgagctgtccggggaccgggcgggactgctctgctgccaggacttggacaccgcgattcgggtggagatgaagctggccggcggaagccggttggacaagctggactccgaagcgttcttggcccaggccgcggagtacgagcgatctggggacatgcgcgacgggctgctcaagctgctcaacctcgaacttcagacccacccgttctcggtgctgcgagtagccgaattgaccaagtgggtggacgccggcggctacggaaaggtgatgtcgggcagttatccgctgcgcctcgacgatggccaatcctcgatcgccgatgacctcggcgaggccgcccgccactacaaggacggattcgaccagtccgacgacccgctgatcaaaggtattcgcgacggtctgggcggcatcgtggacggcgtgggccgggccgccaccagcgcggccgattcgttgggccgcaagatcaacgagtggcggcacaacccgaaatag

SEQ ID NO: 3723 - protein, 348 aa, Mycobacterium marinum M
MSQTPATTRTAFGGISSRAWEHPADRTALSALRRLKGFDQILKLLSGMLRERQHRLLYLASAARVGPRQFADLDALLDECVDVLDAPTKPEVYVTQSPMVNAYTIGMDAPFIVITSGLYDLMTHDELRFVVGHELGHALSGHATYRTMLMHLMRLAGSLGFLPIGGWALRAIVAALLEWQRKSELSGDRAGLLCCQDLDTAIRVEMKLAGGSRLDKLDSEAFLAQAAEYERSGDMRDGLLKLLNLELQTHPFSVLRVAELTKWVDAGGYGKVMSGSYPLRLDDGQSSIADDLGEAARHYKDGFDQSDDPLIKGIRDGLGGIVDGVGRAATSAADSLGRKINEWRHNPK

SEQ ID NO: 3724 - DNA, 963 bp, Nostoc punctiforme PCC 73102
  CDS (1)..(963): transl_table=11
atgccaacttacacaggaatttccagcgaagccttcaggcatccactagatcgccaagccgagcaagctttacgaaatttaccgggatttgatttaatcgctcgtaaatttgtggaatttatctacgaacgccctcaattagtctatctaatgggtaacaccatccaagtcgggccgcgtcagtattccactatttaccagatgtttcgggaatgcgtccgagatttggacatttacccagaacccgcgctgtttgtctcgcaagatccccaagctaatagctatgcgctggggcaagagaatccttacatagtcataaatacagggatactggacttactagacgaagctgagattcgggcggtgctagcccatgaactggggcatattaaatgtggtcatactattttaattcaaatggcgatgtgggcgatgagtgctgcttctgccttgggcgaattgacctttgacctcggtaatcttgtaacacaaggcttgatttacgccttttttgagtggcggcgcaaagccgagttatcgtcagatcgcgccgcattactggtgatggatgacttgaatccggtaatgtcaaccatgatgaaactctctggcggtagtcacaaatatgccaatgaatgtagtttacaagagtttatcaagcagtcagaaaattatcaggcactggatgaagatggactgaatcagatatataaatttttgatatacaatggcgctcagggtacgatgttgagtcatcctttcccagtggaacggctgcattacttacgggcgtgggcagtatccgaagaatatcagcaaattcgccgaggaaattatcagcgatcgcctgcttctggctcggtaaatgttaaagcagaatctgccgcaaatgaaacagaaactttgcgccgtcaaattgaagaattacaacgcgaaatcgacagaatgaaaaggtctgagtag

SEQ ID NO: 3725 - protein, 320 aa, Nostoc punctiforme PCC 73102
MPTYTGISSEAFRHPLDRQAEQALRNLPGFDLIARKFVEFIYERPQLVYLMGNTIQVGPRQYSTIYQMFRECVRDLDIYPEPALFVSQDPQANSYALGQENPYIVINTGILDLLDEAEIRAVLAHELGHIKCGHTILIQMAMWAMSAASALGELTFDLGNLVTQGLIYAFFEWRRKAELSSDRAALLVMDDLNPVMSTMMKLSGGSHKYANECSLQEFIKQSENYQALDEDGLNQIYKFLIYNGAQGTMLSHPFPVERLHYLRAWAVSEEYQQIRRGNYQRSPASGSVNVKAESAANETETLRRQIEELQREIDRMKRSE

SEQ ID NO: 3726 - DNA, 879 bp, Nostoc punctiforme PCC 73102
  CDS (1)..(879): transl_table=11
atgtccttcttcaaaacccctctgattggtttaaaagctgactcatttcgtcatccattagacctggaagctactaaaacgctcaagcaaataccaggcatagacatgttggtgcgaaattggctcgggccaatggcagagcaggttttctatgtagaaaatattgcttccagcattctggttggtgaaaaacaactacccgatttatacaagctgttgttagacgcttgtgaaattctggatatagagcctccccagttatacgtccggcaacatccggctcccaacgcctatacttttgctgtgcgcggtaagcagccctttgtggtgctacacacatccctaattgatattctcactccagaggaaatccaggcagtaattgcccatgagttgggacatctcaagtgtgaccatagcgtttacttgacccctgtaaatttactaatattagctgcggcaattgtgcccaatgtcggaactttcgttgctcaagcgatacaggcacaacttttagaatgggtacgctgtgctgagtttacctgcgatcgcgccgcattactagcaacccaagatccgaaagttgtcatgtcagtgttgatgaagctggctggtggttcccccaccttagcgccacaactgaatcttgatgcctttgttgcccaagcccgcgcttatgatgacattagcaagaccgaattaggcgaaatggtcaaaaccgcccgcacagcccaattaacccatccagtgccagtgttgcgggcgcgagaaattgaccgttgggcaagcagtacagaataccaatctttaattcaaagtcatggattgaaatctacaagcaaagaagttgcacccaaaggcggctggcgaaactggtag

SEQ ID NO: 3727 - protein, 292 aa, Nostoc punctiforme PCC 73102
MSFFKTPLIGLKADSFRHPLDLEATKTLKQIPGIDMLVRNWLGPMAEQVFYVENIASSILVGEKQLPDLYKLLLDACEILDIEPPQLYVRQHPAPNAYTFAVRGKQPFVVLHTSLIDILTPEEIQAVIAHELGHLKCDHSVYLTPVNLLILAAAIVPNVGTFVAQAIQAQLLEWVRCAEFTCDRAALLATQDPKVVMSVLMKLAGGSPTLAPQLNLDAFVAQARAYDDISKTELGEMVKTARTAQLTHPVPVLRAREIDRWASSTEYQSLIQSHGLKSTSKEVAPKGGWRNW

SEQ ID NO: 3728 - DNA, 1041 bp, Thermobifida fusca YX
  CDS (1)..(1041): transl_table=11
atggctactactccagaccgtgctcgcgtccggctccgcaacatctcttcgcgcgcctacgagcatcccgcggaccgcggcgccctcgtcgccttgcggtcgctgcgcggcttcgacgaagtcttcaagcggctctccggcctcttcaacgagcgggcgctgcggctgatgttcctggccagcgcggtacgggtcgacgagcgccagttccccgacatccacgactatgtgcgcgacgccgcctacgtgctggacctcgaccgggttccagagctgtacatccagatgaacccgcagcccaacgccatggcgatcggcagcagccgtcctttcatcgtcgtgaccacgggcctggtcgacctgctcggtcctgaagagcagcggttcgtggtggggcacgaggtagggcacatcctgtccgggcacgccgtctaccgcaccatgctgctggctctggttcggctggcggcgcgggtcgcctggttccccctgggctatgtcggcctgcgcgcgatcgttgcggcgctggaggagtggtaccgcaaatcagagctgtcctgtgaccgtgccgggctgctcacctgccagaacccggaagcggccaagcgggcgctgatgaagctcgccgggggttcacggctggccgagatgaacgtcgacgctttcctcgaccaggcccgggagtacgacgctgctgaggacatccgcgacgggttcatcaaactcctcatcacccaggggcagacccatccgttcgcggtggtccggctcgcggaactggaccgctggatcgcagagggctcctaccagcgcatcctcaccggcgactacccccggcgggacaccgataccgacgcccgcatcagcgaggaggcccgcagcgcggcccgctcgtaccgggaggcgtgggagcgcacctctgatccgctggtgggcactttgcgcgatgtggtgagcggcgcggcggccacgggcagcaagatcttcgactcgatggccgaccggtggcgcaacggcccgggacgccgcaccaccgcctga

SEQ ID NO: 3729 - protein, 346 aa, Thermobifida fusca YX
MATTPDRARVRLRNISSRAYEHPADRGALVALRSLRGFDEVFKRLSGLFNERALRLMFLASAVRVDERQFPDIHDYVRDAAYVLDLDRVPELYIQMNPQPNAMAIGSSRPFIVVTTGLVDLLGPEEQRFVVGHEVGHILSGHAVYRTMLLALVRLAARVAWFPLGYVGLRAIVAALEEWYRKSELSCDRAGLLTCQNPEAAKRALMKLAGGSRLAEMNVDAFLDQAREYDAAEDIRDGFIKLLITQGQTHPFAVVRLAELDRWIAEGSYQRILTGDYPRRDTDTDARISEEARSAARSYREAWERTSDPLVGTLRDVVSGAAATGSKIFDSMADRWRNGPGRRTTA

SEQ ID NO: 3730 - DNA, 876 bp, Anabaena variabilis ATCC 29413
  CDS (1)..(876): transl_table=11
atgtccttgttcaaatctccgctcatcggtttaaaagctgactcgtttcgtcatccactagacctggaagctactacatctctcaagcaaataccgggcttggatatgttggtacgaaatttactagggccaatggcggagcaagttttttatgtagaaaatattgcttcgagtgttttggtaggggaaaaacaactgcctaatttacacaagctgttgttagaagcttgcaaaattttggatattgagcctccccagttgtatgtcagacaacacccggctcctaatgcctacacctttgctatgcggggtaagcaaccttttgtagtgttgcatacttccttaattgatatcctgactccagaggaaatccaggcggtgattgcccatgagttgggacatctcaagtgtgaccacagtgtttatctgacacctgtaaatttattagtattagcagcatcagcagtccccaatataggggcttttatggctcaagctatccaggcacaacttttagagtgggtacgttgtgctgagtttacctgcgatcgcgccgcattactagctacccaagaccccaaggtcgtgatgtcagttttaatgaagttggctggaggttcccccaccctagcaccgcaactgaatttggatgcttttattgagcaagctcgcgcttacgacgatattagtaaaagcgaaatgggggaaatggttaaagctgctcgtactgctcaattaacccaccccgttccagtcctccgtgccagagaaattgacagatgggcaagtagtcaagaataccaatctttattactaaatcatggtcagaaatataccagtgaagtagcaccaaaaggtggctggcggaattggtga

SEQ ID NO: 3731 - protein, 291 aa, Anabaena variabilis ATCC 29413
MSLFKSPLIGLKADSFRHPLDLEATTSLKQIPGLDMLVRNLLGPMAEQVFYVENIASSVLVGEKQLPNLHKLLLEACKILDIEPPQLYVRQHPAPNAYTFAMRGKQPFVVLHTSLIDILTPEEIQAVIAHELGHLKCDHSVYLTPVNLLVLAASAVPNIGAFMAQAIQAQLLEWVRCAEFTCDRAALLATQDPKVVMSVLMKLAGGSPTLAPQLNLDAFIEQARAYDDISKSEMGEMVKAARTAQLTHPVPVLRAREIDRWASSQEYQSLLLNHGQKYTSEVAPKGGWRNW

SEQ ID NO: 3732 - DNA, 963 bp, Anabaena variabilis ATCC 29413
  CDS (1)..(963): transl_table=11
atgccaacttacacaggaatttccagcgaagccttcagacatccactggatcgccaagccgagcaagctttgcgaaatttaccaggatttgatttgattgctcgtaaatttgtggaatttgtctacgaacgccctcagctagtctatctaatgggcaacaccatccaagtagggcctcggcaatattccactatttaccagatgtttcgggagtgtgtgcgggatttggatatttatccagaacctacactgtttgtttcacaaaatcctcaggcaaatagctacgcattaggtcaagagaatccttacatagtcataaacacagggatactagacttactcaacgaagccgaaattagggcggtgttagcccatgaactggggcatattaaatgtggtcatactattctaattcaaatggcgatgtgggcgatgagtgcggcttctgccttaggagaattaacctttggcattggtaattttgtctctcaagccttaatttatgcgttttttgaatggcggcgcaaggctgagttaacggcagatagagccgccctgttggtggttgatgacctaaatactgttttatcgtcaatgatgaagatttctggcggtagcagtaaatatgccaatgaatgcagtttgcaagaatttattaagcagtccgaaaattatcaggcgttagatgaggatgggctaaatcaagtgtataaattcttaatgtacaacggcgctcaaggcatgatgttaagccatccgttcgctgtagaaagagtccaatacctacaacaatgggcagtatcctcagaatatcaacaaattcgccaaggtaattatcagcgatcgcctgcctctggttctgtagacgtgaaagcctctaccaccacagccgaagccgaaagattacgccgccaaattgaagaattacaacaagaaattaacaaaatgaaacggtctgaataa

SEQ ID NO: 3733 - protein, 320 aa, Anabaena variabilis ATCC 29413
MPTYTGISSEAFRHPLDRQAEQALRNLPGFDLIARKFVEFVYERPQLVYLMGNTIQVGPRQYSTIYQMFRECVRDLDIYPEPTLFVSQNPQANSYALGQENPYIVINTGILDLLNEAEIRAVLAHELGHIKCGHTILIQMAMWAMSAASALGELTFGIGNFVSQALIYAFFEWRRKAELTADRAALLVVDDLNTVLSSMMKISGGSSKYANECSLQEFIKQSENYQALDEDGLNQVYKFLMYNGAQGMMLSHPFAVERVQYLQQWAVSSEYQQIRQGNYQRSPASGSVDVKASTTTAEAERLRRQIEELQQEINKMKRSE

SEQ ID NO: 3734 - DNA, 876 bp, Trichodesmium erythraeum IMS101
  CDS (1)..(876): transl_table=11
atggctctaacaaaaacacaactaattggtttaaaagcaaatcattttcggcatcccttagatctagaggcaacaaatgctttgaagcaacttcctggtatagacctcttagttagacagttgttaagtccattaggtgagcaatttttctatatggaaaatattgcttccagtgttctcgtcagtgaagcacaactgccaaatttacacaaaacactattagacgcttgtcaagcacttgacatagaaccaccccaattatatattcgtcaaaatcctgtacctaatgcttatacatttgctatgcgagggaagcaaccttttattgttgttcatacatctctaatagagttgctcaacttagaggagatccaagcagtattaggtcatgagctaggacatcttaaatgtgagcatggagtatatcttaccctaggtaacttaattgtacttgctgctggacaaatttcgacatggggtggcataatagcccaaagcttacaaagcaaaatactagaatggctaagatgtgccgaatttagttgtgatcgcgcagccctactggccacacaaaattctcaagtagttgtatcagctttgatgaagttagctggtggttctccaacaatatcacctcaacttaatgtagatgcttttttagctcaggcaagagcttataatgaacttagtaatacagaagttggtgaagtattaaaggaagtccaaacggctcaactaactcatcctctacctgtattgagggccaaagaaattgatatgtgggcaagtagcaaaaaatatcaggatatattgcaaaatttagcaaaagatgtgtataataatcaaaggattaagggcgggtggcgaaattggtag

SEQ ID NO: 3735 - protein, 291 aa, Trichodesmium erythraeum IMS101
MALTKTQLIGLKANHFRHPLDLEATNALKQLPGIDLLVRQLLSPLGEQFFYMENIASSVLVSEAQLPNLHKTLLDACQALDIEPPQLYIRQNPVPNAYTFAMRGKQPFIVVHTSLIELLNLEEIQAVLGHELGHLKCEHGVYLTLGNLIVLAAGQISTWGGIIAQSLQSKILEWLRCAEFSCDRAALLATQNSQVVVSALMKLAGGSPTISPQLNVDAFLAQARAYNELSNTEVGEVLKEVQTAQLTHPLPVLRAKEIDMWASSKKYQDILQNLAKDVYNNQRIKGGWRNW

SEQ ID NO: 3736 - DNA, 1122 bp, Mycobacterium smegmatis str. MC2 155
  CDS (1)..(1122): transl_table=11
atgacccgaccaccggcgacgcaaccgccgcagcggacgacttttccggggatcagttcccgtgcgtgggagcatccggcagatcggaccgcgctgaccgcactgcgccggctcaagggcttcgaccaggtcctcaaggtgctctccgggatgctccgcgaacggcagcaccgcctgttgtacctcgcgagttcggcacgtgtggggccgcgccagttcgccgatctcgacgagctgctcgacgactgcgcccgggtgctcgacgcgccgagccgcccggagatgttcgtgacacagtcgccggtggcgaatgcgtacacgatcggtatggacgaaccgttcatcgtgatcacctccggcatgtacgacctcatgtcgcacgacgagatgcgtttcgtcatcggtcacgaactcggccatgccctcagcggtcacgcggtgtaccgcaccatgctgatgcatctcatgcggatcgcctcgacgttcgggttcgtcccgatcggcggctgggcgctgcgcgccatcgtcgccgctctgatggaatgggaacgtaaatccgaactttcgggagaccgggccgggttgctgtgcggccaggatctcgacaccgcgatccgagtcgagttgaagctcgcggccggggcgcggctcgacaagctcgactcgcaggcgttcctcgcgcaggcgcgggagtacgaacgcgcaggcgatatgcgcgacggtctgctcaagctgctcaacctggaactgaagacacatccgttctcggtgttgcgggccgcggccctgacgcagtgggtggacaccggtggctacggcgcggtcatggcaggggactatccacgtcgcgaagacgacgacaaagccgcgttgcgcgatgacatcggcgaggcggcgcgccactaccgggacggtttcgaccagtcggacgatccgctgatccgtgggatcagagacggcctcggcggcatcgtcgacggcgtgggacaggctgcgacatctgcggcggactcggtgggccgcaagatctccgagtggcgccgcagtgcccagcgcgatgcccggcgcgatgaccgccgcgatggccccgagccggattccgggtcggacgacgccggctga

SEQ ID NO: 3737 - protein, 373 aa, Mycobacterium smegmatis str. MC2 155
MTRPPATQPPQRTTFPGISSRAWEHPADRTALTALRRLKGFDQVLKVLSGMLRERQHRLLYLASSARVGPRQFADLDELLDDCARVLDAPSRPEMFVTQSPVANAYTIGMDEPFIVITSGMYDLMSHDEMRFVIGHELGHALSGHAVYRTMLMHLMRIASTFGFVPIGGWALRAIVAALMEWERKSELSGDRAGLLCGQDLDTAIRVELKLAAGARLDKLDSQAFLAQAREYERAGDMRDGLLKLLNLELKTHPFSVLRAAALTQWVDTGGYGAVMAGDYPRREDDDKAALRDDIGEAARHYRDGFDQSDDPLIRGIRDGLGGIVDGVGQAATSAADSVGRKISEWRRSAQRDARRDDRRDGPEPDSGSDDAG

SEQ ID NO: 3738 - DNA, 1095 bp, Nocardioides sp. JS614
  CDS (1)..(1095): transl_table=11
ttgggccgaagtttcggccgagaagtgcagggattgcccgagaagtccgaccggcccccacctgccacgtgccacagtgagcgcgtgacgacgcagccggctcggtcccgggccaccctcaccggcatcagctcccgcgcgtgggagcaccccgccgatcgtggcgccctggtcgcgctgcgcaggctcaaggggttcgacaccctgctcaaggcgatctcgggactgttcaacgagcgcgccgtacgcctggtcttcctgggctccgccgtccgcgtcgacgagcgtcagttcacccgcctccacgggctgctcggcgaggtcggacgcaccctcgacgccccgcagctgccggagatgtacgtcgtggccgacccggtgcccggggcgatgaccctcgggatgaacaagccgttcatcgtgctcaactccgggctggtcgacctcctcgacgaggaggagctgcggttcgtcgtcgcccacgagctgggccacgcgatgagcgggcacgcggtctaccagacgctcctgcagcggctgatccagctcaccggcgtgctcagcagcgtgcccgtcgggggcctcggcttccgggcgatcatggcggcgctgcacgagtggtcgcgcaaggccgagctctccgccgaccgcgcgggactgctcgcgacccaagatcccgccacggcgttccgcgtgcacatgaagctcgccagcggcggccacctcgacgacctggacgcgacgtcgttcttcgcgcagggccaggagtacgacgaggccgacctgcgcgactcggtcctcaagatgctgctcgtcgagaaccgctcccacccgttcctggtggtccgcgcggccgagctgcgccgctgggtcgactccggtgagtacacccggatcctcgccggcgactacccgcggcgccaggacgacgaccaggcgggcgtctcggaggcggcgaaggccgccgcccgcagctactccgagacgttccggcagagccaggacgccgtcggcaggctggtccacgacgtcgccggggtgctcggcagcgtcaagctctggctcgacgagcagctgcgccgcgacgacgactga

SEQ ID NO: 3739 - protein, 364 aa, Nocardioides sp. JS614
MGRSFGREVQGLPEKSDRPPPATCHSERVTTQPARSRATLTGISSRAWEHPADRGALVALRRLKGFDTLLKAISGLFNERAVRLVFLGSAVRVDERQFTRLHGLLGEVGRTLDAPQLPEMYVVADPVPGAMTLGMNKPFIVLNSGLVDLLDEEELRFVVAHELGHAMSGHAVYQTLLQRLIQLTGVLSSVPVGGLGFRAIMAALHEWSRKAELSADRAGLLATQDPATAFRVHMKLASGGHLDDLDATSFFAQGQEYDEADLRDSVLKMLLVENRSHPFLVVRAAELRRWVDSGEYTRILAGDYPRRQDDDQAGVSEAAKAAARSYSETFRQSQDAVGRLVHDVAGVLGSVKLWLDEQLRRDDD

SEQ ID NO: 3740 - DNA, 963 bp, Cyanothece sp. PCC 8801
  CDS (1)..(963): transl_table=11
atgccaacctataccggaatttctagtgaagcctttcgtcatcccctcgataaacaagctgaacaaaccctgcggagtgttccaggctttaatatattagcaaaaagctttctcgaatacctttatgagcgtcctcagcaaatttttttgatgggaaatagtattaaagccggacctcgccaatatcctaccctttacgggatttttcgcgaatgtatgaaggacttagatattagttctgaacccagtttatacgtcagccaaaacccccaagtgaatgcctattctttgggtcatgaacagccttatttaatctttaatacgggtttattagacttactaaatgaaacagagttaaggacagttattgcccatgaattaggtcatataaaatgtgatcatagtgttttaattcaaatggctatttgggcaatgggagcagcttctttgttaggagaattaaccttaggattaggaaatttaattaccacggggttaatttattcgttttatgaatggcgacgcaaagcggaattatcagccgatagggcggctttattagtaatggatgatcttaaccctattcttaatagtatgatgaaaatggcaggggggactcagaggtatggcaatgaatgtcatttagatgaatttattcgtcaatctgaacagtatcgagacttagatcaagataacttaaatcaattttataagtttttcatttataatggtggtaatggcgtgtttttaacccatccttttcccgtagaacggcttcattatttaacagaatggtcaacctctcaagaatatcaaaatattcggcaaggtaattataaacgagtcacaaaagaaggatctgttgatgtcaatgtagaagaagaagggaatgaagtggatattttacggaaacaaattgaggaattacaaaaagaaattgaccgcattaaatcagaaaattaa

SEQ ID NO: 3741 - protein, 320 aa, Cyanothece sp. PCC 8801
MPTYTGISSEAFRHPLDKQAEQTLRSVPGFNILAKSFLEYLYERPQQIFLMGNSIKAGPRQYPTLYGIFRECMKDLDISSEPSLYVSQNPQVNAYSLGHEQPYLIFNTGLLDLLNETELRTVIAHELGHIKCDHSVLIQMAIWAMGAASLLGELTLGLGNLITTGLIYSFYEWRRKAELSADRAALLVMDDLNPILNSMMKMAGGTQRYGNECHLDEFIRQSEQYRDLDQDNLNQFYKFFIYNGGNGVFLTHPFPVERLHYLTEWSTSQEYQNIRQGNYKRVTKEGSVDVNVEEEGNEVDILRKQIEELQKEIDRIKSEN

SEQ ID NO: 3742 - DNA, 849 bp, Cyanothece sp. PCC 8801
  CDS (1)..(849): transl_table=11
atggacttaacaaaaaactgtttaattggcctcaaagctgacgattttcgccaccccttagacctgaaagcaacgacagccctcaaacaactccccggactggatatggtggtacgcagtctcctcggatcggtggcagaacagtttttttatctcaataacatcgcctcgagtgtccgcgtcagcgatcagcaactgccccatttccacaacctcttactagaggcttgtcgtatcctcgacctcgaaccccctcaactgtacatccagcaacaccccgtccctaatgcctatacatttgccatgcagggaaaacaaccctttatggtcattcatacttccttaattgaaattctgacccccgaagaaattcaaggggtaatggcgcacgaattgggacacctcaaatgtgaacacggggtttacttgaccctagctaatattatggtattggccgctgggttattgcctaactggggaactgcgatcgcccagtctctgcaaggacaaatgttagaatggctacgctgtgccgaatttagctgcgatcgcgctgccctgttagcgacccaagatcccaaggtggtcatgtctattttgatgaaattggccgggggttctcccactatagccccccaattaaacctagaggcatttatccaacaggccagggattatgaagccattagcgacacctttttgggagaaatgctaaaaacggcacaaacggagcaattaacccatcctgtgcctgtattgcgggctaaagagattgattgctggtcaagttctcaagattatcatcggttgttagaaataggcaaaaggcagtataatcaaaaaaagtga

SEQ ID NO: 3743 - protein, 282 aa, Cyanothece sp. PCC 8801
MDLTKNCLIGLKADDFRHPLDLKATTALKQLPGLDMVVRSLLGSVAEQFFYLNNIASSVRVSDQQLPHFHNLLLEACRILDLEPPQLYIQQHPVPNAYTFAMQGKQPFMVIHTSLIEILTPEEIQGVMAHELGHLKCEHGVYLTLANIMVLAAGLLPNWGTAIAQSLQGQMLEWLRCAEFSCDRAALLATQDPKVVMSILMKLAGGSPTIAPQLNLEAFIQQARDYEAISDTFLGEMLKTAQTEQLTHPVPVLRAKEIDCWSSSQDYHRLLEIGKRQYNQKK

SEQ ID NO: 3744 - DNA, 1302 bp, Vitis vinifera
  CDS (1)..(1302)
atgaatttcattggacccttaagcccaattcccaaacccaaatgctccgattctagactagaagaacaaacggccaattttttctcgaccctttgggcccaaaagacaaggcccatcagaatagcaaagtcaaaacggacaacgaaatgccggcgagccatcgccataagtacggctgtggacacaagcataaggagttccgaacacacaatggccatgcacacggtatgcggattgcgcatcacaggaaccactgtgaccatcaacagatttcagacgctaccgtacgcctcctcaactccccctctctctatctccgcttcaatggcctctgttcctctctcttccactgtcttcttcggttcaattactgctaaaaaatcgaggttcagttctttccctctcgaatttcgaccgttgaagaagactcaaagagtcagggtttctgtctgcagagctgcatcggttgtttttcgcgatctcgatgccgatgatttcagacaccctctcgataagcagaatacgctgattttgagggcgattccaggattaaacgaaatcggaaaggctctattaggaaccgtgacagagcaggtcatgcttctcgagaatataggaacatcagttcttgtttccaaaaatcagctttctgatcttcatcaattaatgcttgaggctgcggaaatactgaatcttgatgctcctgatttatacatccggcaaagtcctgtaccaaacgcatatactttagctatcagtggtaaaaagccttttgttgttgttcatacaagccttgtggagcttctgacacgaaaggagttgcaggctgttttggctcacgagttgggtcacctgaaatgtgaccatggtgtatggcttacttttgcaaatattctcactcttggggcctattctttacctgggcttggtgggttgatcgctcggcaattagaagaacagctatttcggtggctccgagcagcagagctaacttgtgatcgtgcagcccttcttgttgctcaagatcccaaggtggtcatctccgttctgatgaaattagcggggggcagcccatctttggctgaccaattaaatgtagatgcattcttggagcaggctcgctcctatgaaaaagcttcttcaagcccagtggggtggtatataagaaatgctcaaacaaggcagctttcacatcctctgcctgttctacgtgctcgtgagattgatgaatggtcaagaagtaaagactacagatcccttttgagccgtgcagcaccgataaattctgtacaaaagatttag

SEQ ID NO: 3745 - protein, 433 aa, Vitis vinifera
MNFIGPLSPIPKPKCSDSRLEEQTANFFSTLWAQKTRPIRIAKSKRTTKCRRAIAISTAVDTSIRSSEHTMAMHTVCGLRITGTTVTINRFQTLPYASSTPPLSISASMASVPLSSTVFFGSITAKKSRFSSFPLEFRPLKKTQRVRVSVCRAASVVFRDLDADDFRHPLDKQNTLILRAIPGLNEIGKALLGTVTEQVMLLENIGTSVLVSKNQLSDLHQLMLEAAEILNLDAPDLYIRQSPVPNAYTLAISGKKPFVVVHTSLVELLTRKELQAVLAHELGHLKCDHGVWLTFANILTLGAYSLPGLGGLIARQLEEQLFRWLRAAELTCDRAALLVAQDPKVVISVLMKLAGGSPSLADQLNVDAFLEQARSYEKASSSPVGWYIRNAQTRQLSHPLPVLRAREIDEWSRSKDYRSLLSRAAPINSVQKI

SEQ ID NO: 3746 - DNA, 972 bp, Microcystis aeruginosa PCC 7806
  CDS (1)..(972): transl_table=11
atgccgacttatcctgatatctccagtcaagcttttaaacatcccctagatcagcaagctgaacagaccttaagatcagttccggggtttgatttattagcgaaaagtttttccgaatatctctatgaacgtccccagcaaattttattaatgggcaatgatctaaaagtcggcccgcgtcaatatgctactttatacggtatatatcgccaatgtctgcgggatttagatatgtccccagaaccgaatctttatgtcagtcaaaatcctttagccaatgcctattctttgggttcagaacatccctatatagtctttaataccgctcttttagacctcttagatgaagaagaaattcgagtaattcttgcccacgaattaggtcatttaaaatgcgatcatagtattttaattcaaatgtctttttgggtgatgggagcggctaatttgcttggagacatcaccttaggactaggaaaagccattactactggtctagtttatgccttttatgaatggcgcagaaaagccgaattatccgcagacagagccgctttattagttaccgatgatttaaatttagtcctgagaactttaatgaaatgtgcaggaggaagtcaaaaatatctgcatgaatgcaacttagaagaatttattcgccaaggggaagcctaccgacaattagaccaagataacttaaaccagatttataaatttctcatttatcatggcggtaatggttcctttttaacccatcctttttccgtagaaagagtccagtatctacaggaatggtttaactcagaatcctatcgtcaaattcgctggggaaactatgccaaaacaggggtaaaaagctcaactaatgttgatgctaatgatagcgaaagcgaaagcgaaagattacagcgacaaatagcagaactacaagcagaaattcaacgggcaaaaagacaaagaaaccgtgaataa

SEQ ID NO: 3747 - protein, 323 aa, Microcystis aeruginosa PCC 7806
MPTYPDISSQAFKHPLDQQAEQTLRSVPGFDLLAKSFSEYLYERPQQILLMGNDLKVGPRQYATLYGIYRQCLRDLDMSPEPNLYVSQNPLANAYSLGSEHPYIVFNTALLDLLDEEEIRVILAHELGHLKCDHSILIQMSFWVMGAANLLGDITLGLGKAITTGLVYAFYEWRRKAELSADRAALLVTDDLNLVLRTLMKCAGGSQKYLHECNLEEFIRQGEAYRQLDQDNLNQIYKFLIYHGGNGSFLTHPFSVERVQYLQEWFNSESYRQIRWGNYAKTGVKSSTNVDANDSESESERLQRQIAELQAEIQRAKRQRNRE

SEQ ID NO: 3748 - DNA, 876 bp, Microcystis aeruginosa PCC 7806
  CDS (1)..(876): transl_table=11
atggaattatcaaaacagttattactaggcttaaaagccaatgattttcggcatcccatcgacctagaggcgactaactcccttaaacagttgcccggtttagatatagccgtgagaagtttgttaggttccgtcgctgaggaattcttttacctaaataatattgctgctagtgttttggtgggggaaaaacaattacccgacctgcataatctcctcctagaagcttgccgagttctcgacttagaaccacctcaattatacattcaacaaaaccccgttcctaacgcttataccttcgccatgcgcggcaaaaaaccgtttatggtgatgcacacttccctaattgaaatgctgactcccgcagaaattcaagcggtaatcgctcacgaattaggtcatctcaaatgtgaacacggcgtttatctgactttagccaatattatggtcctagcggcgggattgctgcccaattgggggacaatgttagcacgatccctacaggagagaatgttagcatgggtgcgctgcgccgagtttagttgcgatcgatccgctttattggcagttcaagacccaaaaatcgtcatgtcggtgttaatgaagttagccggaggttcccccagtctcgcacctttattaaatttagaggcttttatcgatcaggccaagtcctacgatgccgtcagcgcctcggaaatgggcgaaatgttaaagggtttgcaaacccaacagttaacccatcccctccccgtcctgcgtgcgcgagaaatcgatcgttgggccagttcccccgattatcacaatttgttaaaggggccaaaaatgggttataatgataaaactaatgccaagggcgaatggcgaaattggtag

SEQ ID NO: 3749 - protein, 291 aa, Microcystis aeruginosa PCC 7806
MELSKQLLLGLKANDFRHPIDLEATNSLKQLPGLDIAVRSLLGSVAEEFFYLNNIAASVLVGEKQLPDLHNLLLEACRVLDLEPPQLYIQQNPVPNAYTFAMRGKKPFMVMHTSLIEMLTPAEIQAVIAHELGHLKCEHGVYLTLANIMVLAAGLLPNWGTMLARSLQERMLAWVRCAEFSCDRSALLAVQDPKIVMSVLMKLAGGSPSLAPLLNLEAFIDQAKSYDAVSASEMGEMLKGLQTQQLTHPLPVLRAREIDRWASSPDYHNLLKGPKMGYNDKTNAKGEWRNW

SEQ ID NO: 3750 - DNA, 1092 bp, Picea sitchensis
  CDS (1)..(1092)
atgtgggggagcgggaattggagcgcccctcaccctgaatgtattggaattgcaagcagccctcgctctcaatgccagagagctcacctgcacgatgtttcattctcatcatcataccccagaaatcgtaattgtcgcgtcttctccctcccatatccacataatgattccatgatgaaggtgcggcctaagagaaagcagggttgcagaaaagccccgcagaggcagtggaagtgtcgggcagtagtcagttttcctaatcttcaagcggatgacttcaggcatcctcttgatagacagaatacggcacttctcagagctgttccgggcttgaatgaatttggcaagattttgttggggcctgtttcagaacaagttatgcttctagagaatataggaacgtcagtgcatgtgactgagaatcagctttctgacctacatcaattaatggttgaagcagcgaatattctgtgtattgaggtacctgacctctatgttcgtcagaatcctgtcccaaacgcatataccttggcaataggagggcgaaagccatttgttgttgttcatactagcattgtggagcttcttacccgtagggaattgcaggcagtgctagcgcatgaattaggacatctgaagtgcgatcatggcatctggctcacttttgcaaacatccttacactgggtgcttacaccattcctgggctagggtcttttattgcccagacatttgaagagcagttatttcggtgggtgcgagcagcagaactgacatgtgacagggctgctcttcttgtagtgcaggatccaaaagtggtaatctcggtattgatgaaattggcgggagggtgtccatctttagcagggcagctgaatgtggatgcatttctagaacaagctcgctcttatgatgctgcatcttcaaatccactgggatggtatctaaggaatgcgcagacgcggcaactgtcccacccattgcctgttctgcgtgcccgagaagtagatcagtgggccagaaacccacaatacaaggctctcttgaagcatgcttctacattccactcaaaatccaaaccccatctaagttaa

SEQ ID NO: 3751 - protein, 363 aa, Picea sitchensis
MWGSGNWSAPHPECIGIASSPRSQCQRAHLHDVSFSSSYPRNRNCRVFSLPYPHNDSMMKVRPKRKQGCRKAPQRQWKCRAVVSFPNLQADDFRHPLDRQNTALLRAVPGLNEFGKILLGPVSEQVMLLENIGTSVHVTENQLSDLHQLMVEAANILCIEVPDLYVRQNPVPNAYTLAIGGRKPFVVVHTSIVELLTRRELQAVLAHELGHLKCDHGIWLTFANILTLGAYTIPGLGSFIAQTFEEQLFRWVRAAELTCDRAALLVVQDPKVVISVLMKLAGGCPSLAGQLNVDAFLEQARSYDAASSNPLGWYLRNAQTRQLSHPLPVLRAREVDQWARNPQYKALLKHASTFHSKSKPHLS

SEQ ID NO: 3752 - DNA, 1035 bp, Arabidopsis thaliana
  CDS (1)..(1035)
atggcggtttcagtctcagctccggttttgtccctctgttacaatcagagcggcgaattgtctcgtagtttggggtatagactaccgaagaaagtgggatttagctctggtcgtcgttcagtgagttatatcggtttcggtgcggagaaagttggaagatttagggttagggttccgatttgcagagctgtacctcctctcttgttcaaagatctcgatgctgatgatttccgacatccttttgataagcagaacacgttgttactaagggctataccggggttgaacgaattcggcaaagctcttttagggtcaatgacggagcagattatgcttcttgagaacattgggacttctgttcttgtttccaagaatcagctctctgatcttcacggtttgttggttgaggctgctgagattttgaatatagaggctcctgatctatatgtgcgacagagtcctgttcctaatgcgtatacgctggcaataagcggtaagaagccgtttattgttgtccacaccagcttgatcgagcttcttactagcgcggagctacaggctgtcttagcccatgaactaggccatctgaagtgtgatcacggcgtgtggctcacatttgcaaatattcttactcttggggcttatacagttcctgcttttgggcaaatgatagctcgaaccttggaagaacagttacttcgttggctacgttcagcagagctgacttgtgatcgcgcagcactactcgtcgcccaagatccaaaggttgttgtatctgttctgatgaaattagccggagcatgtccatcaatcgctgatcagctaaatgttgacgcatttctagaacaagcccgttcatatgacaaagcttcttcaagccccttgggatggtacataagaaatgctcagactagtcaactttcgcatccattgccggttcttcgtgcacgtgagattgatgagtggtccaggagtctcgagtacaaaagtctcctgaaacgggcaaatcgaaaaagcacagtacagaaggtttag

SEQ ID NO: 3753 - protein, 344 aa, Arabidopsis thaliana
MAVSVSAPVLSLCYNQSGELSRSLGYRLPKKVGFSSGRRSVSYIGFGAEKVGRFRVRVPICRAVPPLLFKDLDADDFRHPFDKQNTLLLRAIPGLNEFGKALLGSMTEQIMLLENIGTSVLVSKNQLSDLHGLLVEAAEILNIEAPDLYVRQSPVPNAYTLAISGKKPFIVVHTSLIELLTSAELQAVLAHELGHLKCDHGVWLTFANILTLGAYTVPAFGQMIARTLEEQLLRWLRSAELTCDRAALLVAQDPKVVVSVLMKLAGACPSIADQLNVDAFLEQARSYDKASSSPLGWYIRNAQTSQLSHPLPVLRAREIDEWSRSLEYKSLLKRANRKSTVQKV

SEQ ID NO: 3754 - DNA, 984 bp, Oryza sativa
  CDS (1)..(984)
atggctgcggcggcggcggctgcttctgctccccgcctcctcctgccgccggccgcctccaccttcccacaccagcacgagcacgtccgccgcaactggcaccggccccgccgccaggtcatctctgcccgcgccggcgcctccgtcgccgcccggggccttgatgcagacgacttccgccatccgctggacaagcagaacacactgctgctgagagcagttccagggcttaatgatatgggcaaggctttgctaggaccagtttctgagcaagttatggtacttcagaacattggatcgtctgtgctagtctctgaaaaccagctttcagatcttcatcagatcttgaccgaggcagcaaaactattgaacacagacgctcctgacttgtacattcggcagaaccctgttcctaatgcttacaccttagcgatcagtggcaaaaagccattcatagttgttcatacaagccttgtggagctgctcactagaaaagaactgcaggctgtgttggctcatgaactgggacacctcaagtgtgaccatggcgtgtggcttacatttgccaacatactgacaatgggagcatactctgtccctggatttggcatggttgctgggtttctggaagagcagctctacaggtggctccgggctgcagagctgacttgtgatcgagcggctcttcttgtagtgcaggaccccaaggttgtgatatctgtgctgatgaaactggccggagggtgcccgtcgcttgcggaccagctgaacgtggacgccttcctggagcaagctcgctcctacgacaaagctgcgtcaaaccccgtcggctggtacatccggaacgctcagacgagagagctgtcgcatcctctgccggtgatgcgagcccgcgagatcgacgagtggtccaggagccgagagtacaagacggtgcagcagaaggtcattcagctccagctcaatgatcacgatgcaagctag

SEQ ID NO: 3755 - protein, 327 aa, Oryza sativa
MAAAAAAASAPRLLLPPAASTFPHQHEHVRRNWHRPRRQVISARAGASVAARGLDADDFRHPLDKQNTLLLRAVPGLNDMGKALLGPVSEQVMVLQNIGSSVLVSENQLSDLHQILTEAAKLLNTDAPDLYIRQNPVPNAYTLAISGKKPFIVVHTSLVELLTRKELQAVLAHELGHLKCDHGVWLTFANILTMGAYSVPGFGMVAGFLEEQLYRWLRAAELTCDRAALLVVQDPKVVISVLMKLAGGCPSLADQLNVDAFLEQARSYDKAASNPVGWYIRNAQTRELSHPLPVMRAREIDEWSRSREYKTVQQKVIQLQLNDHDAS

SEQ ID NO: 3756 - DNA, 975 bp, Oryza sativa
  CDS (1)..(975)
atggctgcggcggcggcggctgcttctgctccccgcctcctcctgccgccggccgcctccaccttcccacaccagcacgagcacgtccgccgcaactggcaccggccccgccgccaggtcatctctgcccgcgccggcgcctccgtcgccgcccggggccttgatgcagacgacttccgccatccgctggacaagcagaacacactgctgctgagagcagttccagggcttaatgatatgggcaaggctttgctaggaccagtttctgagcaagttatggtacttcagaacattggatcgtctgtgctagtctctgaaaaccagctttcagatcttcatcagatcttgaccgaggcagcaaaactattgaacacagacgctcctgacttgtacattcggcagaaccctgttcctaatgcttacaccttagcgatcagtggcaaaaagccattcatagttgttcatacaagccttgtggagctgctcactagaaaagaactgcaggctgtgttggctcatgaactgggacacctcaagtgtgaccatggcgtgtggcttacatttgccaacatactgacaatgggagcatactctgtccctggatttggcatggttgctgggtttctggaagagcagctctacaggtggctccgggctgcagagctgacttgtgatcgagcggctcttcttgtagtgcaggaccccaaggttgtgatatctgtgctgatgaaactggccggagggtgcccgtcgcttgcggaccagctgaacgtggacgccttcctggagcaagctcgctcctacgacaaagctgcgtcaaaccccgtcggctggaacgctcagacgagagagctgtcgcatcctctgccggtgatgcgagcccgcgagatcgacgagtggtccaggagccgagagtacaagacggtgcagcagaaggtcattcagctccagctcaatgatcacgatgcaagctag

SEQ ID NO: 3757 - protein, 324 aa, Oryza sativa
MAAAAAAASAPRLLLPPAASTFPHQHEHVRRNWHRPRRQVISARAGASVAARGLDADDFRHPLDKQNTLLLRAVPGLNDMGKALLGPVSEQVMVLQNIGSSVLVSENQLSDLHQILTEAAKLLNTDAPDLYIRQNPVPNAYTLAISGKKPFIVVHTSLVELLTRKELQAVLAHELGHLKCDHGVWLTFANILTMGAYSVPGFGMVAGFLEEQLYRWLRAAELTCDRAALLVVQDPKVVISVLMKLAGGCPSLADQLNVDAFLEQARSYDKAASNPVGWNAQTRELSHPLPVMRAREIDEWSRSREYKTVQQKVIQLQLNDHDAS

SEQ ID NO: 3758 - DNA, 1029 bp, Brassica napus
  CDS (1)..(1029)
atgactgtctcagtctctgctccgatcttgcccctctgtttccatcagagcggcgaacaaagtagtcgtttaggttacatacagcagaagagattaagttctggtcgtaattcacggagctccatcggtttcggtgcggagaaggtgcgtaagtcgagggttagggctccggtttgcagagccgtgcctcctctcttgttcaaagatctcgacgccgatgattttcgacatcctttggataagcagaacacgttgttactaagagccattccggggttgaacgagttcgggaaagctcttttaggctcagcgacggaacagatcatgcttcttgagaacattgggacttctgttcttgtctccaagaaccagctctctgatcttcacggtttgttggtcgaagctgctgagattttgaacatagaggctcctgatctctatgttcgacagagtcctgttccaaacgcgtatacactggcgataagcggtaaaaagcctttcattgtcgttcataccagcctcatcgagcttcttactcgccaggagcttcaggctgtcttggctcatgagctaggccatctgaagtgtgatcacggcgtgtggctcaccttcgctaatattcttactcttggggcttatacagtccctgcttttgggcaaatgatagctcgaaccttggaagaacagatgcttcgttggctacgttcagcagagctgacctgtgaccgtgcagcacttctcgtggcccaagatccaaaggttgttgtgtccgttctaatgaagttagctggaggatgtccatcaattgctgatcagctaaatgttgatgcgtttctagaacaagcccgttcatatgacaaagcttcttcatcccccttgggctggtacataagaaatgctcagacgagtcaattatcacatccattgccggttcttcgtgcacgcgaggttgatgagtggtcaaggagtcttgaatacaggagtctcctgaaaagggctaatcgtataagcacgttggagaatgtttag

SEQ ID NO: 3759 - protein, 342 aa, Brassica napus
MTVSVSAPILPLCFHQSGEQSSRLGYIQQKRLSSGRNSRSSIGFGAEKVRKSRVRAPVCRAVPPLLFKDLDADDFRHPLDKQNTLLLRAIPGLNEFGKALLGSATEQIMLLENIGTSVLVSKNQLSDLHGLLVEAAEILNIEAPDLYVRQSPVPNAYTLAISGKKPFIVVHTSLIELLTRQELQAVLAHELGHLKCDHGVWLTFANILTLGAYTVPAFGQMIARTLEEQMLRWLRSAELTCDRAALLVAQDPKVVVSVLMKLAGGCPSIADQLNVDAFLEQARSYDKASSSPLGWYIRNAQTSQLSHPLPVLRAREVDEWSRSLEYRSLLKRANRISTLENV

SEQ ID NO: 3760 - DNA, 27 bp, Artificial sequence
  primer
atgaagttaggccgaattttaaaaatg

SEQ ID NO: 3761 - DNA, 25 bp, Artificial sequence
  primer
ttaccaattccgccagccgcccttg

SEQ ID NO: 3762 - protein, 262 aa, Artificial sequence
  consensus sequence
  Variant (2)..(2): Xaa in position 2 is any amino acid
  Variant (5)..(5): Xaa in position 5 is any amino acid
  Variant (7)..(12): Xaa in position 7 to 12 is any amino acid
  Variant (14)..(16): Xaa in position 14 to 16 is any amino acid
  Variant (19)..(31): Xaa in position 19 to 31 is any amino acid
  Variant (33)..(45): Xaa in position 33 to 45 is any amino acid
  Variant (47)..(49): Xaa in position 47 to 49 is any amino acid
  Variant (51)..(53): Xaa in position 51 to 53 is any amino acid
  Variant (55)..(64): Xaa in position 55 to 64 is any amino acid
  Variant (66)..(69): Xaa in position 66 to 69 is any amino acid
  Variant (70)..(70): Xaa in position 70 is any or no amino acid
  Variant (72)..(72): Xaa in position 72 is any amino acid
  Variant (75)..(76): Xaa in position 75 to 76 is any amino acid
  Variant (78)..(78): Xaa in position 78 is any amino acid
  Variant (80)..(81): Xaa in position 80 to 81 is any amino acid
  Variant (85)..(90): Xaa in position 85 to 90 is any amino acid
  Variant (91)..(92): Xaa in position 91 to 92 is any or no amino acid
  Variant (94)..(95): Xaa in position 94 to 95 is any amino acid
  Variant (97)..(98): Xaa in position 97 to 98 is any amino acid
  Variant (100)..(100): Xaa in position 100 is any amino acid
  Variant (102)..(104): Xaa in position 102 to 104 is any amino acid
  Variant (106)..(108): Xaa in position 106 to 108 is any amino acid
  Variant (110)..(112): Xaa in position 110 to 112 is any amino acid
  Variant (114)..(114): Xaa in position 114 is any amino acid
  Variant (121)..(121): Xaa in position 121 is any amino acid
  Variant (124)..(124): Xaa in position 124 is any amino acid
  Variant (126)..(129): Xaa in position 126 to 129 is any amino acid
  Variant (131)..(138): Xaa in position 131 to 138 is any amino acid
  Variant (140)..(145): Xaa in position 140 to 145 is any amino acid
  Variant (146)..(149): Xaa in position 146 to 149 is any or no amino acid
  Variant (151)..(162): Xaa in position 151 to 162 is any amino acid
  Variant (163)..(163): Xaa in position 163 is any or no amino acid
  Variant (165)..(165): Xaa in position 165 is any amino acid
  Variant (167)..(167): Xaa in position 167 is any amino acid
  Variant (170)..(172): Xaa in position 170 to 172 is any amino acid
  Variant (179)..(181): Xaa in position 179 to 181 is any amino acid
  Variant (183)..(190): Xaa in position 183 to 190 is any amino acid
  Variant (197)..(205): Xaa in position 197 to 205 is any amino acid
  Variant (206)..(208): Xaa in position 206 to 208 is any or no amino acid
  Variant (210)..(211): Xaa in position 210 to 211 is any amino acid
  Variant (214)..(215): Xaa in position 214 to 215 is any amino acid
  Variant (217)..(234): Xaa in position 217 to 234 is any amino acid
  Variant (235)..(242): Xaa in position 235 to 242 is any or no amino acid
  Variant (245)..(246): Xaa in position 245 to 246 is any amino acid
  Variant (248)..(248): Xaa in position 248 is any amino acid
  Variant (250)..(255): Xaa in position 250 to 255 is any amino acid
  Variant (257)..(261): Xaa in position 257 to 261 is any amino acid
FXHPXDXXXXXXLXXXPGXXXXXXXXXXXXXEXXXXXXXXXXXXXVXXXQXXXLXXXXXXXXXXLXXXXXPXLYXXQXPXXNAYXXXXXXXXPXXVXXTXLXXXLXXXEXXXVXAHELGHXKCXHXXXXTXXXXXXXXAXXXXXXXXXXGXXXXXXXXXXXXXWXRXAEXXXDRAALLXXXDXXXXXXXXMKLAGGXXXXXXXXXXXXFXXQAXXYXXXXXXXXXXXXXXXXXXXXXXXXXXHPXXVXRXXXXXXWXXXXXY

SEQ ID NO: 3763 - protein, 36 aa, Artificial sequence
  protein pattern
  Variant (2)..(2): Xaa in position 2 is Phe or Tyr
  Variant (3)..(3): Xaa in position 3 is Ile, Met or Val
  Variant (5)..(5): Xaa in position 5 is Phe, Ile, Leu, Met or Val
  Variant (6)..(6): Xaa in position 6 is any amino acid
  Variant (7)..(7): Xaa in position 7 is Ala, Ser or Thr
  Variant (8)..(8): Xaa in position 8 is Ala, Gly or Ser
  Variant (9)..(9): Xaa in position 9 is Ile, Leu or Met
  Variant (10)..(10): Xaa in position 10 is any amino acid
  Variant (11)..(11): Xaa in position 11 is Asp or Glu
  Variant (12)..(12): Xaa in position 12 is Ile, Leu or Met
  Variant (13)..(13): Xaa in position 13 is any amino acid
  Variant (14)..(14): Xaa in position 14 is Asp, Asn, Ser or Thr
  Variant (15)..(16): Xaa in position 15 to 16 is any amino acid
  Variant (18)..(18): Xaa in position 18 is Ile, Leu or Met
  Variant (19)..(19): Xaa in position 19 is Gln or Arg
  Variant (20)..(20): Xaa in position 20 is any amino acid
  Variant (21)..(21): Xaa in position 21 is Gly, Ile or Val
  Variant (22)..(22): Xaa in position 22 is Ile, Leu, Met or Val
  Variant (23)..(23): Xaa in position 23 is Ala or Gly
  Variant (29)..(35): Xaa in position 29 to 35 is any or no amino acid
PXXVXXXXXXXXXXXXEXXXXXXHELGHXXXXXXXL

SEQ ID NO: 3764 - protein, 41 aa, Artificial sequence
  protein pattern
  Variant (2)..(3): Xaa in position 2 to 3 is any amino acid
  Variant (4)..(7): Xaa in position 4 to 7 is any or no amino acid
  Variant (9)..(9): Xaa in position 9 is any amino acid
  Variant (11)..(11): Xaa in position 11 is any or no amino acid
  Variant (14)..(14): Xaa in position 14 is Phe or Leu
  Variant (15)..(15): Xaa in position 15 is Ser or Thr
  Variant (16)..(16): Xaa in position 16 is Ala, Cys or Ser
  Variant (19)..(19): Xaa in position 19 is Ala or Ser
  Variant (21)..(21): Xaa in position 21 is Phe or Leu
  Variant (23)..(23): Xaa in position 23 is Ala or Val
  Variant (24)..(24): Xaa in position 24 is any amino acid
  Variant (25)..(25): Xaa in position 25 is Asp or Gln
  Variant (26)..(26): Xaa in position 26 is Asp or Asn
  Variant (27)..(29): Xaa in position 27 to 29 is any amino acid
  Variant (30)..(30): Xaa in position 30 is Ile, Leu, Met or Val
  Variant (31)..(33): Xaa in position 31 to 33 is any amino acid
  Variant (34)..(34): Xaa in position 34 is Leu or Met
  Variant (37)..(37): Xaa in position 37 is any amino acid
  Variant (38)..(38): Xaa in position 38 is Ala, Cys or Ser
  Variant (40)..(40): Xaa in position 40 is Ala or Gly
  Variant (41)..(41): Xaa in position 41 is Cys, Ser or Thr
LXXXXXXWXRXAEXXXDRXAXLXXXXXXXXXXXXMKXXGXX

SEQ ID NO: 3765 - protein, 35 aa, Artificial sequence
  protein pattern
  Variant (2)..(4): Xaa in position 2 to 4 is any or no amino acid
  Variant (7)..(7): Xaa in position 7 is Ala or Leu
  Variant (9)..(10): Xaa in position 9 to 10 is any amino acid
  Variant (11)..(11): Xaa in position 11 is Ala or Asn
  Variant (12)..(14): Xaa in position 12 to 14 is any amino acid
  Variant (16)..(16): Xaa in position 16 is Lys or Arg
  Variant (17)..(17): Xaa in position 17 is any amino acid
  Variant (18)..(18): Xaa in position 18 is Ile, Leu or Val
  Variant (19)..(19): Xaa in position 19 is any amino acid
  Variant (21)..(21): Xaa in position 21 is Phe, Ile or Leu
  Variant (22)..(23): Xaa in position 22 to 23 is any amino acid
  Variant (24)..(24): Xaa in position 24 is Phe, Ile, Leu, Met or Val
  Variant (25)..(29): Xaa in position 25 to 29 is any amino acid
  Variant (30)..(30): Xaa in position 30 is Glu, Gly or Ser
  Variant (31)..(33): Xaa in position 31 to 33 is any amino acid
  Variant (35)..(35): Xaa in position 35 is Gln or Arg
RXXXHPXDXXXXXXLXXXXGXXXXXXXXXXXXXEX

SEQ ID NO: 3766 - protein, 23 aa, Artificial sequence
  protein pattern
  Variant (2)..(2): Xaa in position 2 is any amino acid
  Variant (3)..(3): Xaa in position 3 is any or no amino acid
  Variant (6)..(6): Xaa in position 6 is Phe, Leu or Val
  Variant (7)..(7): Xaa in position 7 is Pro or Ser
  Variant (9)..(9): Xaa in position 9 is any amino acid
  Variant (11)..(11): Xaa in position 11 is Ala, Leu or Val
  Variant (12)..(13): Xaa in position 12 to 13 is any amino acid
  Variant (14)..(14): Xaa in position 14 is Ile, Leu or Val
  Variant (15)..(16): Xaa in position 15 to 16 is any amino acid
  Variant (18)..(19): Xaa in position 18 to 19 is any amino acid
  Variant (20)..(20): Xaa in position 20 is Ala, Asn, Ser or Thr
  Variant (21)..(22): Xaa in position 21 to 22 is any amino acid
LXXHPXXVXRXXXXXXWXXXXXY

SEQ ID NO: 3767 - protein, 19 aa, Artificial sequence
  protein pattern
  Variant (2)..(2): Xaa in position 2 is Ala, Asp, Glu, Gln, Ser or Thr
  Variant (3)..(3): Xaa in position 3 is Leu, Met or Val
  Variant (4)..(4): Xaa in position 4 is Phe or Tyr
  Variant (5)..(5): Xaa in position 5 is Ile, Leu or Val
  Variant (6)..(6): Xaa in position 6 is any amino acid
  Variant (8)..(8): Xaa in position 8 is any amino acid
  Variant (10)..(10): Xaa in position 10 is any amino acid
  Variant (11)..(11): Xaa in position 11 is Ala, Pro or Val
  Variant (13)..(14): Xaa in position 13 to 14 is any or no amino acid
  Variant (16)..(16): Xaa in position 16 is any amino acid
  Variant (17)..(17): Xaa in position 17 is Gly, Ser or Thr
  Variant (18)..(18): Xaa in position 18 is any amino acid
  Variant (19)..(19): Xaa in position 19 is Ala, Asp, Glu or Gly
PXXXXXQXPXXNXXAXXXX

SEQ ID NO: 3768 - protein, 15 aa, Artificial sequence
  protein pattern
  Variant (2)..(3): Xaa in position 2 to 3 is any or no amino acid
  Variant (5)..(5): Xaa in position 5 is Phe, Ile, Leu, Met or Val
  Variant (6)..(6): Xaa in position 6 is Ala, Asp, Glu or Gln
  Variant (8)..(8): Xaa in position 8 is Ala or Gly
  Variant (9)..(9): Xaa in position 9 is any amino acid
  Variant (10)..(10): Xaa in position 10 is Ala, Asp, Glu, Gln, Ser or Thr
  Variant (12)..(12): Xaa in position 12 is Asp, Glu or Asn
  Variant (13)..(14): Xaa in position 13 to 14 is any amino acid
  Variant (15)..(15): Xaa in position 15 is Ala, Asp, Glu, Gly or Ser
AXXFXXQXXXYXXXX

SEQ ID NO: 3769 - DNA, 813 bp, Arabidopsis thaliana
  CDS (1)..(813)
atggcgttagcgaataacttaacggcgatactcaacttactagcgttactctgttccataccaataacggcgtcaggtatatggctagcttcaaagccagacaacgagtgtgtcaatctcctccgttggcccgttgtcgtcctcggcgttctcatcctcgtcgtctccgccacaggcttcatcggcgcctacaagtacaaggaaactctactggcggtttacttgtgctgtatggcgatattgatcggacttttgctggtggttcttatatttgcattcgtcgtgacccggcccgatggatcgtatcgggttccgggtagaggttataaagagtataggcttgaagggttctcgaattggcttaaggagaacgttgtggattccaagaactggggaaggctaagggcttgtttggctgatactaatgtttgtcctaaactcaaccaagaattcatcaccgccgatcagttcttctcctcctctaagatcactcctctccagtccggctgctgcaaaccaccaaccgcatgtggctacaactttgtgaacccaacactgtggctaaatccaaccaatatggctgcagacgcagactgttacttatggagcaatgaccaaagccagctttgttacaattgcaactcatgcaaagctggtttattgggaaaccttagaaaagaatggcgtaaagcaaatctcatacttatcatcacagtcgttgttctcatatgggtttatgttattgcttgtagcgcgtttaggaatgctcagactgaggatctcttccgcaaatacaaacaaggttgggtctaa

SEQ ID NO: 3770 - protein, 270 aa, Arabidopsis thaliana
MALANNLTAILNLLALLCSIPITASGIWLASKPDNECVNLLRWPVVVLGVLILVVSATGFIGAYKYKETLLAVYLCCMAILIGLLLVVLIFAFVVTRPDGSYRVPGRGYKEYRLEGFSNWLKENVVDSKNWGRLRACLADTNVCPKLNQEFITADQFFSSSKITPLQSGCCKPPTACGYNFVNPTLWLNPTNMAADADCYLWSNDQSQLCYNCNSCKAGLLGNLRKEWRKANLILIITVVVLIWVYVIACSAFRNAQTEDLFRKYKQGWV

SEQ ID NO: 3771 - DNA, 1245 bp, Triticum aestivum
  CDS (50)..(934)
cccacgcgtccgcccacgcgtccggaggaggaggaggaagagcaagaagatgcacggcggcgggtcgaagatgctgggggtggtgaacttcatcaccttcctggcgtcgatcccggtgctggggggcggcatctggctggcgtcccgggccaactccaccgactgcatccgctttctgcagtggcccatcatcatcatcggcctcgccgtcatggtcgtctccctcatgggcttcgccggcgcctgctaccgccagacctggctgctccgcatctacctcttcgccatgttcttcatcgacgtcgcgctgctcttcttcatcgacttcgccttcgccgacaccgaccgcggggagggccaggtggtcatgaaccgacgcttgctcgagtaccagctctacaactacaacggatggctacgaaaccgtatgggcgacccggagtgctgggacaccatgaacgcatgcctacagaacggacgcgcgtgcgcctccatgcggcgccccgcccgcgaccccaacaccggcatgctcgtcaccgagccccccgtcatgttctacggccgcaacctctccccgattcagtccggatgctgcaagccaccgacatcgtgcgccttcacctacaacaacgagacgtactggagcgcgaaccccggcgtccccaccgtggtgaccgaccccgactgcctcaaatggagcaacgaccagcagacgttgtgctttcagtgcgactcgtgcaaggccggcgtcctggccggcatcaagaagagctggcgcaaggtggccatcatcaacatcgttgtgctcatcatcctcatcatcgtctacgtcgctggctgcgccgcgttccgcaacgccaagagggacgacaacgacgagtcgtacggcatggccaggatgaccaagtcccggccgagcaggttccagttctagacctcaggcgaaaaaccgggaaaacctttgactgtacaaaaggccactcactgtgggtggtggtgttaagactttggcctgaactatatttcttgctgaactgtgtggatgatgatgatgatcaccctgtagtgggtggtgtggaagggaaggtgttcttggaccgaatgtttggtgtggtgtttgggttctgtggtgtttagggtaggtctattctgtatttggtggtacaagatgaggtctgcaaggaacaggaggggctgtctcattttaggattgtattattctgcacttagtgattttgatttgtt

SEQ ID NO: 3772 - protein, 294 aa, Triticum aestivum
MHGGGSKMLGVVNFITFLASIPVLGGGIWLASRANSTDCIRFLQWPIIIIGLAVMVVSLMGFAGACYRQTWLLRIYLFAMFFIDVALLFFIDFAFADTDRGEGQVVMNRRLLEYQLYNYNGWLRNRMGDPECWDTMNACLQNGRACASMRRPARDPNTGMLVTEPPVMFYGRNLSPIQSGCCKPPTSCAFTYNNETYWSANPGVPTVVTDPDCLKWSNDQQTLCFQCDSCKAGVLAGIKKSWRKVAIINIVVLIILIIVYVAGCAAFRNAKRDDNDESYGMARMTKSRPSRFQF

SEQ ID NO: 3773 - DNA, 1074 bp, Arabidopsis thaliana
  CDS (131)..(943)
atctctaaccaccgacctcataagtcataagacaaaaacagagacactcctctcactctcattatttcattttctttccataaaaagcacgaatcttcaagaacaaagagagagggagagagaaaatttaatggcgttagcgaataacttaacggcgatactcaacttactagcgttactctgttccataccaataacggcgtcaggtatatggctagcttcaaagccagacaacgagtgtgtcaatctcctccgttggcccgttgtcgtcctcggcgttctcatcctcgtcgtctccgccacaggcttcatcggcgcctacaagtacaaggaaactctactggcggtttacttgtgctgtatggcgatattgatcggacttttgctggtggttttgatatttgctttcgttgtgacccgacccgacggatcgtatcgggttccgggtagaggttataaagaatataagcttgaagggttttcgaattggcttaaggagaacgttgttgattcgaagaactggggaaggctaagggcttgtttggctgatactaatgtttgtcctaaactcaaccaagaattcatcaccgccgatcagttcttctcctcctctaagatcactcctctccagtccggctgctgcaaaccaccgaccgcatgtggctacaactttgtgaacccaacactgtggctaaatccgacgaatatggctgcagacgcagactgttacttatggagcaatgaccaaagccagctttgttacaattgcaactcatgcaaagctggtttattgggaaaccttagaaaagaatggcgtaaagcaaatctcatacttatcatcacagtcgttgttctcatatgggtttatgttattgcttgtagcgcgtttaggaatgctcagactgaggatctcttccgcaaatacaaacaaggttgggtctaaaatgtgtgtttgtgtctataaatttgtttgtagtttgttgagattggagttttcggaaatagctcgtcatattatgatttctttgtgtgtggaaaaggtttttttctttttatggattttgtttctatgtt

SEQ ID NO: 3774 - protein, 270 aa, Arabidopsis thaliana
MALANNLTAILNLLALLCSIPITASGIWLASKPDNECVNLLRWPVVVLGVLILVVSATGFIGAYKYKETLLAVYLCCMAILIGLLLVVLIFAFVVTRPDGSYRVPGRGYKEYKLEGFSNWLKENVVDSKNWGRLRACLADTNVCPKLNQEFITADQFFSSSKITPLQSGCCKPPTACGYNFVNPTLWLNPTNMAADADCYLWSNDQSQLCYNCNSCKAGLLGNLRKEWRKANLILIITVVVLIWVYVIACSAFRNAQTEDLFRKYKQGWV

SEQ ID NO: 3775 - DNA, 1196 bp, Triticum aestivum
  CDS (139)..(951)
atcacacaattcccagatcacaccgtgcgccacgcccccttccccaaaaacctttcgaaaaccgccgcgccaaccgccacccagccccgtccaagaaaccgcacgccaccgcggacgcgaccccccgccggcgccaagatggtgcggctaagcaacacggtgatcgggatcctgaacgcggtgaccttcctgctctcggtgcccatcctggcgggcggcatctggctgcgggcgcgcgccgacggcaccgagtgcgagcgctacctggcggcgccggtgatcgcggtgggggtgttcctcatgctcgtctccatcgcggggctcgtcggcgcctgctgccgcgtcacctgcctcctctggttctacctcgtcgccatgttcctgctcatcgtcgtcctcctcggcctcaccgtcttcgccttcgtcgtcacgcacaagggcaccggggaggccgtctccggccgcggattcaaggagtacaggctcggggactactccaactggctgcagaagcgggtggagaacgacaagaactggaacaggatcaagggctgcctccaggacgccaaggtctgcaagtcgctcgaggacaagacggtcgaccagttcatgtcctccgatctctcccccatccagtccggctgctgcaagcctccgatcagctgcggcttcacctacgtcaacagcacgcaatggaccggccccgccaagtcgacggagcccgactgcggcgcgtggtccaacgacggggcgctctgctacggctgccagtcgtgcaaggccggcgtggtggccaccctcaagcgcaattggaagcgctccgccatcatcaacatcgtcttcctcgtcttcatcatcattgtctactccgtcggctgctgcgccttcaggaacaaccgccgcgaccaccgcaacggcggcgggtacaagcagcagggcgcgtacgcctgatcgtttggctcggttatttattgcttggattggatggatgcgatcgtcgtgtcattttcattcatcgtcgtgcttctcttaggatggcctgatctagctttgtacaggcgagattattctgtgctctgatcatctactagttaggttctatactccgtggtcatgaggagggttgtgtatatatcttttctgttctttgatatgtatggcagaccattatatatgtaacagattattctggagtc

SEQ ID NO: 3776 - protein, 270 aa, Triticum aestivum
MVRLSNTVIGILNAVTFLLSVPILAGGIWLRARADGTECERYLAAPVIAVGVFLMLVSIAGLVGACCRVTCLLWFYLVAMFLLIVVLLGLTVFAFVVTHKGTGEAVSGRGFKEYRLGDYSNWLQKRVENDKNWNRIKGCLQDAKVCKSLEDKTVDQFMSSDLSPIQSGCCKPPISCGFTYVNSTQWTGPAKSTEPDCGAWSNDGALCYGCQSCKAGVVATLKRNWKRSAIINIVFLVFIIIVYSVGCCAFRNNRRDHRNGGGYKQQGAYA

SEQ ID NO: 3777 - DNA, 1222 bp, Triticum aestivum
  CDS (136)..(939)
atacttttcagagttgtggcatcgaacacattgtggaaggccttacaccgcagacgccccgcgccgcgtcaagaacacagaggacaaagcacggtctgggagagccagagcaacagcagcggcgaggctccagccatggcggtgagcaacaacatcacggcgtgcgtgacactgatggcgctcatctgcgcggtccccgtcatcgcctcgggggtgtggttcgcgtcggcgcagggggaggagtgcgcgcggctggcgcgctggcccgtggccatcctgggtggcctcatcctgctggcggcgctggcgggcttcgtcggcgcctactggaaccgccgccgcctcctcgccttctacctcttcgccatggcggcgctcatcgccctcctcatcgcgctcctcgtcttcgccttcgcggtcacccgcggctccggcgcctacccggtgctcggccgcgagtacgacgagtaccgcctcgacggcttctccatgtggctgcgcgggtacgtcgaccccgcccggtgggaggggatcaggtcctgcctcgccgtctctgacacctgcaagaagctcgcccgacaggccggctacgtcactgccgaccagttctaccagtcccgcctcacgccgctccagtcgggctgctgcaagcccctgtcggtgtgcgggttcgggtacgtgagcccgacggtgtggacaaacccggcgcggcccgcgtcggacccggactgcggcctgtggagcaacgacccggcgcagctgtgctacgagtgcgagtcgtgccgcgcgggcctcctggcggcgctgcggagccagtggcacaaggccaacatcgcgctcgtcgtcgccaccgtctcgctcgtcttcctctacctcatcggctgcagtgcctacaagaacgcgcacgccgaggccatctaccaccgctacaagtggtgattcccatttcccatcccatcccatcactgagaaccaaccgccatcgccagtttgcccatgtaatagactagtatgtttgcttcatactgtactgtattattattagtagcttggtaactggtagtaagctagtaggggaagatgggaacttcagattcatggtttgcccatgcatgtatcgtgaagaattttagcgagatgcatgcgctcttggtgttgatgtgaatgttgtttgtaatatgcagtagagatgttcttcagatttatggttaagaattttagt

SEQ ID NO: 3778 - protein, 267 aa, Triticum aestivum
MAVSNNITACVTLMALICAVPVIASGVWFASAQGEECARLARWPVAILGGLILLAALAGFVGAYWNRRRLLAFYLFAMAALIALLIALLVFAFAVTRGSGAYPVLGREYDEYRLDGFSMWLRGYVDPARWEGIRSCLAVSDTCKKLARQAGYVTADQFYQSRLTPLQSGCCKPLSVCGFGYVSPTVWTNPARPASDPDCGLWSNDPAQLCYECESCRAGLLAALRSQWHKANIALVVATVSLVFLYLIGCSAYKNAHAEAIYHRYKW

SEQ ID NO: 3779 - DNA, 1222 bp, Triticum aestivum; identical to SEQ ID NO: 3777
  CDS (175)..(939)

SEQ ID NO: 3780 - protein, 254 aa, Triticum aestivum
MALICAVPVIASGVWFASAQGEECARLARWPVAILGGLILLAALAGFVGAYWNRRRLLAFYLFAMAALIALLIALLVFAFAVTRGSGAYPVLGREYDEYRLDGFSMWLRGYVDPARWEGIRSCLAVSDTCKKLARQAGYVTADQFYQSRLTPLQSGCCKPLSVCGFGYVSPTVWTNPARPASDPDCGLWSNDPAQLCYECESCRAGLLAALRSQWHKANIALVVATVSLVFLYLIGCSAYKNAHAEAIYHRYKW

SEQ ID NO: 3781 - DNA, 738 bp, Arabidopsis thaliana
  CDS (1)..(738)
atggcgttagcgaataacttaacggcgatactcaacttactagcgttactctgttccataccaataacggcgtcaggtatatggctagcttcaaagccagacaacgagtgtgtcaatctcctccgttggcccgttgtcgtcctcggcgttctcatcctcgtcgtctccgccacaggcttcatcggcgcctacaagtacaaggaaactctactggcggtttacttgtgctgtatggcgatattgatcggacttttgctggtggttcttatatttgcattcgtcgtgacccggcccgatggatcgtatcgggttccgggtagaggttataaagagtataggcttgaagggttctcgaattggcttaaggagaacgttgtggattccaagaactggggaaggctaagggcttgtttggctgatactaattccggctgctgcaaaccaccaaccgcatgtggctacaactttgtgaacccaacactgtggctaaatccaaccaatatggctgcagacgcagactgttacttatggagcaatgaccaaagccagctttgttacaattgcaactcatgcaaagctggtttattgggaaaccttagaaaagaatggcgtaaagcaaatctcatacttatcatcacagtcgttgttctcatatgggtttatgttattgcttgtagcgcgtttaggaatgctcagactgaggatctcttccgcaaatacaaacaaggttgggtctaa

SEQ ID NO: 3782 - protein, 245 aa, Arabidopsis thaliana
MALANNLTAILNLLALLCSIPITASGIWLASKPDNECVNLLRWPVVVLGVLILVVSATGFIGAYKYKETLLAVYLCCMAILIGLLLVVLIFAFVVTRPDGSYRVPGRGYKEYRLEGFSNWLKENVVDSKNWGRLRACLADTNSGCCKPPTACGYNFVNPTLWLNPTNMAADADCYLWSNDQSQLCYNCNSCKAGLLGNLRKEWRKANLILIITVVVLIWVYVIACSAFRNAQTEDLFRKYKQGWV

SEQ ID NO: 3783 - DNA, 938 bp, Glycine max
  CDS (58)..(867)
ttttggtttttcataaaaaactagcagccctttctaagaaacaaagcagtgctaaagatggcaatgagcaacaatgtgatcggatgcataaacttcgtggcggtgatcctctcaatcccaatcatcggcgccggaatctggcttttaaacggggaagccgattcctgcgtccagttcctgcaatggcccgtcatcatcctcggagtcctcatcctcgtcgtggccctcgcaggtttcatcggagccttcttcagagtctcgtggctcctcatcgtctacctcgttgccatgctcgtcctcgtcatactcttagtgtctttggtcgcttttgtttacatggttactcttcggggacacggcaacattgagcccaaccgcgcttacttggagtaccgcatggatgacttttctggctaccttcgtcgtagggttagaagctcgttcaagtgggaccgcatcagaagctgtcttagccaaaccaacatgtgtgctgagcttaaccagggttatcgaatggctcaggacttcttcaacgcgcgtctaacgcccatgcagtcagggtgctgcaagccaccaacgcaatgtgcgtacacgtttgtgaatccaacctattggattagtcccatcaacacagcagcggatatggattgcctgcaatggagcaacgaccaaacacaactttgctacaactgcgactcgtgcaaggccggtttattggcaaatcttaggaaggagtggagaagggccaatgtgatattaatcatcacagtcattgttttaataattgtgtatttggtagggtgctgtgcctttaggaatgtcaaaactgaggacctcttccgcaaatacaaacaaggctacacttgaaaagctttaggttcaatgtgtgtgtgtgtgtgtttttttttttatataaatgttagtttttttttattagt

SEQ ID NO: 3784 - protein, 269 aa, Glycine max
MAMSNNVIGCINFVAVILSIPIIGAGIWLLNGEADSCVQFLQWPVIILGVLILVVALAGFIGAFFRVSWLLIVYLVAMLVLVILLVSLVAFVYMVTLRGHGNIEPNRAYLEYRMDDFSGYLRRRVRSSFKWDRIRSCLSQTNMCAELNQGYRMAQDFFNARLTPMQSGCCKPPTQCAYTFVNPTYWISPINTAADMDCLQWSNDQTQLCYNCDSCKAGLLANLRKEWRRANVILIITVIVLIIVYLVGCCAFRNVKTEDLFRKYKQGYT

SEQ ID NO: 3785 - DNA, 1213 bp, Sorghum bicolor
  CDS (76)..(885)
aagactcagcagcagccaccccaccaccagagcacacagccgccaccaccaccaccgcgcgccgtcgtcggcgccatggcggtgagcaacaacatcacggcgtgcgtgacgctgctggcgctaatctgcgcggtgcccgtgatcgcgtcggggatctggttcgcgtcggcgcagggcgaggagtgcgcgcgcctggcgcggtggcccgtggcgatcctgggcggcctgctcctcctggcggcgctggcgggcttcgtcggcgcgtactggaaccggcggcgcctgctggcgttctacctcttcgcgatggcgtcgctcgtcgtgctgctcatcgcgctgctcgtcttcgccttcgccgtcacccggggatccggcgcgtacccggtgctcggccgcgcctacgacgactaccacctcgacggcttctccatgtggctcagaggctacgtctccgatgaccctggacggtgggagaagatcagggcctgcctcgctgtctctgatacctgcaagaagctcgccagacaggctgcgttcaccaacgccgagcagttctatcagtcccacctctccccgttacagtctggttgctgcaagccgccgtcggtgtgcgggttcagctacgtgagcccgacggtgtggacggcggccccgcggccgccggcggacccgctctgcgggctgcggcgcttccccccggggcagctgtgttacgagtgcgagtcctgcaaggcgggtctcctggagacgctccgggaccagtggcacaaggccaacatcgcgctcgtcgtcgccaccgtcgccctcgtcatcctctacctcgtcggctgcagcgcctacaagaacgcgcaggcagccgccatcttcagccgctacaagtactagtaattaattaagctgctgccgtctgcatgccgatgatccatgtggttaagggtttttacggttttttgtcatgtatttggattgttgattgtggatttgtgtgtgtgtgtgttatggtgaagcgtatgcatttgtagcggcggtggtgctggtgtgtttgcagacttggttcatcatggtagtggtagatgtgtaaggtagaggagatgtgtaagattaggtaatggtgtttttcctatttgccgacgagtaatgtatcttatctgatatctgaagttctgaacaagtggccagcaagtgagatgtactgctgctggatcaaggctga

SEQ ID NO: 3786 - protein, 269 aa, Sorghum bicolor
MAVSNNITACVTLLALICAVPVIASGIWFASAQGEECARLARWPVAILGGLLLLAALAGFVGAYWNRRRLLAFYLFAMASLVVLLIALLVFAFAVTRGSGAYPVLGRAYDDYHLDGFSMWLRGYVSDDPGRWEKIRACLAVSDTCKKLARQAAFTNAEQFYQSHLSPLQSGCCKPPSVCGFSYVSPTVWTAAPRPPADPLCGLRRFPPGQLCYECESCKAGLLETLRDQWHKANIALVVATVALVILYLVGCSAYKNAQAAAIFSRYKY

SEQ ID NO: 3787 - DNA, 1337 bp, Sorghum bicolor
  CDS (209)..(1024)
acccggtccagcccgatcaggccccaccgtctccggcgcccccccgccgaccccgcggtccgctccgggggccgggatccgcccccaatccaccaaccgcaccgtgtccagcagccccctcaaaacccaccaaaacccacggtgctttcaggcagcgacgaaccggcggcgacccccacccgtccacccgccgccactccgtccagcgatggcgttccggctgagcaacaacctgatcgggatcctaaacttcatcaccttcctgctctcgatcccgatcctgggcgcggggatctggctgggccagcgcgcggacggcaccgagtgcgagcggtacctctccgctccggtcatcgcggtcggggtgttcctcctcgtggtctcgctcgcggggctcgtcggcgcctgctgccgcgtcacctggctgctctgggtctacctcctcgccatgttcgtcctcatcctcgtcctcttctgcttcaccgtcttcgccttcgtcgtcaccaataagggcgccggggaggccgtctccgggagagggtacaaggagtacaggcttggggattactccaactggctgcagaaaagggtcgagaacaccaagaactgggacaagatcaggagctgccttgaggattctaaggtctgtaagaaactgcaggacaagaacgagaccttcacgcagttcatatcttccgacctctcccccatcgagtctggctgctgcaagccccccaccatctgcggctacacctacgtcagcggcaccaactggacgacgcccgccaacgcgacggcggacccggactgccagacctggagcaactcggcgctctgctacaactgccagtcgtgcaaggccggcgtggtggccacggtgaagcgggactggaagcgcgtcgccatcgtctgcatcgtcttcctcgtcttcatcatcatcgtctactccgtcggctgctgcgccttcaggaacaaccgcagggacaacgcctaccgcggcggctggaagggcggatacgcctgatccaatccaccatcgtttggggttggagcagagctggggctcgatcggccgcgccgccctgtcaccatgcacgctcgctcagtgctctgctccctgtctcgtcgtggtcactgccgtagtacatgtttagtaggctcgtcgatgtagctctgtacaggtgatggagattattgttaccgccgactcttatcgtcttcttagttacattattatcctattatgatcagatcagctgtaggttttgtatacgctgttcattgattcgtcagactgctatttttcatatatatatatatggatgcctttattttcc

SEQ ID NO: 3788 - protein, 271 aa, Sorghum bicolor
MAFRLSNNLIGILNFITFLLSIPILGAGIWLGQRADGTECERYLSAPVIAVGVFLLVVSLAGLVGACCRVTWLLWVYLLAMFVLILVLFCFTVFAFVVTNKGAGEAVSGRGYKEYRLGDYSNWLQKRVENTKNWDKIRSCLEDSKVCKKLQDKNETFTQFISSDLSPIESGCCKPPTICGYTYVSGTNWTTPANATADPDCQTWSNSALCYNCQSCKAGVVATVKRDWKRVAIVCIVFLVFIIIVYSVGCCAFRNNRRDNAYRGGWKGGYA

SEQ ID NO: 3789 - DNA, 925 bp, Glycine max
  CDS (3)..(854)
ttttggtttttcatgaacaactagcaaccaccctttttgttaagatggcaatgagcaacaatgtgatcggatgcataaacttcgtggccgtgatcctctcaatcccgatcatcggcgccggaatctggctaacaaacggggatgccgattcatgcgtccagttcctgcaatggcccgtcatcatcctcggagtcctcatcctcgtcgtggcccttgcaggtttcatcggagccttcttcagagtctcgtggctcctcatcgtttacctcgttgccatgctcgtcctcgtcatactcttagtgtctttggtcgcttttgtttacatggtcacgcttcggggacacggcaacatcgaacctaaccgcgcttacttggagtaccgcatggatgatttttctggctaccttcgtcgtagggttagaagctcgttcaagtgggaccgcatcagaagctgtcttagccaaaccaacatgtgcgctgagcttaaccagagttatagaatggctcaggacttcttcaacgctcgtctaacgcccatgcagtcagggtgctgcaagccaccaacgcaatgtgcgtacacgtttgtgaatccaacctattggattagccccatcaacactgcagcagatatggattgcctgcaatggagcaacgaccaaacacaactttgctacaactgcgactcgtgcaaggccggtttattggcaaatcttaggaaggagtggagaagggccaatgtgatattaatcatcacagtcattgttttaataattgtgtatttggtagggtgctgtgcctttaggaatgtcaaaactgaggacctcttccgcaaatacaaacaaggctacacttgaaaagctttaggttcaatgtgtgtgtgtgtgtgtttttttttttatataaatgttagtttttttttattagt

SEQ ID NO: 3790 - protein, 283 aa, Glycine max
LVFHEQLATTLFVKMAMSNNVIGCINFVAVILSIPIIGAGIWLTNGDADSCVQFLQWPVIILGVLILVVALAGFIGAFFRVSWLLIVYLVAMLVLVILLVSLVAFVYMVTLRGHGNIEPNRAYLEYRMDDFSGYLRRRVRSSFKWDRIRSCLSQTNMCAELNQSYRMAQDFFNARLTPMQSGCCKPPTQCAYTFVNPTYWISPINTAADMDCLQWSNDQTQLCYNCDSCKAGLLANLRKEWRRANVILIITVIVLIIVYLVGCCAFRNVKTEDLFRKYKQGYT

SEQ ID NO: 3791 - DNA, 1151 bp, Zea mays
  CDS (52)..(909)
cacgaccacgctagcacgcactctccgtctctccccttccggttccagtagctgcatccgctgcgccaagtcccaataatcccgcagcccggcggcatggcggtgagcaacaacatcacggcatgcatcaacttcctggtgcttctctgcaccatccccatcgccgcgacggggctgtggctggcctcgaggcacggcagcgaggactgcgccaggctggcccgctggcccgtcgccgtgctgggcgcgctcctcctgctggtcgcgctggcgggtttcgcgggcgcctactggaaccgcaggggcctgctcgcctgctacctcttcgcgatggccgccctcatcacgttcctcctcgccttcctcgtcttcgccttcgccgtcgcgcacgactccggcgcctacccggctcccggcagggcctaccaggactaccgcctccagggctactcctcgtggctgcgggggtacgtcgccgacgacccccgcaggtgggagggggtccgggcctgcgtcgccgcctccggcacctgcaggaagctcgccatggatagatcattcatcgtgccggagcagttctacatgtcgcacctctcgcccatcgagtccgggtgctgcaagccaccgacggtgtgcgggtacgcgtacgcgagcccgacggcgtggacgggcccggcggcggacgcggactgcgcggcgtggagcaacgaccccggccagctctgctacgcctgcgcctcctgcaaggccggcgtgctgggcggcctgcgcgagcagtggcgcagggccaccgtcccgctgctcgtcgccaccgtcgcgctcatcttcgtctacgtcgtcggctgcagcgcgttccgcaacgcgcagaccgaagacctcttccgccgctacaaatggggaaattattaacgatctctcccactgatctactgcgtacatacgtacacgccgatttggatcgggtgagttgcgctttctgtttccggccgtcttttttttaatattttgcgaaatcgatctgtttctggtgctcttggcacagtggttagtgctgtagaatgtggacaacagctagaatgctagatgttaattctataggagcttacttatgtatctattctatctctatctgcgatatctgaagcttcggt

SEQ ID NO: 3792 - protein, 285 aa, Zea mays
LHPLRQVPIIPQPGGMAVSNNITACINFLVLLCTIPIAATGLWLASRHGSEDCARLARWPVAVLGALLLLVALAGFAGAYWNRRGLLACYLFAMAALITFLLAFLVFAFAVAHDSGAYPAPGRAYQDYRLQGYSSWLRGYVADDPRRWEGVRACVAASGTCRKLAMDRSFIVPEQFYMSHLSPIESGCCKPPTVCGYAYASPTAWTGPAADADCAAWSNDPGQLCYACASCKAGVLGGLREQWRRATVPLLVATVALIFVYVVGCSAFRNAQTEDLFRRYKWGNY

SEQ ID NO: 3793 - DNA, 1216 bp, Oryza sativa
  CDS (103)..(933)
acaaaccacgcaggaaacctcagaaaatcaccgtacgcgacgcgggcccaagaaaaccccgacagaaaccgcgcagcagcaacaccaccaccggcgtcggagatggcgttccggctgagcaacagcctgctcgggatcctgaacgcggtgacgttcctcctgtcggtgcccgtgctgggcggcggcatctggctggcgacgcgcgccgacggcacggagtgcgagcgctacttctcggcgccggtgatcgcgttcggggtgttcctcctcctcgtctccctcgcgggcctcgtcggcgcctgctgccgcgtcaactgcctcctctggttctacctcgtcgccatgttcgtcctcatcgtcgtcctcttctgcttcatcgtcttcgccttcgtcgtcaccaacaagggcgccggcgaggccgtctccggcagagggtacaaggagtacaggctcggcgactactccaactggctgcagaagcggatggagaacagcaagaactggaacaggatcaggagctgcctccaggactccaaggtctgcaagaaactgcaggacaagaactgggatcggacccagttcttcaaagccgacctctccccgctcgagtccggatgctgcaagccacccagcagctgcaacttcctctacgtcagcggcacgaactggacgaaggtgcccaccaactcgtcggacccggactgcaacacgtgggtcgacgacggcacgcagctgtgctacaactgccagtcgtgcaaggccggcgcggtggcgaccctgaagcgggactggaagcgcgtcgccgtcgtctgcatcgtcttcctcgtcttcatcgtcatcgtctactccctcggctgctgcgcgttcaggaacaaccggagggacaaccgcggcgcctatcgcggtgccgcgtggaagggcggatacgcctgatttcattcgatcgatcgatcgatttgcacggcgtaattgattggcatgttcatgcgatcatgtcagatatctgttcataggcttagctctgatattctagccctgtacaggcgagattattctgggttctgatcatctgcttgttactctttgatcaggagtagtaggtttctgtatgcagttctttgatgcaacttagttgcaccctacatcatatttgtactcgatcggatttatttcatatatgtaatatagtattcctttttatttgtttttcagtacc

SEQ ID NO: 3794 - protein, 276 aa, Oryza sativa
MAFRLSNSLLGILNAVTFLLSVPVLGGGIWLATRADGTECERYFSAPVIAFGVFLLLVSLAGLVGACCRVNCLLWFYLVAMFVLIVVLFCFIVFAFVVTNKGAGEAVSGRGYKEYRLGDYSNWLQKRMENSKNWNRIRSCLQDSKVCKKLQDKNWDRTQFFKADLSPLESGCCKPPSSCNFLYVSGTNWTKVPTNSSDPDCNTWVDDGTQLCYNCQSCKAGAVATLKRDWKRVAVVCIVFLVFIVIVYSLGCCAFRNNRRDNRGAYRGAAWKGGYA

SEQ ID NO: 3795 - DNA, 1414 bp, Glycine max
  CDS (234)..(1046)
ccacgcgtccgctccaacgacgaaatcgcgtgtaccgtggcgtgtgcattaatatctgaaaatattgtcaatagttaccgactaacaagtcacaacaaacatcacgcgcatatgtatatactagaaacaaacaaacaatcattctccctaactatttctctaccttcattcatatcatacatataacaatcattcttcttcttctgcaaatacttatccctcattgattcatcatggttcggttcagcaacaatgttatcggactccttaacttcctcaccttcctcttgtccatcccgatcctggtggccggagtgtggctgagcaagcaaggcgccaccgagtgcgagcggtggctggagaagcccgtcatcgcgctcggcgtcttcctcatgctcgtctcactcgccggcctcgtcggcgcgtgctgccgcgtgtcgtggctcctctggctctacctcctcgtcatgtttgtcctcatcgttcttctcttcgccttcaccattttcgctttcgtcgttaccaacaagggcgctggtgaagttgtttctaatagagggtataaagagtataggcttggggattactcgaattggctgcagaagaaggttaataacactaagacgtggaacaggatcagtagttgcttgcattctgggaaagtctgcactgagtttcaatccaagtttctaaacgacaccgttactcagttttacaccgagcacctgtccgcgcttcagtctggatgctgtaaacctgcagaagaatgcctatttacctatgagaattcaacgagctggacgaagcctggaaatgtgaccagttacaacaatcctgactgtgatgcttggaataacaatcaaacagttctgtgcttcaattgccaatcatgcaaggctggctttctgcaaaacttcaagactgaatggaagagggtggctgttgttaacatcgtattccttgttcttctcattattgtatactccatagggtgctgtgcattcaggaacaataggagggaaaattggaagggatattctcgttagctagattactcagtattactagtgagtagatcagtttgctagacaatctggtttatatgttggatttatttttttgggctttatgtgtatgctggattatactgttttcagtacagtctgttatggaaattgctcaattttatatagtagtttcctagtatcatctatacgtagatattacttctggacacactgcatttccttctgtttcaacatctaatatcagtattgtccagtgctgaataaccaccctctacgtcattatggtctaaaataattttatttttaggtccattaatttgtactgcatgcgaattttattttttaagtatttttaattaatgaaggttttcttttctttctttaat

SEQ ID NO: 3796 - protein, 270 aa, Glycine max
MVRFSNNVIGLLNFLTFLLSIPILVAGVWLSKQGATECERWLEKPVIALGVFLMLVSLAGLVGACCRVSWLLWLYLLVMFVLIVLLFAFTIFAFVVTNKGAGEVVSNRGYKEYRLGDYSNWLQKKVNNTKTWNRISSCLHSGKVCTEFQSKFLNDTVTQFYTEHLSALQSGCCKPAEECLFTYENSTSWTKPGNVTSYNNPDCDAWNNNQTVLCFNCQSCKAGFLQNFKTEWKRVAVVNIVFLVLLIIVYSIGCCAFRNNRRENWKGYSR

SEQ ID NO: 3797 - DNA, 825 bp, Glycine max
  CDS (1)..(825)
atgttccgcataagcaacactgtggtcggagccctcaacgtgctatcccttctgctgggcatcgccgccgtgggctcctccgcatacatccacgtccgcggcggctccgactgccagaaggtgctgcaggtgccgctcctcgtgggtggaatcttcgtggtgctggtctcggccttgggaatcgtggggtcgctgtgccgcgtgaacggggcgctctacgcgtacctgttggtgacgttcatggtgatcgtggggctggcgttcttcaccgtgttcgcgctcttcgttaccaacaggaaggtgggccagcgggtttccggcaagggctacggcgagtacagggtcgccgatttctctcactggctgcagcgctacgtggttaacaacaagaactgggacgaggtcaagagttgcttgatggacgcccacgtctgccagaacctcgccctcaacggtggccgcaacaacgactctctcattttcaaacacttttctaccacccaggctgggtgctgtaagccaccagtgtattgtggattcataatgaagaatgctacgttctgggaagtgccaaagaagggtccagcagcgaataataatactgattgcagcacttggaacaatagtaaggagaaactgtgctacgattgcaattcatgcaaaggaggagtgctggccaacataaggaaccagtggaggcgtctcaccgtattcaacgcatgtgtgcttgtgctcgtcaccgccatttacgccttgggctgctacgccatcaaaaacaacagatccgattcccactgcaaccaccgcaaaccacccatcccttga

SEQ ID NO: 3798 - protein, 274 aa, Glycine max
MFRISNTVVGALNVLSLLLGIAAVGSSAYIHVRGGSDCQKVLQVPLLVGGIFVVLVSALGIVGSLCRVNGALYAYLLVTFMVIVGLAFFTVFALFVTNRKVGQRVSGKGYGEYRVADFSHWLQRYVVNNKNWDEVKSCLMDAHVCQNLALNGGRNNDSLIFKHFSTTQAGCCKPPVYCGFIMKNATFWEVPKKGPAANNNTDCSTWNNSKEKLCYDCNSCKGGVLANIRNQWRRLTVFNACVLVLVTAIYALGCYAIKNNRSDSHCNHRKPPIP

SEQ ID NO: 3799 - DNA, 810 bp, Glycine max
  CDS (1)..(810)
atggcaatgagcaacaatgtgatcggatgcataaacttcgtggcggtgatcctctcaatcccaatcatcggcgccggaatctggcttttaaacggggaagccgattcctgcgtccagttcctgcaatggcccgtcatcatcctcggagtcctcatcctcgtcgtggccctcgcaggtttcatcggagccttcttcagagtctcgtggctcctcatcgtctacctcgttgccatgctcgtcctcgtcatactcttagtgtctttggtcgcttttgtttacatggttactcttcggggacacggcaacattgagcccaaccgcgcttacttggagtaccgcatggatgacttttctggctaccttcgtcgtagggttagaagctcgttcaagtgggaccgcatcagaagctgtcttagccaaaccaacatgtgtgctgagcttaaccagggttatcgaatggctcaggacttcttcaacgcgcgtctaacgcccatgcagtcagggtgctgcaagccaccaacgcaatgtgcgtacacgtttgtgaatccaacctattggattagtcccatcaacacagcagcggatatggattgcctgcaatggagcaacgaccaaacacaactttgctacaactgtgactcgtgcaaggcaggtttattggcaaatcttaggaaggagtggagaagggccaatgtgatattaatcatcacagtcattgttttaataattgtgtatttggtagggtgttgtgcctttaggaatgccaaaacggaggacctcttccgcaaatacaaacaaggctacacttga

SEQ ID NO: 3800 - protein, 269 aa, Glycine max
MAMSNNVIGCINFVAVILSIPIIGAGIWLLNGEADSCVQFLQWPVIILGVLILVVALAGFIGAFFRVSWLLIVYLVAMLVLVILLVSLVAFVYMVTLRGHGNIEPNRAYLEYRMDDFSGYLRRRVRSSFKWDRIRSCLSQTNMCAELNQGYRMAQDFFNARLTPMQSGCCKPPTQCAYTFVNPTYWISPINTAADMDCLQWSNDQTQLCYNCDSCKAGLLANLRKEWRRANVILIITVIVLIIVYLVGCCAFRNAKTEDLFRKYKQGYT

SEQ ID NO: 3801 - DNA, 822 bp, Glycine max
  CDS (1)..(822)
atgggggtaggcaacaacatgagtgcagtgttgaacttcatagccctgttggcctcaatacccataataagtgctggtgtgtggctagcctccaaaccagacaacgagtgcatccacaacttccgctggcacgtcctcgtacttggcctcctcgtactcctcatctctcttgcaggctttgtgggtgcttactggaacaagcaggggctcttggccttttacctttgctgcatggccatcctcatttctcttctccttttccttcttgtcttctctttcgtcgtcactagacccgatggaacctatcatgtccctggaagaggcttcaaggagtccatgctcgttggcttctccccctggctcaggaaccatgtcttcaccgcttcttctaccactagttggaacaagataaccacttgtttggctcattcttatgtctgcattaaactcacccaggactacgcttctgctgatcacttcttcaactctagtaatatctctcctttacagtcaggatgttgtaaacctccaacttcttgcggatacaattatgtgaatcctatactgtggataaatcctgtgaatccaatggtagacccagattgctacttgtggagcaatgaccagagccagctctgctacaactgcaatgcatgcaaggcaggtctactaggaaacctcagagaagagtggaggaaagccaatatcattttgacggtggcagttgttgtactcatctgggtctatctcattgcatgcagtgccttcaaaaatgctcaaacagaagacctcttccgccgttacaaaaggggttgggtttga

SEQ ID NO: 3802 - protein, 273 aa, Glycine max
MGVGNNMSAVLNFIALLASIPIISAGVWLASKPDNECIHNFRWHVLVLGLLVLLISLAGFVGAYWNKQGLLAFYLCCMAILISLLLFLLVFSFVVTRPDGTYHVPGRGFKESMLVGFSPWLRNHVFTASSTTSWNKITTCLAHSYVCIKLTQDYASADHFFNSSNISPLQSGCCKPPTSCGYNYVNPILWINPVNPMVDPDCYLWSNDQSQLCYNCNACKAGLLGNLREEWRKANIILTVAVVVLIWVYLIACSAFKNAQTEDLFRRYKRGWV

SEQ ID NO: 3803 - DNA, 1177 bp, Glycine max
  CDS (167)..(970)
ctttaatcttacacgtcttttctctctattcatgtgaaatcctaatacctatatttttctcacttattatctctgaaattggcagggtggtaatcttacgcttgcggcttgcgcgcattcattgtcgaaggcaaagtggtacgcatttcgttgtgtgagaaagaagatgtgttgtcgcttgagcaacagcctggtagggttgctgaacctgctctccttcctcctgtcgatacccattctggtaaccggcgtgtggctgcacaagcaagcggaaacggaatgcgagagatggctggagaagcccctcatcgtgttgggcgttttcctcttggtggtgtccctggcaggtcttctcggggcgtgttgccgcctctcgtgcctcctctggctctacctcttcgtcatgttcatcctcatcatcgttgtctccgccttcaccgtcttcgcattcgttgtcaccaacaagggcgctggcgaggtagtttctaaccgcggttacagggagtaccggcttggcgactactcaaactggttgcagaacagagtgaccaacccccacacgtggaaccggatcaagagctgcctccagtcggccaaactctgcgacaaattcgaaactcaatttgccaacgactccgcgcagcagttctacgcggagaacttgtccgcgctccagtccgggtgttgtaagccatcaaacgactgtaattttgcgtatcagggtccatctgtctggaacaagactgatggtgtaaatcattccaaccctgactgtaatgcttgggacaatgattccaatgttctgtgcttcaattgcgaatcttgcaaggctgggttcctgcagaaccttaagactgactggaagaaggtgacgattgtcaatgtgatattccttgtcttcctcattattgtgtactctgttggttgctgcgcgttccggaataacatgagaggcaattggaagtactagatgcagccttgtatgttacaagcatgtaaatgagttaagtaatttggtttcttttctggattctttgcagttgcatagttaatttacaattttatatcatctacagttagtttttaggctatgttcctgcactcgtcttctattggtgaatactcgtcatctatttgttaatttgtgtttaatgtgttaggcatggccatatgaatt

SEQ ID NO: 3804 - protein, 267 aa, Glycine max
MCCRLSNSLVGLLNLLSFLLSIPILVTGVWLHKQAETECERWLEKPLIVLGVFLLVVSLAGLLGACCRLSCLLWLYLFVMFILIIVVSAFTVFAFVVTNKGAGEVVSNRGYREYRLGDYSNWLQNRVTNPHTWNRIKSCLQSAKLCDKFETQFANDSAQQFYAENLSALQSGCCKPSNDCNFAYQGPSVWNKTDGVNHSNPDCNAWDNDSNVLCFNCESCKAGFLQNLKTDWKKVTIVNVIFLVFLIIVYSVGCCAFRNNMRGNWKY

SEQ ID NO: 3805 - DNA, 1220 bp, Glycine max
  CDS (55)..(912)
gttcggagcctccgttgctatgacaattctatacaagcgtaacgtttgcttaagatgagaaaaagcaaccacttgatcggtctcttaaacttcctaacattcctgctgtcgattccgatcctaggaggcgggatatggctgagcagcagggcgaacaacaccgactgcctcaagttcctgcagtggccgctcatcatcatcggcgtcagcatcatggtcgtgtccctggcggggttcgccggcgcgtgttaccgcaacaccttcctcatgcggctctacctcgtcgtcatgttcctggtcattgccgttctgatcgggttcatcatattcgcctacgttgtcaccgacaaggggtccggtcggagggtgatgaaccgcgcttacttggagtattatcttgaggactattcggggtggttggaggagcgcgtggcgagtgatagctactgggggaagattgtttcgtgtgttagggattctaaagcatgtgggaggatggggataaccattaatgggatgcccgagactcctgatatgttctacatcagacatctcacccctattcagtctggttgctgcaagcccccaacagattgtggctatgtctatcagaatgagacagtgtggatcccaggatcaggattgatgggagccaacccagattgcacaaggtggagcaatgatcaagagcagctttgctatgcatgtgattcttgcaaggctggtgtgctggcaagtctcaagaagagttggaggaaggtctcagtgatcaacattgttgttatgatcatccttgtcattgtttacataattgcttatgcagcatatagaaacaaccgcaagatggataacgatgagccctatggtgaagcaaggatgacaaaggcacaacctagtgcttttcatctttagtggcactatttggatgccaaaacgttaatttcagctgacttgtcttatgattttggacctttttctcccttgtaactaggttgctctcatctcatggctttgtatcaaactatcctagttgtacaaggatttggttttaatcttgaagggctgaatgtatttaattattactattatatttgcttactttgcaacttctgtttttgctttgaagattctcattttgtaatgttggaattagtattgatagatttataaattcggagaaatgtcttgcattagtggtaaaaaaaaaaaaaaaaaaaaaa

SEQ ID NO: 3806 - protein, 285 aa, Glycine max
MRKSNHLIGLLNFLTFLLSIPILGGGIWLSSRANNTDCLKFLQWPLIIIGVSIMVVSLAGFAGACYRNTFLMRLYLVVMFLVIAVLIGFIIFAYVVTDKGSGRRVMNRAYLEYYLEDYSGWLEERVASDSYWGKIVSCVRDSKACGRMGITINGMPETPDMFYIRHLTPIQSGCCKPPTDCGYVYQNETVWIPGSGLMGANPDCTRWSNDQEQLCYACDSCKAGVLASLKKSWRKVSVINIVVMIILVIVYIIAYAAYRNNRKMDNDEPYGEARMTKAQPSAFHL

SEQ ID NO: 3807 - DNA, 849 bp, Glycine max
  CDS (1)..(849)
atgagaggtagcaaccacttgatcggtttgttaaacttcttgacttttttgctgtcagttccaatccttgtgtgtgggatatggctgagcaccagagctaacaacacagaatgcctcaagttccttcagtggccgttaatcgtcataggaatcagcgtcatggttacatccttagccggtttggtcggagcctgttaccggaacagcttcctcatgagcctctacctcgttgtcatgctcttcatactcttggtcctcgttggcttcatcgtctttgcatatgctgtcacagccaagggttccgggagggagacactgaaccgcgcttacttggagtattacctgcaggactacgatggttggttgaagaaacgcgtggaaagtgatggctattggagaaagataaggtcttgtgttagggactctagggtttgtgggaagattgggagaaccgttgatggggtgcctgaaactgctgatatgttctacctcaggaagctctctcctattcagtctggatgctgcaagccccagagagagtgtgggtatgtgtatgagaacgagacggtgtggaggccaagagaaggagtggtggtgggaagcaacccagactgcactaggtggagcaatgaccaacacttgctttgctatgactgtgactcatgcaaggctggtgtgttggctactctaaagaaaagttggaggaaggtttccgtcattaatattcctgtcttggtaacccttgtggttctttacatcattgcttatgctgcgtataagaacaaccgcaggataaataactgcgaaccatgtggtcaaacaaggatgacaacattacaacctaagtag

SEQ ID NO: 3808 - protein, 282 aa, Glycine max
MRGSNHLIGLLNFLTFLLSVPILVCGIWLSTRANNTECLKFLQWPLIVIGISVMVTSLAGLVGACYRNSFLMSLYLVVMLFILLVLVGFIVFAYAVTAKGSGRETLNRAYLEYYLQDYDGWLKKRVESDGYWRKIRSCVRDSRVCGKIGRTVDGVPETADMFYLRKLSPIQSGCCKPQRECGYVYENETVWRPREGVVVGSNPDCTRWSNDQHLLCYDCDSCKAGVLATLKKSWRKVSVINIPVLVTLVVLYIIAYAAYKNNRRINNCEPCGQTRMTTLQPK

SEQ ID NO: 3809 - DNA, 1141 bp, Glycine max
  CDS (105)..(917)
  misc_feature (1121)..(1121): n is a, g, c or t
cccacgcgtccgtacggctgcgagaagacgacagaaggggatataacaatcattctttctcaaaacacttgctccattattattttctcattcattcgttcatcatggttcggttcagcaacaacgtgatcggactcctgaacttcctgaccttcctcctctccatcccgatcctggtggccggagtgtggctgagcaagcagggcgccaccgagtgcgagcggtggctggagaagccggtgatcgcactcggcgtcttcctcatgctcgtctcactcgccggcctcgtcggcgcgtgctgtcgcgtgtcgtggctcctctggctctacctcctcgtcatgttcgtcctcatcgttcttctcttcgccttcaccatcttcgccttcgttgtcaccaacaagggcgctggcgaagttgtgtctaatagagggtataaggagtataggcttggggattactcgaactggttgcagaagagggttaacaacactaagacgtggaacaggatcaggagttgcttgcaatctgggaaagtctgcactgagtttcaatccaagtttctaaacgacaccgttactgagttttactccgaaaacctgtccgcgcttcagtctggatgctgtaaacctgcagaagaatgccagtttagctatgtgaatccaacgacatggacgaagcccacaaatgtgactaatcagagcaacccagattgtgatgcttggaataacgatccaacagttctgtgcttcaattgccaatcatgcaaggctggcttactgcaaaacctcaagactgattggaagagggtggctgttgttaacatcgtattccttgtcttcctcattattgtctactccatagggtgctgtgcattcaggaacaataggagggaaaattggaagggttattctcgttagctaagattactcagtattattactagtgtgtagatgagtttgctagacaatctggtttatatggtggatttttattttttatttttttatgggctttatgtgtatgagctgttttcagtagacagtctgttatctaaattgctcaattttatatagcagtttcctagtatcatctatacgtaaatattacttctggaaaacaanccagactagttctctctctc

SEQ ID NO: 3810 - protein, 270 aa, Glycine max
MVRFSNNVIGLLNFLTFLLSIPILVAGVWLSKQGATECERWLEKPVIALGVFLMLVSLAGLVGACCRVSWLLWLYLLVMFVLIVLLFAFTIFAFVVTNKGAGEVVSNRGYKEYRLGDYSNWLQKRVNNTKTWNRIRSCLQSGKVCTEFQSKFLNDTVTEFYSENLSALQSGCCKPAEECQFSYVNPTTWTKPTNVTNQSNPDCDAWNNDPTVLCFNCQSCKAGLLQNLKTDWKRVAVVNIVFLVFLIIVYSIGCCAFRNNRRENWKGYSR

SEQ ID NO: 3811 - DNA, 852 bp, Glycine max
  CDS (1)..(852)
atgtataggttcagcaacacagtgatcgggttcttgaacttgttcacacttttagcatccataccaataattggagcaggtctatggatggcaaggagcagcacaacctgtgaaaattttctccaaacccctcttttggttataggatttgttgtgcttgtggtgtcactagcaggcttcattggtgcatgctttcatgtggcatgtgcactatggttgtacttggtggtcatgttgttcctcatagcagcactgatgggtttgactatatttggttttggggtgactagcaagggtggcggtgtggaagtgcctggaagggtttacaaggagtatcatcttcaggattattcaccatggttgaggaagagaattcaggatcctcgctattggaacactattagaggctgtattatggggtccaaaacttgtgaaaagcttgccacttggacccctcttgattatatgcaaagggatatgtctccaatacagtctggatgttgtaagccaccaactgcttgcacttacaacgtggcaacaatgatgatgacccaagaccctgattgctacaggtggaacaatgcccctaatttgctctgctatgagtgtgattcttgcaaagctggtgtgcttgaagacataagagggaattggcacaagctctcagttctcactgtcaccatgcttgtgcttcttatagggatttattccattgggtgctgtgctttcagaaacacaagaagagctgaaacggactatccctatgctgaaaaccggatgaccaaagtccgacccagatgggattaccattgttggaggtggttacatgacaggagagaacagctttattag

SEQ ID NO: 3812 - protein, 283 aa, Glycine max
MYRFSNTVIGFLNLFTLLASIPIIGAGLWMARSSTTCENFLQTPLLVIGFVVLVVSLAGFIGACFHVACALWLYLVVMLFLIAALMGLTIFGFGVTSKGGGVEVPGRVYKEYHLQDYSPWLRKRIQDPRYWNTIRGCIMGSKTCEKLATWTPLDYMQRDMSPIQSGCCKPPTACTYNVATMMMTQDPDCYRWNNAPNLLCYECDSCKAGVLEDIRGNWHKLSVLTVTMLVLLIGIYSIGCCAFRNTRRAETDYPYAENRMTKVRPRWDYHCWRWLHDRREQLY

SEQ ID NO: 3813 - DNA, 1185 bp, Glycine max
  CDS (54)..(863)
ggtccggaatcccgggtcgacccacgcgattggggttggggttggggttggggatgggggtaagcaacaacatcaccgcagtgctgaacttgatagctacgctggcctcaatcccgatcatagcctccggcatttggctggcatcgaagcccgacaacgagtgcgtggccaacttccggtggcccattgtcatcatcggcatcctcatcctcctcgtttccctggccggttttgtcggtgcctactggaacaaacagggtctcctcgccctctacctcttctgtatggctctcctcatcgccctcctcctcctcgttctcgtcttcgcattcgtcgtcaccagacccgatggagcctatgatgtccccggaagaggctacaaggagtacaggcttcacggcttctcctcctggttgaggaaccacgtcaccggttccgggagttggcagaagataaggccctgtttggctgcttctgatgtctgctctaagctcacccaggattacatcactgctgatcaattcttcaattcccatatctcccccttacagtcaggatgttgcaagcctcccactgcttgtgggtacaattatgtaaaccccatactatggacaaaccctgtgaaccctatggctgattcagattgctacttgtggaacaatgaccagaatcagctatgctacaattgtaatgcgtgcaaggctggtctattgggtaacctcagaaaagaatggaggaaagcaaatatcattctcattgtggcagtggtggtcctcatatgggtctatgtcatagcttgtagtgccttcaggaatgcccaaacagaaaacctcttcgaccgttacaaacagggttgggtttgatcccgtttccccccccaacatttacaagtttttaacgctgcttcttttgtttttttggttacctttccttctttctttctattccctgtaattccgttttttaagtctttttgtctttagtgtacatattccttctgtttagaaacacggtattggaagtaatacgtttctcgatgctcaggaaaaaacgaagaatagaatattctaataatcctttcgctgagctagcgtgtgattagaatttagattaattatatattcaattgttattctatactcctattttcttttgaataaactttggtacttgatgcggctatcc

SEQ ID NO: 3814 - protein, 269 aa, Glycine max
MGVSNNITAVLNLIATLASIPIIASGIWLASKPDNECVANFRWPIVIIGILILLVSLAGFVGAYWNKQGLLALYLFCMALLIALLLLVLVFAFVVTRPDGAYDVPGRGYKEYRLHGFSSWLRNHVTGSGSWQKIRPCLAASDVCSKLTQDYITADQFFNSHISPLQSGCCKPPTACGYNYVNPILWTNPVNPMADSDCYLWNNDQNQLCYNCNACKAGLLGNLRKEWRKANIILIVAVVVLIWVYVIACSAFRNAQTENLFDRYKQGWV

SEQ ID NO: 3815 - DNA, 858 bp, Glycine max
  CDS (1)..(858)
atgagaacaagcaaccacttgatcggtcttctgaacttcctaacgttcctgctgtcgattccgatcctaggtggcggaatatggctgagcagcagggccaacaacaccgactgcctcaagttcctgcagtggccgctcatcatcatcggagtcagcatcatggtcgtgtccctcgcggggttcgccggcgcgtgctaccgcaacaccttcctcatgcgcctctacctcgtcgtcatgttcctcgtcatcgccgtcctcatcgggttcatcatattcgcctacgttgtcactgacaaaggctccggtcggagggtcatgaaccgcgcgtacttggagtactacctcgaggactattcggggtggttggaggagcgcgtggcgagtgagagctactggggaaagattgcttcgtgtattagggattctaaagtgtgtggtaggatggggagaaccgttaatgggatgccccaaactcctgatatgttctacctcacccacctcacgcctattcagtctggttgctgcaagcccccaacagattgtggatatgtgtatcagaatgagacagtgtggatcccaggatcaggattgatgggaaccaacgcagattgcacaaggtggagcaatgaccaagagcagctttgctatgcctgtgattcttgcaaggctggtgtgctggcaagtctcaagaagagttggaggaaggtctcagtgatcaacattgttgttatgatcatccttgtgattgtttacataattgcttatgcagcatatagaaacaaccgcaagatggataacgatgagccctatggtgaagcaaggatgacaaaggcacaacctagtgcttttcatctttag

SEQ ID NO: 3816 - protein, 285 aa, Glycine max
MRTSNHLIGLLNFLTFLLSIPILGGGIWLSSRANNTDCLKFLQWPLIIIGVSIMVVSLAGFAGACYRNTFLMRLYLVVMFLVIAVLIGFIIFAYVVTDKGSGRRVMNRAYLEYYLEDYSGWLEERVASESYWGKIASCIRDSKVCGRMGRTVNGMPQTPDMFYLTHLTPIQSGCCKPPTDCGYVYQNETVWIPGSGLMGTNADCTRWSNDQEQLCYACDSCKAGVLASLKKSWRKVSVINIVVMIILVIVYIIAYAAYRNNRKMDNDEPYGEARMTKAQPSAFHL

SEQ ID NO: 3817 - DNA, 1261 bp, Glycine max
  CDS (264)..(1115)
gaataaaaaagaccgggaaaggagggaagaaaagcaaactcgtcactttaagacaaaaaataacttccttaataactaagaaggacaatctcatttcatttgttagttttcacatcctccaacataagtttctgagtttgaaacacagcataaacaaagcaaaatatgaatgccactctccctttttaaatggaaacaaagctgaagacaccacacgagcaatcgatagataacaaactaaagatagagtgagagtgagagacatgtataggttcagcaacacagtaatcgggttcttgaacttgttcacacttttagcatccataccaataattggagcaggtctatggatggcaaggagcagcacaacctgtgagaattttctccaaacccctcttttggttataggattcgttgtgctagtggtgtcactagcaggcttcattggtgcatgttttcatgtggcatgtgcactatggttgtacttggtggtcatgttgttcctcatagcagcactcatgggcttcacaatatttggttttggtgtgactagcaagggcggtggtgtggaagtgcctggaagggtttacaaggagtatcgtcttcaagattactcaccatggttgaggaagagaattcaggatcctcgctattggaacactattagaggctgtattttggggtctaaaacttgtgaaaagcttgcctcttggacccctcttgattatatgcaaagggatatgtctccaatacagtctggatgttgtaagccaccaactgcttgcacttacaacgtggcaacaacaatgatgactcaagaccctgattgctacaggtggaacaatgcccctaatttgctatgctatgagtgtgattcttgcaaagctggtgtgcttgaagacataagagggaattggcacaagctctcggttctcacagtcaccatgcttgtgcttctcatagggatttattccattgggtgctgtgctttcagaaacacaagaagagctgaaacggattatccctatggtgaaaaccgcatgaccaaagtccgacctagatgggattaccattggtggaggtggttacatgacaggagagaacagctttattagctgagaagctctaactacaatccatggtatagactagagaaggcatcaaggcctttccattccctgaatggctgcttttttgtataaagcataatttcgctttatctcaaatatcgtaacacgccgttactttttctcattactag

SEQ ID NO: 3818 - protein, 283 aa, Glycine max
MYRFSNTVIGFLNLFTLLASIPIIGAGLWMARSSTTCENFLQTPLLVIGFVVLVVSLAGFIGACFHVACALWLYLVVMLFLIAALMGFTIFGFGVTSKGGGVEVPGRVYKEYRLQDYSPWLRKRIQDPRYWNTIRGCILGSKTCEKLASWTPLDYMQRDMSPIQSGCCKPPTACTYNVATTMMTQDPDCYRWNNAPNLLCYECDSCKAGVLEDIRGNWHKLSVLTVTMLVLLIGIYSIGCCAFRNTRRAETDYPYGENRMTKVRPRWDYHWWRWLHDRREQLY

SEQ ID NO: 3819 - DNA, 852 bp, Glycine max
  CDS (1)..(852)
atgcaacgtttcagcaacacagtgatcggattcttgaactttttcacgctcttggcatcaatacccatcattggtgcgggtctatggatggcaaggagcaccctaacatgtgaaaatttcttccaaaccccacttttggtcataggctttgttgtgcttgtgatttcgctaacgggtttaataggggcatgctttcatgtggcatgggcattgtgggtgtacttggtgatcatggtgttcattatagctaccctcttagggtttaccatatttggctttgttgtgactgaacagggtgggggagtggaagtgcctggtagggcttacaaggagtatcgtctcgagcgttattcgccatggctgaggaataggattcaggatcctcagtattggagcaccataagaagctgcattttggggtctaacacttgtgcaaagcttgccttttggacccctcttgattacgtgcagagggacatgtctcccattcagtcaggatgttgtaagccaccaacagcgtgcatgtacaacgaggaaacagtggtagtgaccccagactcggattgctaccgttggaataacgccccaactctgctttgctacgactgcaactcttgcaaggctggtgtgctcgaaaacattagaagggactggcacaacatctctgttcttaacgttgtcgtgcttgtgttcctcataggcatatattccattgcctgttgcgctttcaggaacgcaagaagagctcaaactgattaccctcatggcgaaaaccgcatgaccaaagttaaacctagatgggattattattgttggagatggtggtataacaagaaggaggagcttttttga

SEQ ID NO: 3820 - protein, 283 aa, Glycine max
MQRFSNTVIGFLNFFTLLASIPIIGAGLWMARSTLTCENFFQTPLLVIGFVVLVISLTGLIGACFHVAWALWVYLVIMVFIIATLLGFTIFGFVVTEQGGGVEVPGRAYKEYRLERYSPWLRNRIQDPQYWSTIRSCILGSNTCAKLAFWTPLDYVQRDMSPIQSGCCKPPTACMYNEETVVVTPDSDCYRWNNAPTLLCYDCNSCKAGVLENIRRDWHNISVLNVVVLVFLIGIYSIACCAFRNARRAQTDYPHGENRMTKVKPRWDYYCWRWWYNKKEELF

SEQ ID NO: 3821 - DNA, 810 bp, Glycine max
  CDS (1)..(810)
atggcactaagcaacaacgtcataggcgccattaacttcgttgcggtgctcctctcaatcccaatcatcggtgccggaatctggctaacaaccgaaccagccgattcatgtgtcaaaattctacaatggccaatcataatcttgggggttcttatatttgttgtggctctggctgggttcataggggccttttggagaatccccatgcttctcgtattttacctcattgccatgcttgtgcttattgtgttgctggtttccttggtggttttcacctatgccgtcacccttagaggccgtggcaacattgagcccaatcggtcttacttggaatatcgcatggatgatttctcaatttggcttcgtcgaagggtgaggagctccagcaagtgggatggcatcagaagctgtcttcgctcttcgaatatatgtgctgacttggatcaacagtaccgaacggctcaggaattctttaatgcacacctaaccccaattcagtcagggtgctgcaagccaccaacaaaatgtggttacacgtttgtgaatccaacgtattggattagccctatcaacacggcagtagacatggattgcatgaaatggagcaacgaccaagcacagctttgctacaactgtgactcgtgtaaagctggattgttggcaacccttagggtggagtggagaagggccaatgtgatattgatcgttactctagttgctttaattgcggtgtatttggtaggatgttttgcatttaggaatgccaagacagaggagctctttcgcaaatacaagcaaggctactcttga

SEQ ID NO: 3822 - protein, 269 aa, Glycine max
MALSNNVIGAINFVAVLLSIPIIGAGIWLTTEPADSCVKILQWPIIILGVLIFVVALAGFIGAFWRIPMLLVFYLIAMLVLIVLLVSLVVFTYAVTLRGRGNIEPNRSYLEYRMDDFSIWLRRRVRSSSKWDGIRSCLRSSNICADLDQQYRTAQEFFNAHLTPIQSGCCKPPTKCGYTFVNPTYWISPINTAVDMDCMKWSNDQAQLCYNCDSCKAGLLATLRVEWRRANVILIVTLVALIAVYLVGCFAFRNAKTEELFRKYKQGYS

SEQ ID NO: 3823 - DNA, 834 bp, Arabidopsis thaliana (thale cress)
  CDS (1)..(834)
atgggtatgggcacaagcactttcgttatcagatgggtcaatcttcttacaatgctattggctgtggcagtgataatatttggggtgtggatgagtacacacaatgatggttgcagaaggtcacttacatttccagttatagctcttggtggtttcatcttcttgatatccataatcggatttcttggcgcgtgcaagagaagtgtggcgcttctttggatttatcttgccgtgctcctgatcgttttgatcgcgattcttgtctttaccgtactggcgttcattgtaacaaacaatggttctggccatactaaccctggtttaaggtacaaggagtataagctgaatgattacagctcatggtttctaaaacagcttaacaacaccagtaactggataagactaaagagttgtcttgttaaatccgagcaatgtcggaagctttccaagaaatacaagaccatcaaacagttgaaatccgcagaattaaccccgatagaagctggatgttgtcgaccaccatctgagtgtggttatcctgcggtgaatgcttcttactatgacttgagctttcattcgataagttctaacaaagattgtaagctttacaagaatttgaggactatcaagtgctacaactgtgattcttgcaaagctggagttgctcagtacatgaaaaccgagtggcgacttgttgcgatcttcaatgtggtcctgtttgttgtcttgataagctctcttcttagcacgagatttgactctgaacaaagttttggccttttaaacgtcaatggtttactttgttggatgctgtgcgagaagaaatgctgctag

SEQ ID NO: 3824 - protein, 277 aa, Arabidopsis thaliana (thale cress)
MGMGTSTFVIRWVNLLTMLLAVAVIIFGVWMSTHNDGCRRSLTFPVIALGGFIFLISIIGFLGACKRSVALLWIYLAVLLIVLIAILVFTVLAFIVTNNGSGHTNPGLRYKEYKLNDYSSWFLKQLNNTSNWIRLKSCLVKSEQCRKLSKKYKTIKQLKSAELTPIEAGCCRPPSECGYPAVNASYYDLSFHSISSNKDCKLYKNLRTIKCYNCDSCKAGVAQYMKTEWRLVAIFNVVLFVVLISSLLSTRFDSEQSFGLLNVNGLLCWMLCEKKCC

SEQ ID NO: 3825 - DNA, 822 bp, Zea mays
  CDS (1)..(822)
atggcgttccggctgagcaacaacctgatcggggtcctcaacttcgtcaccttcctgctctccgtcccgatcctgggcgcgggcatctggctgggccaccgcgccgacggcaccgagtgcgagcgctacctctcggcgcccgtcatcgcgctgggggccttcctcctcgccgtctccctggcgggcctcgtcggcgcctgctgccgcgtcacctggctgctctgggcctacctcctcgccatgttcgtcctcatcctcgtcctcttctgcttcaccgtcttcgccttcgtcgtcaccaacaggggcgccggcgaggccgtctccggccgcggatacaaggagtaccgcctcggggactactccaactggctgcagaagcgcgtcgagaacaccaggaactgggaccggatcaggagctgcctccaggactccaaggtctgcaagagcctgcaggacaagaacgagaccgtcgcccagttcatgagttccagcctctcccccatcgagtctggctgctgcaagccccccaccagctgcggctacacctacgtcggcggcacggactggacgccggtgaccaccaactcgacggacccggactgcaagacctggagcaacgacgcctcggcgctctgctacaactgccagtcgtgcaaggccggcgtggtggccacgttccagcggaactggaagcgcgtcgccgtcgtctgcatcgtcttcctcgtcttcatcatcatcgtctactccgtcggctgctgcgccttcaggaacaaccgcagagacaacgcctaccgcggcgggtggaagggcgggtacgcttga

SEQ ID NO: 3826 - protein, 273 aa, Zea mays
MAFRLSNNLIGVLNFVTFLLSVPILGAGIWLGHRADGTECERYLSAPVIALGAFLLAVSLAGLVGACCRVTWLLWAYLLAMFVLILVLFCFTVFAFVVTNRGAGEAVSGRGYKEYRLGDYSNWLQKRVENTRNWDRIRSCLQDSKVCKSLQDKNETVAQFMSSSLSPIESGCCKPPTSCGYTYVGGTDWTPVTTNSTDPDCKTWSNDASALCYNCQSCKAGVVATFQRNWKRVAVVCIVFLVFIIIVYSVGCCAFRNNRRDNAYRGGWKGGYA

SEQ ID NO: 3827 - DNA, 855 bp, Arabidopsis thaliana (thale cress)
  CDS (1)..(855)
atgggtatgggcacaagcactttcgttatcagatgggtcaatcttcttacaatgctattggctgtggcagtgataatatttggggtgtggatgagtacacacaatgatggttgcagaaggtcacttacatttccagttatagctcttggtggtttcatcttcttgatatccataatcggatttcttggcgcgtgcaagagaagtgtggcgcttctttggatttatcttgccgtgctcctgatcgttttgatcgcgattcttgtctttaccgtactggcgttcattgtaacaaacaatggttctggccatactaaccctggtttaaggtacaaggagtataagctgaatgattacagctcatggtttctaaaacagcttaacaacaccagtaactggataagactaaagagttgtcttgttaaatccgagcaatgtcggaagctttccaagaaatacaagaccatcaaacagttgaaatccgcagaattaaccccgatagaagctggatgttgtcgaccaccatctgagtgtggttatcctgcggtgaatgcttcttactatgacttgagctttcattcgataagttctaacaaagattgtaagctttacaagaatttgaggactatcaagtgctacaactgtgattcttgcaaagctggagttgctcagtacatgaaaaccgagtggcgacttgttgcgatcttcaatgtggtcctgtttgttgtcttgataagctctcttcttagcacgagatttgactctgaacaaagttttggccttttaaacggtttagtgcaaatttccaacataacctttaaagattgccaaaccacaacagtaccaaaacagttttaa

SEQ ID NO: 3828 - protein, 284 aa, Arabidopsis thaliana (thale cress)
MGMGTSTFVIRWVNLLTMLLAVAVIIFGVWMSTHNDGCRRSLTFPVIALGGFIFLISIIGFLGACKRSVALLWIYLAVLLIVLIAILVFTVLAFIVTNNGSGHTNPGLRYKEYKLNDYSSWFLKQLNNTSNWIRLKSCLVKSEQCRKLSKKYKTIKQLKSAELTPIEAGCCRPPSECGYPAVNASYYDLSFHSISSNKDCKLYKNLRTIKCYNCDSCKAGVAQYMKTEWRLVAIFNVVLFVVLISSLLSTRFDSEQSFGLLNGLVQISNITFKDCQTTTVPKQF

SEQ ID NO: 3829 - DNA, 858 bp, Arabidopsis thaliana (thale cress)
  CDS (1)..(858)
atgagaacaagcaaccatctcataggtttagtcaacttcctcactttcctcctctcaataccaatcctcggcggtggaatatggttaagcagccgagctaactccaccgactgtttaagattccttcaatggcctctcatcgtcatcggaatctcaatcatggtcgtatctttagctggattcgctggagcttgttaccgtaacaagttccttatgtggctatacctagtagtcatgcttctcatcatcgctgctcttatcggtttcatcatcttcgcttacgcggttacagataaaggatccggtcgaaccgtacttaaccggggttatcttgactattatcttgaagattactctggttggttgaaagatcgagtttctgatgatagctattggggtaaaattagttcttgtcttagagattctggtgcttgtagaaagattggaagaaattttaatggtgtacctgaaactgctgatatgttcttccttagaagacttagccctgttgagtccggttgttgcaagccaccaacagattgcggtttttcatatgtgaatgagaccggatgggacacgagaggagggatgataggaccgaaccaggactgtatggtgtggagcaacgaccagagcatgctctgttatcagtgtagttcttgtaaagctggtgttcttgggagtttgaagaagagttggagaaaagtatcggtgatcaacattgtggtacttatcattctagttatcttttacgttatcgcttatgcagcttataggaatgtcaagaggatcgataacgatgaaccggctggtgaagctaggatgacaaaatcacatcctagtcatttccatctttga

SEQ ID NO: 3830 - protein, 285 aa, Arabidopsis thaliana (thale cress)
MRTSNHLIGLVNFLTFLLSIPILGGGIWLSSRANSTDCLRFLQWPLIVIGISIMVVSLAGFAGACYRNKFLMWLYLVVMLLIIAALIGFIIFAYAVTDKGSGRTVLNRGYLDYYLEDYSGWLKDRVSDDSYWGKISSCLRDSGACRKIGRNFNGVPETADMFFLRRLSPVESGCCKPPTDCGFSYVNETGWDTRGGMIGPNQDCMVWSNDQSMLCYQCSSCKAGVLGSLKKSWRKVSVINIVVLIILVIFYVIAYAAYRNVKRIDNDEPAGEARMTKSHPSHFHL

SEQ ID NO: 3831 - DNA, 792 bp, Arabidopsis thaliana (thale cress)
  CDS (1)..(792)
atggttcagtgtagcaacaatctcctcggaatcctcaatttcttcacattcctcctctcaatcccaattctctccgccgggatctggctcggcaaaaatgcagcaaccgaatgcgaacgtttcctcgacaaaccaatggtcgtactcggaatcttcctcatgttcgtctcaatcgccggactcgtcggtgcttgttgccgtgtctcttgcctcctctggctttacctcttcgctatgttcctcctcattctcctcggcttctgtttcacaatcttcgctttcgcagtcacaaaccgcggcgccggtgaggttatatcggatcgagggtataaagagtatcatgtcgccgattactctaattggttgcagaaacgtgtcaacaatgctaagaattgggaacggatcaggagttgtttgatgtactctgacgtttgctccacttatcgtactcgttatgccagcattaacgttgaagatttctacaaatctaatcttaatgctcttcagtctggttgttgtaagccgtccaatgactgtaacttcacctatgtgaacccgactacttggacaaagactcctggtccatacaaaaacgaggactgtaatgtgtgggacaacaaaccaggaactctctgctacgactgtgaagcctgcaaggctggtctgcttgacaacatcaagaactcatggaaaaaggtggctaaggtcaacattgtcttcctcatattcctcattatcgtctactctgttggttgttgtgcgttcaggaacaacaggaaacgcagttggtaa

SEQ ID NO: 3832 - protein, 263 aa, Arabidopsis thaliana (thale cress)
MVQCSNNLLGILNFFTFLLSIPILSAGIWLGKNAATECERFLDKPMVVLGIFLMFVSIAGLVGACCRVSCLLWLYLFAMFLLILLGFCFTIFAFAVTNRGAGEVISDRGYKEYHVADYSNWLQKRVNNAKNWERIRSCLMYSDVCSTYRTRYASINVEDFYKSNLNALQSGCCKPSNDCNFTYVNPTTWTKTPGPYKNEDCNVWDNKPGTLCYDCEACKAGLLDNIKNSWKKVAKVNIVFLIFLIIVYSVGCCAFRNNRKRSW

SEQ ID NO: 3833 - DNA, 819 bp, Arabidopsis thaliana (thale cress)
  CDS (1)..(819)
atggtacgttttagtaacagtcttgtaggaatactcaacttcttcgtcttccttctctcggttcccatactctcaaccggaatctggctcagccttaaagccacgacgcaatgcgagagattcctcgacaaacccatgatcgctctcggtgttttcctcatgataatcgcaatcgctggagtcgttggatcttgttgcagagtgacgtggcttctctggtcctatctctttgtgatgttcttcttaatcctcatcgtcctctgtttcaccatctttgccttcgttgtcactagtaaaggctccggcgaaactatccaaggaaaagcttataaggagtataggctcgaggcttactctgattggttgcagaggcgtgtgaacaacgctaagcattggaacagcattagaagctgtctttatgagagcaagttctgttataacttggagttagtcactgctaatcacactgtttctgatttctacaaagaagatctcactgcttttgagtctggttgctgcaagccctctaatgactgtgacttcacctacataacttcaacaacttggaataaaacatcaggaacacataaaaactcagattgccaactttgggacaacgaaaagcataagctttgctacaattgcaaagcctgcaaggccggttttctcgacaacctcaaggccgcatggaaaagagttgctattgtcaacatcattttccttgtactcctcgttgtcgtctacgctatgggatgttgcgctttccgaaacaacaaagaagatagatatggccgttccaatggtttcaacaattcttga

SEQ ID NO: 3834 - protein, 272 aa, Arabidopsis thaliana (thale cress)
MVRFSNSLVGILNFFVFLLSVPILSTGIWLSLKATTQCERFLDKPMIALGVFLMIIAIAGVVGSCCRVTWLLWSYLFVMFFLILIVLCFTIFAFVVTSKGSGETIQGKAYKEYRLEAYSDWLQRRVNNAKHWNSIRSCLYESKFCYNLELVTANHTVSDFYKEDLTAFESGCCKPSNDCDFTYITSTTWNKTSGTHKNSDCQLWDNEKHKLCYNCKACKAGFLDNLKAAWKRVAIVNIIFLVLLVVVYAMGCCAFRNNKEDRYGRSNGFNNS

SEQ ID NO: 3835 - DNA, 810 bp, Arabidopsis thaliana (thale cress)
  CDS (1)..(810)
atgcctttaagcaacaatgtaattggttgcataaacttcatcaccgtcctcctctccattccggtcatcggcgccggaatctggctagccataggaacagtaaactcatgcgtcaagcttcttcaatggccagtaataatcctcggagtcttaatcctcttagtgggtctcgctggtttcattggagggttttggagaatcacatggcttcttgttgtttacttaatcgccatgcttattctcattgtacttttgggttgccttgtcggatttatttacatggttaccataagaggctctggtcatccagaaccaagtagagcttatcttgagtatagtcttcaagatttctctggttggttacgtagaagagttcagagatcttataaatgggaaaggattcgtacttgtttgagtacaactaccatttgccctgaactaaatcagagatacactttggctcaagatttcttcaatgctcatcttgatcccattcaatctggttgctgcaagcccccaacaaaatgtggattcacatttgttaatcctacttattggataagtcccatagatatgtctgctgatatggattgtctaaattggagcaatgaccaaaacactttgtgttacacttgtgattcttgtaaagccggcttgctcgcaaatattaaggtagattggttaaaagcggatatctttctactcttggcgcttatcggattgattatcgtctacattatcgggtgctgcgcattccgtaatgcggaaactgaggatattttcaggaagtacaagcagggttatacttga

SEQ ID NO: 3836 - protein, 269 aa, Arabidopsis thaliana (thale cress)
MPLSNNVIGCINFITVLLSIPVIGAGIWLAIGTVNSCVKLLQWPVIILGVLILLVGLAGFIGGFWRITWLLVVYLIAMLILIVLLGCLVGFIYMVTIRGSGHPEPSRAYLEYSLQDFSGWLRRRVQRSYKWERIRTCLSTTTICPELNQRYTLAQDFFNAHLDPIQSGCCKPPTKCGFTFVNPTYWISPIDMSADMDCLNWSNDQNTLCYTCDSCKAGLLANIKVDWLKADIFLLLALIGLIIVYIIGCCAFRNAETEDIFRKYKQGYT

SEQ ID NO: 3837 - DNA, 984 bp, Arabidopsis thaliana (thale cress)
  CDS (1)..(984)
atgagatcgagaagtaaccttataggtctcataaacttcttcactttcctcctgtcgattcctatcctcggcggtggaatatggcttagcagccgagctaactcaaccgattgcctcagattcctccagtggccactcattatcatcggaatatcaatcatggtcatatctttagccggaatcgccggagcttgttaccaaaacaagttcctcatgtggctttaccttttcaccatgttctttgtaatcgctgctcttataggattcacaatcttcgcttacgtagttactgataaaggctcaggccggtttgtgatgaaccgtcggtatcttgattattatctcaatgattattccggttggttaaaggaccgtgtcacagataatggatattggagagatatcggatcgtgtgttagagattctggagtttgtaagaagattggaagagatttaaatggtgttccagaaactgctcatatgttttacttcagaaatctttctcctgttgagtccggatgttgcaagccgccaacagattgtggctatacgtacgtgaacgagacagtgtggattccgggaggagaaatggtgggaccgaacccggactgtatgttgtggaacaatgaccagagactactctgttaccaatgcagctcttgtaaagccggtgttcttggtagcttgaaaaagagttggagaaaagtctcggtgatcaacatcgtggttgtgatcatacttgttatcttctatgtcatcgcgtgtgcggcttaccagaatgttaagaggatgtataatgacgaaccggtcggtgaggctaggatgaccaatctcatcctagtcattttcaaatttaaggagattttggtacagtttttcttcggaattgtgtttttattactctttaatggtttaatggtctgttgttgtaatgataaatttgcttttagtgttttcttctttggatatgttacatatgcatga

SEQ ID NO: 3838 - protein, 327 aa, Arabidopsis thaliana (thale cress)
MRSRSNLIGLINFFTFLLSIPILGGGIWLSSRANSTDCLRFLQWPLIIIGISIMVISLAGIAGACYQNKFLMWLYLFTMFFVIAALIGFTIFAYVVTDKGSGRFVMNRRYLDYYLNDYSGWLKDRVTDNGYWRDIGSCVRDSGVCKKIGRDLNGVPETAHMFYFRNLSPVESGCCKPPTDCGYTYVNETVWIPGGEMVGPNPDCMLWNNDQRLLCYQCSSCKAGVLGSLKKSWRKVSVINIVVVIILVIFYVIACAAYQNVKRMYNDEPVGEARMTNLILVIFKFKEILVQFFFGIVFLLLFNGLMVCCCNDKFAFSVFFFGYVTYA

SEQ ID NO: 3839 - DNA, 816 bp, Arabidopsis thaliana (thale cress)
  CDS (1)..(816)
atgtttcgagttagcaatttcatggttggtctagcaaacacattggtgatgttagtgggcgcttcggccattggttattcgatttacatgttcgttcaccaaggcgtcactgattgtgaatctgccattcggataccacttctcacgaccggactcatcctcttcttggtgtctttgctcggagtgattggatcttgtttcaaggagaatttggcaatggtttcctacttgatcatattgtttgggggcattgttgcattgatgattttctccatatttctcttctttgtgaccaacaaaggagccggtcgtgtggtgtccggtcgagggtataaagagtaccggacggtggatttctcgacgtggcttaatgggttcgttggtgggaagagatgggttgggataaggtcttgtttggctgaggctaacgtttgtgatgatttgagtgatggtcgtgttagtcagatcgctgatgcgttttatcacaagaacttgtctcccatccagtcaggttgttgtaagccaccatcggattgcaacttcgagttcagaaacgcgacgttctggataccgccgagcaaaaacgaaacggcagttgcggaaaacggggactgtggtacgtggagcaacgtgcaaacagagttatgtttcaactgcaacgcatgcaaagcgggtgtgttagcgaacataagagagaagtggaggaatcttcttgttttcaacatttgtctcctcattctcctcataaccgtctattcctgcggttgctgtgctcgtcgtaacaatcggacggctaggaaaagtgattctgtctga

SEQ ID NO: 3840 - protein, 271 aa, Arabidopsis thaliana (thale cress)
MFRVSNFMVGLANTLVMLVGASAIGYSIYMFVHQGVTDCESAIRIPLLTTGLILFLVSLLGVIGSCFKENLAMVSYLIILFGGIVALMIFSIFLFFVTNKGAGRVVSGRGYKEYRTVDFSTWLNGFVGGKRWVGIRSCLAEANVCDDLSDGRVSQIADAFYHKNLSPIQSGCCKPPSDCNFEFRNATFWIPPSKNETAVAENGDCGTWSNVQTELCFNCNACKAGVLANIREKWRNLLVFNICLLILLITVYSCGCCARRNNRTARKSDSV

SEQ ID NO: 3841 - DNA, 849 bp, Arabidopsis thaliana (thale cress)
  CDS (1)..(849)
atgtacagattcagcaacacagttattggggtcttaaaccttctcaccttactagcctcgattccaatcatcggaaccgctttatacaaggcaagaagcagcacgacatgtgaaaacttcctccagacgccgctacttgttataggattcatcatactcatagtttcccttgcgggattcataggagcctgcttcaacgtggcatgggctctttgggtgtacttagtggtcatgatcttcctcatcgctaccctaatgggtctaacgctatttggtctggtggtgacgagccaaggaggtggagtggaagtgccagggaggatttataaagagtataggcttggagactatcatccatggttgagagagagagttagggatcctgagtattggaactccattagaagctgtatcttgagttccaagacttgtactaagattgagtcttggactacacttgattatttccaaagagacatgacttctgttcagtcgggatgttgtaagccaccgacggcgtgtacgtacgaagctggagtagtggacggaggaggagattgcttcagatggaacaatggagtggagatgttatgctacgagtgcgatgcttgcaaggctggtgttctcgaagagatccgtctcgactggagaaagttatcggttgtcaacattctcgtcctcgtcctcctcatcgcggtctacgccgctggttgctgcgccttccacaacactcgccacgcagctcatccttaccatccatctgatgataaccgcatgaccagagtccgtcctcgttgggactattactggtggagatggtggcacgaaaagaaagagcagctttactaa

SEQ ID NO: 3842 - protein, 282 aa, Arabidopsis thaliana (thale cress)
MYRFSNTVIGVLNLLTLLASIPIIGTALYKARSSTTCENFLQTPLLVIGFIILIVSLAGFIGACFNVAWALWVYLVVMIFLIATLMGLTLFGLVVTSQGGGVEVPGRIYKEYRLGDYHPWLRERVRDPEYWNSIRSCILSSKTCTKIESWTTLDYFQRDMTSVQSGCCKPPTACTYEAGVVDGGGDCFRWNNGVEMLCYECDACKAGVLEEIRLDWRKLSVVNILVLVLLIAVYAAGCCAFHNTRHAAHPYHPSDDNRMTRVRPRWDYYWWRWWHEKKEQLY

SEQ ID NO: 3843 - DNA, 822 bp, Arabidopsis thaliana (thale cress)
  CDS (1)..(822)
atggctcgttgtagcaacaatctcgtagggatactcaatttcctagtatttcttctctcgatcccaatcttagctggtggaatctggctaagccaaaaagggtcaacagagtgtgaaagattcctagacaaaccagtgattgctcttggtgttttccttatggttgtagcaatagctggtctaataggttcatgttgtagagtcacatggcttctttgggtttatctctttgtcatgttccttttgattctccttgtgttctgtataacagtttttgcctttgttgttactaacaaaggagctggtgaagctattgaaggaaaaggttataaagagtataaacttggtgattactctacttggttacagaaacgtgttgagaatggtaaaaattggaataagattaggagttgtcttgtggagagcaaagtttgttctaagcttgaagccaagtttgttaatgttcctgtcaatagtttctacaaggaacatcttactgctcttcagtctggttgctgcaaaccttcagatgaatgtggtttcgagtacgtaaacccaacaacctggaccaagaacacaacgggaacacacactaatccagactgccaaacctgggacaacgcaaaagaaaagctctgcttcgattgtcaatcttgtaaagcgggtctactcgacaacgtcaaaagcgcttggaagaaagttgcaatcgttaacatcgtcttccttgtcttcctcatcattgtctactctgttggttgctgtgctttcaggaacaacaagagggatgacagttattcccgtacctacggatataagccttga

SEQ ID NO: 3844 - protein, 273 aa, Arabidopsis thaliana (thale cress)
MARCSNNLVGILNFLVFLLSIPILAGGIWLSQKGSTECERFLDKPVIALGVFLMVVAIAGLIGSCCRVTWLLWVYLFVMFLLILLVFCITVFAFVVTNKGAGEAIEGKGYKEYKLGDYSTWLQKRVENGKNWNKIRSCLVESKVCSKLEAKFVNVPVNSFYKEHLTALQSGCCKPSDECGFEYVNPTTWTKNTTGTHTNPDCQTWDNAKEKLCFDCQSCKAGLLDNVKSAWKKVAIVNIVFLVFLIIVYSVGCCAFRNNKRDDSYSRTYGYKP

SEQ ID NO: 3845 - DNA, 777 bp, Arabidopsis thaliana (thale cress)
  CDS (1)..(777)
atgggtatgggcacaagcactttcgttatcagatgggtcaatcttcttacaatgctattggctgtggcagtgataatatttggggtgtggatgagtacacacaatgatggttgcagaaggtcacttacatttccagttatagctcttggtggtttcatcttcttgatatccataatcggatttcttggcgcgtgcaagagaagtgtggcgcttctttggatttatcttgccgtgctcctgatcgttttgatcgcgattcttgtctttaccgtactggcgttcattgtaacaaacaatggttctggccatactaaccctggtttaaggtacaaggagtataagctgaatgattacagctcatggtttctaaaacagcttaacaacaccagtaactggataagactaaagagttgtcttgttaaatccgagcaatgtcggaagctttccaagaaatacaagaccatcaaacagttgaaatccgcagaattaaccccgatagaagctggatgttgtcgaccaccatctgagtgtggttatcctgcggtgaatgcttcttactatgacttgagctttcattcgataagttctaacaaagattgtaagctttacaagaatttgaggactatcaagtgctacaactgtgattcttgcaaagctggagttgctcagtacatgaaaaccgagtggcgacttgttgcgatcttcaatgtgtcaatggtttactttgttggatgctgtgcgagaagaaatgctgctagttaccgatccaaagcttag

SEQ ID NO: 3846 - protein, 258 aa, Arabidopsis thaliana (thale cress)
MGMGTSTFVIRWVNLLTMLLAVAVIIFGVWMSTHNDGCRRSLTFPVIALGGFIFLISIIGFLGACKRSVALLWIYLAVLLIVLIAILVFTVLAFIVTNNGSGHTNPGLRYKEYKLNDYSSWFLKQLNNTSNWIRLKSCLVKSEQCRKLSKKYKTIKQLKSAELTPIEAGCCRPPSECGYPAVNASYYDLSFHSISSNKDCKLYKNLRTIKCYNCDSCKAGVAQYMKTEWRLVAIFNVSMVYFVGCCARRNAASYRSKA

SEQ ID NO: 3847 - DNA, 789 bp, Physcomitrella patens subsp. patens
  CDS (1)..(789)
atggggtgcagcaatggacttacggggtttctgaatttgttaactttcttactttccttaccgatcattgctcttggggcatatctcgcgaagacgcatgattcaacttgtatgcgcttcttgcagtatccgatcatagttattggagtgttcatgctgctcatgtccctcgctggcatgatcggcgcttggtgcgacaagaagtttctcctactgatctacctcttctttatgtttatcctgattgttctgctcttctgcttcacaatcttcgcattcgtggtgacgaattccggcgccggaagtgcggtctctgggaaaggatataaggagtaccgacttggtgattattctaattggttgcaaaagagagtcgacaatccatctacctgggagaagatcagaagctgcatacaggactctaaagtgtgcagcgacttgggcaaaaagtacaccacagaaactgattttaacaaagcctctcttactcctctcgagtctggatgctgcaagccgccaacggcatgcggttacaaattcgtgacccccatagagtggacgggaactaattcgactgcagatgcggactgcggaacttggaaaaacacccctcaagaatggtgtctgggttgcaattcctgccgagctggagttttacagaatgtgaagtccaactggcgtagggtcgccattggcaacattattgtgctggttttcctcgtcattgtgtattcctgtggatgttgtgcataccgaaacaataagagatatgacaagggctatgcgtaa

SEQ ID NO: 3848 - protein, 262 aa, Physcomitrella patens subsp. patens
MGCSNGLTGFLNLLTFLLSLPIIALGAYLAKTHDSTCMRFLQYPIIVIGVFMLLMSLAGMIGAWCDKKFLLLIYLFFMFILIVLLFCFTIFAFVVTNSGAGSAVSGKGYKEYRLGDYSNWLQKRVDNPSTWEKIRSCIQDSKVCSDLGKKYTTETDFNKASLTPLESGCCKPPTACGYKFVTPIEWTGTNSTADADCGTWKNTPQEWCLGCNSCRAGVLQNVKSNWRRVAIGNIIVLVFLVIVYSCGCCAYRNNKRYDKGYA

SEQ ID NO: 3849 - DNA, 795 bp, Physcomitrella patens subsp. patens
  CDS (1)..(795)
atggggtgtagtaattatctcaccgggtttctgaatcttgcaacgctcgttttgtctataccgattatcgtctttggagtatggctctcgaagacacaagatacagtttgtgtgcgcttcttgcagtatccaatcatagccatcggagtgtttatactgctgatgtcgctggctggaatgataggcgccttttgtgacaagaaaattctcctgttgctctacctcatcgttatgttcctcctaattgtccttctcttctgtttcactgtcttcgcattcgtggtaacccattctggggctggaaatgtggtctccggtaaaggctacaaggaataccgactcggtgattattccaattggttacaaagaaaggtgaacgatactgcgtattggagtaagattgaaagctgtatagccgattctaaggtgtgtaataatttggctaccaagtacacttccgtggatgctttcaacaaagcagctctcacccctctcgagtctgggtgctgcaagccaccctcggactgcaacttcatcttcggcaagaatgcaacagattgggtgggaactggttccgcggccccagacactgactgtcgcagttggaacagtcaagatttgtgtctgaagtgtaacgcatgcaaggccggggtgttgcaaaatgttaagtcgaactggcggagagttgccatcgtcaacatcattgtgctagttattctcatcttcgtttattcctgcggatgttgcgcgtataggaacccagaaagggttggctatcgcaaatcttacgcgtaa

SEQ ID NO: 3850 - protein, 264 aa, Physcomitrella patens subsp. patens
MGCSNYLTGFLNLATLVLSIPIIVFGVWLSKTQDTVCVRFLQYPIIAIGVFILLMSLAGMIGAFCDKKILLLLYLIVMFLLIVLLFCFTVFAFVVTHSGAGNVVSGKGYKEYRLGDYSNWLQRKVNDTAYWSKIESCIADSKVCNNLATKYTSVDAFNKAALTPLESGCCKPPSDCNFIFGKNATDWVGTGSAAPDTDCRSWNSQDLCLKCNACKAGVLQNVKSNWRRVAIVNIIVLVILIFVYSCGCCAYRNPERVGYRKSYA

SEQ ID NO: 3851 - DNA, 819 bp, Physcomitrella patens subsp. patens
  CDS (1)..(819)
atggacgatgtgtatcttaaagatgaaaaaccagtcagtaacactgtctcttttgtcaaggggattaatgctctggctgtgttgcttgcgatagcccttctatcactaggtatatggctagcaacgaggcctggcgattgtgagaagtacgcgacggtaccagtatttcttgctggcgctttctttttacttgtagcggtgctgggtcttttcggctcctggtttgcaattatacctatcttgtatacctatctggtgttgacgtttgcgacgcttatcgggtttctaattttgacaatattcatatttgctgtaacgagcaaaggaggtggctatgcagttgctggtcaaacctttcaagagtataaagtgagcgattactcaaactacgttcaagataggcttaacagggtttcaaactggaatcacatcaaggctgtcattgctgcaagcgacagctgtgcaaaatttgatcaaatctcgcctgtagattatccttactcgaacttggatccgatacaatctggttgctgtcgacctcctgcagaatgtggatacgccatgtctggtcgtggtactttcactacaacgtcagtgcctttgtctgctaatccggattgtcaaagatactcgaacgatgcgtcgataaaatgttacgactgtgattcttgcaagggtggagtggcgcaagatttaaagaaaactgggcgagttgcaggcattattactcttgtcatttttttcgctttggttgcgattttggtagtggcttgttccgtgggacatcgatttgcacgggaaaattttcatagagtataa

SEQ ID NO: 3852 - protein, 272 aa, Physcomitrella patens subsp. patens
MDDVYLKDEKPVSNTVSFVKGINALAVLLAIALLSLGIWLATRPGDCEKYATVPVFLAGAFFLLVAVLGLFGSWFAIIPILYTYLVLTFATLIGFLILTIFIFAVTSKGGGYAVAGQTFQEYKVSDYSNYVQDRLNRVSNWNHIKAVIAASDSCAKFDQISPVDYPYSNLDPIQSGCCRPPAECGYAMSGRGTFTTTSVPLSANPDCQRYSNDASIKCYDCDSCKGGVAQDLKKTGRVAGIITLVIFFALVAILVVACSVGHRFARENFHRV

SEQ ID NO: 3853 - DNA, 807 bp, Physcomitrella patens subsp. patens
  CDS (1)..(807)
atggggtgcagtaatgtcgtaactggggtggtgaatttcctcatgttgatgctgttgttgccgataatcgggttcggggtttggttggcgaagaagcatgattctgagtgcgtgcggttcctgcaatggccggtcattgttctgggaatgtttgttctggtggtttcaatggcgggactctttgggtcctggtgcgggaacaggcctctcatgtggacttacctgttcgtcatgtttgtccttattttcctgctcttcgtcttgacacttcttgcattcgtcgtcaccaattctggagcaggacgagttgtgtcagggaaaggattcaaagagtataagcttggagattactccaactggttgcagaagcgggtggataaccctttatattggtccaagattaagagctgcttagctgatggtcaggtgtgcagcgatctatctcagtatgccacagcagatgtcttcaataacgcatctcttacccctgttgagtctggatgctgcaagccaaaatcagactgcgggtacacctttcagaatgccacaacctggctcggaaactcatcagggagtgcaaacgctgactgccgagcttggagcaacacccaaacccagctgtgttttgattgcaattcatgccgagctggtgtgctgcagaatgtgaagtccaactggcgcagagtcgcagtcgtcaacataattgtgcttgtgttcataatattcgtctattcctgtggatgctgcgctttaaaaagctctaagcgagagcaagataatttcaagtacaggtatggatatgcttag

SEQ ID NO: 3854 - protein, 268 aa, Physcomitrella patens subsp. patens
MGCSNVVTGVVNFLMLMLLLPIIGFGVWLAKKHDSECVRFLQWPVIVLGMFVLVVSMAGLFGSWCGNRPLMWTYLFVMFVLIFLLFVLTLLAFVVTNSGAGRVVSGKGFKEYKLGDYSNWLQKRVDNPLYWSKIKSCLADGQVCSDLSQYATADVFNNASLTPVESGCCKPKSDCGYTFQNATTWLGNSSGSANADCRAWSNTQTQLCFDCNSCRAGVLQNVKSNWRRVAVVNIIVLVFIIFVYSCGCCALKSSKREQDNFKYRYGYA

SEQ ID NO: 3855 - DNA, 819 bp, Physcomitrella patens subsp. patens
  CDS (1)..(819)
atggataccgtttacgtgaaatcgggtcagcacgtcagatcaagggccgttctcattgccgttattaatgttatcgctgtgctagccgcgctagccctcatatcattaggtatatggttggcaacgagacctggtgattgtgaaaagtatttgactgtcccagtgtttctccttggagctttcttcctacttgtggccgtgctgggtgtctccggttcctggttcggatttgtccctgtcctgtatacctacttggtgctgatgtttgtggtggcactcgggtttctggccttgtcgattttcatattcgctgtaactagtccagggcagggctactatgttgcaggtcaaaacttcaaagagtacaggataagcgactactcacagtacatgcaagacaggttagacaaggtctccaactggaaccatctgaaggctgtcattgcatcccacgatacttgcgcttatttcgacaacctctcgccagtagattatccgtacgcgcaaccaagtccggtacagtctggctgctgtcgtcctcctgcagaatgtggctatgcgtacaccgggaacggtaccttcaccaccacatctgtgccgctgtccgccaacccagactgcgttagatacacaaatgacgaaacgattaagtgttacgactgcgattcttgcaagggtggagtggcagaggacctaaggaagactggaaaaatcgcgggcattgttacgctggtgctcttcgtgattctggtggccattttgttggtggcttgtactgtgggccaccacatccgaagggaatactggagcagagtgtaa

SEQ ID NO: 3856 - protein, 272 aa, Physcomitrella patens subsp. patens
MDTVYVKSGQHVRSRAVLIAVINVIAVLAALALISLGIWLATRPGDCEKYLTVPVFLLGAFFLLVAVLGVSGSWFGFVPVLYTYLVLMFVVALGFLALSIFIFAVTSPGQGYYVAGQNFKEYRISDYSQYMQDRLDKVSNWNHLKAVIASHDTCAYFDNLSPVDYPYAQPSPVQSGCCRPPAECGYAYTGNGTFTTTSVPLSANPDCVRYTNDETIKCYDCDSCKGGVAEDLRKTGKIAGIVTLVLFVILVAILLVACTVGHHIRREYWSRV

SEQ ID NO: 3857 - DNA, 810 bp, Physcomitrella patens subsp. patens
  CDS (1)..(810)
atggcgttcagtaatgtggtgatgatcgtgctgaacttcctctcaatgatattgtcgttgccgataattgctttcggggtgtggttggcgaagaagggcgacacggagtgcgtgcggttcctgcaatggccgattattgtgctcggagtatttgtgcttgtgttgtcgctctcgggcttgattgggtcttggtgcgggaacagggttttgatgtattcttacctgttcatcatgtttctcctcattttgctactcttcgtcttcacgattttcgcattcgtcgtcaccaattctggggcggggaaaactgtgtccgggaaaggttataaggagtacaggcttggggattactccaattggttgcagaagcgggtggacaacccaaagtattggtccaaaattaagagctgcctagtagatggcaaggtgtgcagcgaccttaccaagtatacgtcggctgccagcttcagcaaggcgcccctcactcctctcgagtctggatgctgtaagccaccaacagaatgtgggttcaccttcgataacgccacgacctgggttggcaaaccaccatcaaccgttagcaacattgactgtggacaatggagcaacatccaaaccaagctatgtttcgactgcagtacttgtcgagctggggtgctgcagaacgtgaagtccaactggcgtagggtcgccgtggtgaacattattgtgctggtgttcattattttcgtttattcatgtgggtgctgtgctctgaaagcttctcgcagagagcgggccaatcacaagtacaggtatgggtatgcctag

SEQ ID NO: 3858 - protein, 269 aa, Physcomitrella patens subsp. patens
MAFSNVVMIVLNFLSMILSLPIIAFGVWLAKKGDTECVRFLQWPIIVLGVFVLVLSLSGLIGSWCGNRVLMYSYLFIMFLLILLLFVFTIFAFVVTNSGAGKTVSGKGYKEYRLGDYSNWLQKRVDNPKYWSKIKSCLVDGKVCSDLTKYTSAASFSKAPLTPLESGCCKPPTECGFTFDNATTWVGKPPSTVSNIDCGQWSNIQTKLCFDCSTCRAGVLQNVKSNWRRVAVVNIIVLVFIIFVYSCGCCALKASRRERANHKYRYGYA

SEQ ID NO: 3859 - DNA, 1083 bp, Oryza sativa subsp. indica
  CDS (1)..(1083)
atggggcggttctccaatggcgtcctgggcgccctgagcttcgccgccctcctcgcctccgtgccgctcatcggcgcgggcgcctacctcctcgaccacccggccagcgagtgccagcgccttgtgcgggtgcccgccgtggcgctcggcagcgcggcgctcctcctctccctcatggcgatcgccggagttacctgctgccacggcgcggcgctcctctgggcctacgcgtccgccatgtttctgctcatcgtcggcatgttcttcgtcaccgccttcgtgttcgtcgtcaccaacaggggcgtcgccaccgccgtgtccggcaccggctacggggactaccgggtcagggactactcggagtggctgcgtgccaggatcgaggattacgagacgtggcaccggatcgagagctgcatggccgacgcggccgtgtgcggcggccctctcgccgggatcaaccccggcgagttctaccgtctgcatctgccgctaatccagtgtgaactaaacacaaccgtagtatctgactacctctgtgacgtgacaaccgtgcagtccggctgctgcaagccgccggtgtactgcgggtacgagcgcgtgaacgagacgttctggatagcgccggcgcggggcctggacgcggcggacgtcgactgcctggagtggagcaacgaccaggccgtgctgtgcttccgctgcaacgcctgcaaggccagtgtgctggacaccgtcaggcgaaactggagggccgtggccgtgctcaacgtcgccgtcctcgccatcctcatgctcgcctactccctcgcctgctgctccgtgcgggatcgcagccgttcatcgtgtcctgccatggctacagcgccaacaacaaccccatcggtgtgtgaccgtcgtgtcctactgaaaaggcaagggattagttctgaggaggccaataagatggttgccgtggcaaaagaagcagttgcgattgagaattcacaagttgtcaatgaacaagaatcggttgttacgaaccaggatgtcatagaagaacaattgctgcttcccaatcttcatctcaattactgtcacaactag

SEQ ID NO: 3860 - protein, 360 aa, Oryza sativa subsp. indica
MGRFSNGVLGALSFAALLASVPLIGAGAYLLDHPASECQRLVRVPAVALGSAALLLSLMAIAGVTCCHGAALLWAYASAMFLLIVGMFFVTAFVFVVTNRGVATAVSGTGYGDYRVRDYSEWLRARIEDYETWHRIESCMADAAVCGGPLAGINPGEFYRLHLPLIQCELNTTVVSDYLCDVTTVQSGCCKPPVYCGYERVNETFWIAPARGLDAADVDCLEWSNDQAVLCFRCNACKASVLDTVRRNWRAVAVLNVAVLAILMLAYSLACCSVRDRSRSSCPAMATAPTTTPSVCDRRVLLKRQGISSEEANKMVAVAKEAVAIENSQVVNEQESVVTNQDVIEEQLLLPNLHLNYCHN

SEQ ID NO: 3861 - DNA, 825 bp, Oryza sativa subsp. indica
  CDS (1)..(825)
atggccctcaactatgtgggcttggcggccatcaacctggtggctgcgctgctctccatccctgtcatcgccgccggtatctggctctccgcacaggtggacagcgcctgcgtccaactgctccagtggccgctgatcggcctcggcgtcgccgtcctcgccgtcggtctcgccggcttcgtcgccgccttctggcgcctgccctggcttctcctcgcctacttggtcggcatgctcctcctcgtggtggcgctcgcctgcctcgctgtcttcgtcttcgtcgtcaccggcggcgcgtcgtcgggtggtcacaccgtgcccagccgggccttcctcgagtacgagctcgacgatttctcgggcagctggctacgcggccgcgtggacgagcctgcaggcagatgggagcagatcaagacgtgcctggccgccacgcccatctgctccgacgtcaaccagacatacgccacggcgcaggatttcttctccgcctcctggctcaccccgctgcagtccgggtgctgcaagcctcccaccaggtgtggctacaccttcgtcaccccgatctcgtggattagccccatcagcgccgccgccgacccggattgcggcgcctggagcaacgacccttctcagctctgctactcctgctcctcctgcaaggctggccttctccacaacctcagcagggagtggcgccgagctgatctcatcctcctcgtcgccaccgtcgcgctcctcgccgtctacgcattcgcctgctacgccttccgtaccgccaagaccgacgacctcttccgccgctacaggcagggctacacgtaa

SEQ ID NO: 3862 - protein, 274 aa, Oryza sativa subsp. indica
MALNYVGLAAINLVAALLSIPVIAAGIWLSAQVDSACVQLLQWPLIGLGVAVLAVGLAGFVAAFWRLPWLLLAYLVGMLLLVVALACLAVFVFVVTGGASSGGHTVPSRAFLEYELDDFSGSWLRGRVDEPAGRWEQIKTCLAATPICSDVNQTYATAQDFFSASWLTPLQSGCCKPPTRCGYTFVTPISWISPISAAADPDCGAWSNDPSQLCYSCSSCKAGLLHNLSREWRRADLILLVATVALLAVYAFACYAFRTAKTDDLFRRYRQGYT

SEQ ID NO: 3863 - DNA, 819 bp, Oryza sativa subsp. indica
  CDS (1)..(819)
atggcggtgagcaacaacatcacggcgtgcgtcaacttcctggcgctggtgtgcgccgtcccggtggtggccacgggcgtctggttcgcctccaagcagggcgacgactgcgcccgcgtcgcgcgctggccgctcgctatcctcggcgccgccctcctcctcgtcgccctcgccggcttcgccggcgcctactggaaccgccggggcctcctcgccgcctacctcttcgccatggccgcgctcatcaccctcctcctcgccctcctcgtcttcgccttcgccgtcacccgcccctccggcgcctaccccgccttcgcccgcgcctacgacgactaccgcctcgacggctactccacctggctgcgggaccgcatcgccggcgaccctcgccggtgggaggggatcagggcttgcctcgccgcctccgacacctgcaggaagctggcgcaggagagcgtcttcttcatcacccccgagcagttctaccaatcacacctcaccccgctccagtccggctgctgcaagcctccgacggtgtgcgggtacgcgtacgtgagcccgacggtgtgggtgaacccggcgaacccggctgcggacgcggactgcgccgcgtgggggaacgacccgtcgcagctctgctacgagtgcagctcctgcaaggccgggatgctgggcaccctgcgggagcagtggcgcagggccaacgtcgccctcgtcatcgccaccgtcgcgctcatcttcttctacgtcatcggctgcagcgccttcaagaacgcgcagaccgaggacctcttccgccgctacaagtggcgcaactga

SEQ ID NO: 3864 - protein, 272 aa, Oryza sativa subsp. indica
MAVSNNITACVNFLALVCAVPVVATGVWFASKQGDDCARVARWPLAILGAALLLVALAGFAGAYWNRRGLLAAYLFAMAALITLLLALLVFAFAVTRPSGAYPAFARAYDDYRLDGYSTWLRDRIAGDPRRWEGIRACLAASDTCRKLAQESVFFITPEQFYQSHLTPLQSGCCKPPTVCGYAYVSPTVWVNPANPAADADCAAWGNDPSQLCYECSSCKAGMLGTLREQWRRANVALVIATVALIFFYVIGCSAFKNAQTEDLFRRYKWRN

SEQ ID NO: 3865 - DNA, 822 bp, Oryza sativa subsp. indica
  CDS (1)..(822)
atggcgccgcggtgcagcaacgccgtcttcgcggccttcaacgtcgtcacgctcctcctgggcgccgccgtcctcgccgcggggatctactacggcgccccgcaccgcggcggcggcggcgtcaccgagtgcgagcggttcctccgcgcgccggcgctcgccctcggcggcgccatcgtggccgtgtccctggcggggctcgccggcgcgtgctgccgcgcgacgccgctgctgtgggcctacctcctcctgacgggcctcctcatcctcgccgccgcctgcttcggcgtgttcgcgctcgtcgtcaccaacgccggcgccgggcgggccgtgtccgggagagggttcagggagtaccacctcggcgactactcgacgtggctccggcggagggtggaggacggcggccactgggcgaggatcaggagctgcctcgtcgacaccggcgtgtgccggagattgaagagcaaccagacgctcgacgaattcgtcaactccaacctctcgccgctgcagtctggatgctgcaagccaccaacagcatgcaacttcacataccagaacgagacatactggatcaagcctcctacacccagcaactactcagaccctgactgcaactcctggtcgaacgaccagtctgagctctgctacggctgccagtcctgcaaggccggtgttcttggcaacctgaggagcagctggaagaagatcgccttcgccaacgccgccttcgtcgcgctcctcctcgtcgtctactccctcggctgctgcgcgctccggaacaaccggcggcacaagtactcgctggttgggaaatga

SEQ ID NO: 3866 - protein, 273 aa, Oryza sativa subsp. indica
MAPRCSNAVFAAFNVVTLLLGAAVLAAGIYYGAPHRGGGGVTECERFLRAPALALGGAIVAVSLAGLAGACCRATPLLWAYLLLTGLLILAAACFGVFALVVTNAGAGRAVSGRGFREYHLGDYSTWLRRRVEDGGHWARIRSCLVDTGVCRRLKSNQTLDEFVNSNLSPLQSGCCKPPTACNFTYQNETYWIKPPTPSNYSDPDCNSWSNDQSELCYGCQSCKAGVLGNLRSSWKKIAFANAAFVALLLVVYSLGCCALRNNRRHKYSLVGK

SEQ ID NO: 3867 - DNA, 813 bp, Oryza sativa subsp. japonica
  CDS (1)..(813)
atggcggtgagcaacaacatcacggcgtgcgtgacgctgatggcgctgatctgcgccgtcccggtgatcgcctcgggcgtgtggttcgcgtcggcgcagggggaggagtgcgcccgcctggcgcggtggccggtggccatcctggggggcctcatcctccttgccgccctcgccggcttcgtcggcgcctactggaaccgccgccgcctcctcgcgttctacctcttcgccatggcgtcgctcatcgcgctgctcatcgcgctcctcgtcttcgccttcgccgtcaccccgcggctccggcgcctacccggtgctcggccgcgcctacgacgagtacacctcgatggcttctccatgtggctccggggctacgtctccgacgacccggcgcggtgggagcggatcaaggcgtgcctcgtcgtctccgaaacctgcaagaagctggcgcgccaggccgggttcctcaccgccgaccagttctaccagtcgcgcctctcgccactccagtccgggtgttgcaagccgccggcggtgtgcgggtacaactacgtgagcccgacggtgtgggcggggccggcggcgcggccggcggcggacgcggactgcggggcctgggggaacgacccgtcgcagctgtgctacgagtgcgagtcgtgccgcgcgggcctcctcgcggcgctccgcgcccagtggcaccgcgccaacgtcgccctcgtcgtcgccaccgtcgccctcgtcttcctctacctcgtcggctgcagcgcctacaagaacgcccaggccgaggccctcttccgccgctacaagtggtag

SEQ ID NO: 3868 - protein, 270 aa, Oryza sativa subsp. japonica
MAVSNNITACVTLMALICAVPVIASGVWFASAQGEECARLARWPVAILGGLILLAALAGFVGAYWNRRRLLAFYLFAMASLIALLIALLVFAFAVTPRLRRLPGARPRLRRVHLDGFSMWLRGYVSDDPARWERIKACLVVSETCKKLARQAGFLTADQFYQSRLSPLQSGCCKPPAVCGYNYVSPTVWAGPAARPAADADCGAWGNDPSQLCYECESCRAGLLAALRAQWHRANVALVVATVALVFLYLVGCSAYKNAQAEALFRRYKW

SEQ ID NO: 3869 - DNA, 894 bp, Oryza sativa subsp. japonica
  CDS (1)..(894)
atggcggtgagcaacaacatcacggcgtgcgtcaacttcctggcgctggtgtgcgccgtcccggtggtggccacgggcgtctggttcgcctccaagcagggcgacgactgcgcccgcgtcgcgcgctggccgctcgctatcctcggcgccgccctcctcctcgtcgccctcgccggcttcgccggcgcctactggaaccgccggggcctcctcgccgcctacctcttcgccatggccgcgctcatcaccctcctcctcgccctcctcgtcttcgccttcgccgtcacccgcccctccggcgcctaccccgccttcgcccgcgcctacgacgactaccgcctcgacggctactccacctggctgcgggaccgcgtcgccggcgaacctcgccggtgggaagggatcagggcttgccttcgccgcttcgacacctggcaggaagctggcgcaggaagagcgtcttcttcatcacccccgagcagttctaccaatcacacctcaccccgctccagcacattgcagttcttttatgagtgtgcaaatcgtctaaagagaaaaggtgagggatccatggatggaaaggtgtcgggctgctgcaagccgccgacggtgtgcgggtacgcgtacgtgagcccgacggtgtgggtgaacccggcgaacccggctgcggacgcggactgcgccgcgtgggggaacgacccgtcgcagctctgctacgagtgcagctcctgcaaggccgggatgctgggcaccctgcgggagcagtggcgcagggccaacgtcgccctcgtcatcgccaccgtcgcgctcatcttcttctacgtcatcggctgcagcgccttcaagaacgcgcagaccgaggacctcttccgccgctacaagtggcgcaactga

SEQ ID NO: 3870 - protein, 297 aa, Oryza sativa subsp. japonica
MAVSNNITACVNFLALVCAVPVVATGVWFASKQGDDCARVARWPLAILGAALLLVALAGFAGAYWNRRGLLAAYLFAMAALITLLLALLVFAFAVTRPSGAYPAFARAYDDYRLDGYSTWLRDRVAGEPRRWEGIRACLRRFDTWQEAGAGRASSSSPPSSSTNHTSPRSSTLQFFYECANRLKRKGEGSMDGKVSGCCKPPTVCGYAYVSPTVWVNPANPAADADCAAWGNDPSQLCYECSSCKAGMLGTLREQWRRANVALVIATVALIFFYVIGCSAFKNAQTEDLFRRYKWRN

SEQ ID NO: 3871 - DNA, 810 bp, Vitis vinifera
  CDS (1)..(810)
  misc_feature (771)..(771): r is g or a
atggcactcaataacactgtcattggagcaatcaactttgtagctatgcttctctccattcccatcatcggcacggggatttggctatcaacagagcctgataattcttgtgtgaagatcctacaatggccagtcatcattttgggcgtcttgatcttggttgtggctctagcaggatttataggagggttttggagaatcccatggctccttctcttttaccttattgccatgctgatccttataattttgctggcctctttggtggttttcatttatatggttaccgttcgaggccatggccacatcgaaccaagtcgggcttacttggagtatcatcttgatgactactcaggatggcttcgcagaagagttcgaagttcctacaagtgggatcggattagaacctgtcttagctccacaaatatgtgtgcagagttgaaccagcgttatcggatggcccaggatttcttcaatgcacatattagtcccatacagtcgggatgctgtaagccaccaactgaatgcggatacacctttgtgaatccgagctactggattagccccatatacacagcagcggacatggattgcctgcagtggagcaacgagcagacacagttgtgctacaactgcaactcatgcaaagctgggttactggcaaatctgaagaaggaatggagaagagcagacattgttctactcataactctgattgctttgatagcagtttatttgatcgggtgttgtgcatttagaaatgctaaaacrgaagagctgtttcgcaagtacaagcaaggctatacgtaa

SEQ ID NO: 3872 - protein, 269 aa, Vitis vinifera
MALNNTVIGAINFVAMLLSIPIIGTGIWLSTEPDNSCVKILQWPVIILGVLILVVALAGFIGGFWRIPWLLLFYLIAMLILIILLASLVVFIYMVTVRGHGHIEPSRAYLEYHLDDYSGWLRRRVRSSYKWDRIRTCLSSTNMCAELNQRYRMAQDFFNAHISPIQSGCCKPPTECGYTFVNPSYWISPIYTAADMDCLQWSNEQTQLCYNCNSCKAGLLANLKKEWRRADIVLLITLIALIAVYLIGCCAFRNAKTEELFRKYKQGYT

SEQ ID NO: 3873 - DNA, 819 bp, Vitis vinifera
  CDS (1)..(819)
atgttcagactgagtaacaaccttgttggcatcctcaacttcatcaccttcctgctctcagtccctatcttgggagcgggaatatggctgagccaccgggccagcaccgactgcgagaagtttttggagaagcccgtgatagcgcttggtgtgtttctcatggtggtgtcactggcggggctgatcggggcctgttgcagagtgtcgtggcttctctgggtctacctactggtgatgtttctcttgatcgtgcttctcttctgcttcaccatcttcgcctttgtggtcactaacaagggtgccggagaggttttgtctgggaaggggtataaggagtataggctcggggattactccaattggctgcaaaagagggttaacaacaccaagaactggaacaggatcaagagctgtttgcaggatggcaaggtgtgtcagagcttgagccaggacaaggttggcgaaactgttcagcagttttatgcggagcagttgtctcccattcagtctggttgctgtaagccatcaaatgattgtggtttcacctatgtcactccgacttattggaacacgacgaacgcgcctgcatccaccaactctgactgttcttcgtggaataatgaccctaacactctgtgcttcaattgccaggcgtgcaaagccggagtgctggacaatctgaagcgtgattggaagaaggttgccattatcaacattatattccttgttttcctcattatcgtatactccattggatgctgtgcattcaggaacaacagagaggacaatgctcaacccagatggaagccatacccttga

SEQ ID NO: 3874 - protein, 272 aa, Vitis vinifera
MFRLSNNLVGILNFITFLLSVPILGAGIWLSHRASTDCEKFLEKPVIALGVFLMVVSLAGLIGACCRVSWLLWVYLLVMFLLIVLLFCFTIFAFVVTNKGAGEVLSGKGYKEYRLGDYSNWLQKRVNNTKNWNRIKSCLQDGKVCQSLSQDKVGETVQQFYAEQLSPIQSGCCKPSNDCGFTYVTPTYWNTTNAPASTNSDCSSWNNDPNTLCFNCQACKAGVLDNLKRDWKKVAIINIIFLVFLIIVYSIGCCAFRNNREDNAQPRWKPYP

SEQ ID NO: 3875 - DNA, 858 bp, Vitis vinifera
  CDS (1)..(858)
atgagaactagcaaccacttgatcggattactaaacttcttgacgttcctgctatcgatccccatactaggcggtggcatatggctgagcagcagagccaacaacaccgactgcatgaagttcctgcagtggccgttgatcatcatcggagtggccatcatggtcatctccctcgccggattcgccggagcttgttaccggaacaccttcctcatgtggttctacctgtgggccatgttcttcgtcatcgctgctctagtcggcttcgtgatcttcgcctacgctgtcacggacaaaggttcaggtcgggcgatgccgaaccgggtttatctggactattatctgcaggactactccggttggctggaggagcgcgtatcagatgatagctactggaggaagatcagctcatgtgtaagggactccaaggagtgtgcaaagatggggaggaacatcggcggtgttcccgagtcagccgatttgttttaccgcagaaaactcagccctatcgagtcaggatgctgcaagccccctacagaatgcgattatgtatacgtaaacgagacggtttggaccactgggaatgggatggtgggaagcaactctgattgctatagttggagcaacgatcaggggcaactgtgctattcctgcaactcttgcaaagctggtgtgctggccagcctcaagaagagctggaggaaggtttcggtcatcaacattgtcatattgatcatcctggttattgtttatgtggttgcctgtgcagctttccgcaacaatcgccgaatcgataatgatgaggcatatggtgaaacaaggatgacaaagtctcaacctagtaggatccagttttaa

SEQ ID NO: 3876 - protein, 285 aa, Vitis vinifera
MRTSNHLIGLLNFLTFLLSIPILGGGIWLSSRANNTDCMKFLQWPLIIIGVAIMVISLAGFAGACYRNTFLMWFYLWAMFFVIAALVGFVIFAYAVTDKGSGRAMPNRVYLDYYLQDYSGWLEERVSDDSYWRKISSCVRDSKECAKMGRNIGGVPESADLFYRRKLSPIESGCCKPPTECDYVYVNETVWTTGNGMVGSNSDCYSWSNDQGQLCYSCNSCKAGVLASLKKSWRKVSVINIVILIILVIVYVVACAAFRNNRRIDNDEAYGETRMTKSQPSRIQF

SEQ ID NO: 3877 - DNA, 810 bp, Vitis vinifera
  CDS (1)..(810)
atggccgtcagcaacaacatcaccgcagtcctcaacttcttagcactcctctgctcaattcccataatcgccgccgggatctggctggcgtccaagccggacaacgagtgcatccacctcttccgctggccggtggccctcctcggcgtcctcatcttgctcgtctccctcgctggattcgtcggcgcttactggaacaagaagggccttctggccttctacctcttctgtatggggctcctcatcggcctcctcctcatcctcctcgtcttcgccttcgtcgttagtcattccgacggcagctacgtcgtccccggccgcgcctacaaggagtaccggctggaagggttctcgtcgtggctgaggaactacgtcaccaagtccggaaactggaacaagatcaggacttgcctcgctcagtccgatgtctgctccaagctcagccagaactatatcaccgccgatcagttcttcatggctcacatctctcctcttcaggcaaggtgttgtaaacctccaacaatctgcaattatgggtatgtgaacccaacattgtggatgaaccccaccaatccgattgcagactcggactgttatgcctggagcaatgaccaaagccaattgtgctatgggtgcaattcctgcaaggctggtttgttggggaacctgaggaaggaatggaggagagccaatgtgattttgatagtggcagtggtggtgctgatatgggtttacctcattgcatgcagtgcattcaagaatgctcagacagaggatctcttccgcagatacaagcagggttgggcctag

SEQ ID NO: 3878 - protein, 269 aa, Vitis vinifera
MAVSNNITAVLNFLALLCSIPIIAAGIWLASKPDNECIHLFRWPVALLGVLILLVSLAGFVGAYWNKKGLLAFYLFCMGLLIGLLLILLVFAFVVSHSDGSYVVPGRAYKEYRLEGFSSWLRNYVTKSGNWNKIRTCLAQSDVCSKLSQNYITADQFFMAHISPLQARCCKPPTICNYGYVNPTLWMNPTNPIADSDCYAWSNDQSQLCYGCNSCKAGLLGNLRKEWRRANVILIVAVVVLIWVYLIACSAFKNAQTEDLFRRYKQGWA

SEQ ID NO: 3879 - DNA, 819 bp, Vitis vinifera
  CDS (1)..(819)
atgttcagactgagtaacaaccttgttggcatcctcaacttcatcaccttcctgctctcagtccctatcttgggagcgggaatatggctgagccaccgggccagcaccgactgcgagaagtttttggagaagcccgtgatagcgcttggtgtgtttctcatggtggtgtcactggcggggctgatcggggcctgttgcagagtgtcgtggcttctctgggtctacctactggtgatgtttctcttgatcgtgcttctcttctgcttcaccatcttcgcctttgtggtcactaacaagggtgccggagaggttttgtctgggaaggggtataaggagtataggctcggggattactccaattggctgcaaaagagagttaacaacaccaagaactggaacaggatcaagagctgtttgcaggatggcaaggtgtgtcagagcttgagccaggacaaggttggcgaaactgttcagcagttttatgcggagcagttgtctcccattcagtctggttgctgtaagccatcaaatgattgtggtttcacctatgtcactccgactaattggacctcgacgaacgcggctacatacaccaactctgactgttctttgtggaataatgagcctagcattctgtgcttcaattgccaggcgtgcaaagccggagtgctggacaatctgaagcgtgattggaagaaggttgccattatcaacattatattccttgttttcctcattattgtatactccattggatgctgtgcattcaggaacaacagagaggacaatgctcaacccagatggaagccatacccttga

SEQ ID NO: 3880 - protein, 272 aa, Vitis vinifera
MFRLSNNLVGILNFITFLLSVPILGAGIWLSHRASTDCEKFLEKPVIALGVFLMVVSLAGLIGACCRVSWLLWVYLLVMFLLIVLLFCFTIFAFVVTNKGAGEVLSGKGYKEYRLGDYSNWLQKRVNNTKNWNRIKSCLQDGKVCQSLSQDKVGETVQQFYAEQLSPIQSGCCKPSNDCGFTYVTPTNWTSTNAATYTNSDCSLWNNEPSILCFNCQACKAGVLDNLKRDWKKVAIINIIFLVFLIIVYSIGCCAFRNNREDNAQPRWKPYP

SEQ ID NO: 3881 - DNA, 849 bp, Vitis vinifera
  CDS (1)..(849)
atgtataggttcagcaacacagtgatcggcttcttgaacttgttcactctcttggcgtcgatacccatcatcgggggagggctatggatggcaaggagcagcacaacatgtgaaagctttctgcaaacaccacttctggtggttggttttgtggttttgataatatctcttgcaggcttcattggtgcctgctttaacgttgcatgggcactctggttgtacttggtggtcatgttattcctcattgggaccttactgggcttaaccatatttggcttcgtcgtcaccagccaaggcggcggcgtggaagttcccggtagggtttataaggagtaccagctggagaagtattcttcatggttgaagagcagaatcaaggatccccattactggagcaccatcaggagctgcatattgggttcaaacacttgtgcccagattgcttcttggactcctctcgattatctggagagggacatgactcctattcagtcgggttgttgcaagccaccaacatcatgcaactatgccacggcaacgatgatgacccaagacgcggactgctaccgatggaacaacgccccgaatttgctgtgctacgagtgcgattcgtgcaaggccggggtgctggaacacataagaagagattggcacaagctctcagttctcaacattgtgatgctggtcttgctcattggcatctactcaattggatgctgtgctttcagaaacacgagaagatccgaaaccgattacccatacggcgaaaaccggatgtccaaagtccgacccagatgggatttctactggtggagatggtggtacgacagaaaaaaccagctttactag

SEQ ID NO: 3882 - protein, 282 aa, Vitis vinifera
MYRFSNTVIGFLNLFTLLASIPIIGGGLWMARSSTTCESFLQTPLLVVGFVVLIISLAGFIGACFNVAWALWLYLVVMLFLIGTLLGLTIFGFVVTSQGGGVEVPGRVYKEYQLEKYSSWLKSRIKDPHYWSTIRSCILGSNTCAQIASWTPLDYLERDMTPIQSGCCKPPTSCNYATATMMTQDADCYRWNNAPNLLCYECDSCKAGVLEHIRRDWHKLSVLNIVMLVLLIGIYSIGCCAFRNTRRSETDYPYGENRMSKVRPRWDFYWWRWWYDRKNQLY

SEQ ID NO: 3883 - DNA, 795 bp, Vitis vinifera
  CDS (1)..(795)
atgggtgttggaaccagtacctttgtgatcagatggatcaactttctcaccatgcttttagctgtaggtgttataggttttggggtatggatgagcactcatcacgacggctgtcgaaagtcgcttacactccctgttctaggccttggtgccttcatctttctgatatctataatcgggttcatgggcgcattgaagaacaactccatactgctatggatttatttgatcatgttgtgcttcattttggtggcaattctcgtcttcacagtattggcgttcattataacaaataatggatctggtcataatgtagctggtttgaggtacaaggagtatcagcttcaagattacagttcatggtttctaaaacagctgaacaatacacgtaactggaagcacttgaaaagctgtcttgtgaaatctgaagactgcaataacctgtccaaaaaatataagactcttaagcaatataagattgcaaaattaacccccattgaggctggttgctgtcgaccaccatctgaatgtggatatccagctgtcaatgcttcatactatgacttgagctttcacccaatcagttccaacaaagattgcaaactctacaagaattcccgagcaatcaagtgctacaattgtgattcctgcaaggctggagttgcacaatacatgaaaactgaatggagagtggttgccatctttaatgtggttctctttgttgtcttgtcaatggtctacttggtgggatgctgtgcaagacgaaatgctacaagcagccgctctaaagcttga

SEQ ID NO: 3884 - protein, 264 aa, Vitis vinifera
MGVGTSTFVIRWINFLTMLLAVGVIGFGVWMSTHHDGCRKSLTLPVLGLGAFIFLISIIGFMGALKNNSILLWIYLIMLCFILVAILVFTVLAFIITNNGSGHNVAGLRYKEYQLQDYSSWFLKQLNNTRNWKHLKSCLVKSEDCNNLSKKYKTLKQYKIAKLTPIEAGCCRPPSECGYPAVNASYYDLSFHPISSNKDCKLYKNSRAIKCYNCDSCKAGVAQYMKTEWRVVAIFNVVLFVVLSMVYLVGCCARRNATSSRSKA

SEQ ID NO: 3885 - DNA, 810 bp, Picea sitchensis
  CDS (1)..(810)
atggttcgtttcagcaacaatgtcatcggaatcctcaacttcatcacgttcgtgctgtcgatcccgatcctgggaggcgggatatggctggccaacagggcaagcactgactgcgagaagtttcttgaaaagccggtgatagccatcggggttttcctcatggtggtctctatcgccggcctgataggggcctgctgcagggtctcatggctgctgtgggtgtatctgttggccatgttcttgcttatagttctgctcttctgcttcacggtcttcgccttcgtggtgaccaacaagggcgtgggggaggtggtttcgaaccggggatacaaggaataccgcctgggagattattccaactggcttcagaagcgcgttgagaatacagccaactggaaaaggatcaggagctgcattatagatgccaaggtctgcaaaagccttgcagacgaaagcgtaaacaaggctgcagatgctttctacaaggaaaatttatcaccgatccagtcgggctgctgcaaacccccgacctcgtgcggcttcacctacgtgagtccgatcatgtggaacggtacggcgaccgacacgtcgaatacagactgtaactcgtggaacaatacccagtcgcagttgtgctatgactgcaactcgtgcaaggccggggttcttcagaacctgaaacacgactggcgaaaggtggcggctgtcaatatagtgatgctaatcttcctcgtcatcgtctacagcgtcggctgctgcgccttcaggaacaacaggcacgacaacagttatgggaagggctatccctaa

SEQ ID NO: 3886 - protein, 269 aa, Picea sitchensis
MVRFSNNVIGILNFITFVLSIPILGGGIWLANRASTDCEKFLEKPVIAIGVFLMVVSIAGLIGACCRVSWLLWVYLLAMFLLIVLLFCFTVFAFVVTNKGVGEVVSNRGYKEYRLGDYSNWLQKRVENTANWKRIRSCIIDAKVCKSLADESVNKAADAFYKENLSPIQSGCCKPPTSCGFTYVSPIMWNGTATDTSNTDCNSWNNTQSQLCYDCNSCKAGVLQNLKHDWRKVAAVNIVMLIFLVIVYSVGCCAFRNNRHDNSYGKGYP

SEQ ID NO: 3887 - DNA, 774 bp, Picea sitchensis
  CDS (1)..(774)
atggttttatcagtcttgattattggatctgggatatggctggcgtccaaacaggacaccgaatgcgtgaggtttctacgctggcctatcattaccataggagtcattctgctgctggtctctgcagcaggttttgtgggttcactctggagagtcccatatctgttagtcatatatctcatcttcatgtttgtgctcattattgtgctgttggccctggtgatatttgcctttgtggttacaaacaagggagggggacacgctgttgtaggcagaaactatgatgagtatcaactcaacgatttttcagggtggctgaggcattatgttgagaataccaaacagtggaataagattaaaagctgccttagttcttctaaactgtgcagtcagttggatcagaggtacccaagtgcccagtatttcttcagtgcacatctcaagcctctggagtcaggatgctgcatacctccatcagtttgtggttacagctttgtaaatccaacttattggataaacccagtcaatcaaaatgcagatattgattgtatgctgtggagcaatgaccagatgcagctatgctataactgcaactcttgcaaagccgggcttctggggaatctgaaaaaggaatggagaaaaataaacatcattttaattgtgacacttgtggctctcatatgggtgtatctcataggatgcagtgccttccgaaatgcccaaacagaagaacttttcaggcgttacaagcaaggcttttctggtattcgttga

SEQ ID NO: 3888 - protein, 257 aa, Picea sitchensis
MVLSVLIIGSGIWLASKQDTECVRFLRWPIITIGVILLLVSAAGFVGSLWRVPYLLVIYLIFMFVLIIVLLALVIFAFVVTNKGGGHAVVGRNYDEYQLNDFSGWLRHYVENTKQWNKIKSCLSSSKLCSQLDQRYPSAQYFFSAHLKPLESGCCIPPSVCGYSFVNPTYWINPVNQNADIDCMLWSNDQMQLCYNCNSCKAGLLGNLKKEWRKINIILIVTLVALIWVYLIGCSAFRNAQTEELFRRYKQGFSGIR

SEQ ID NO: 3889 - DNA, 819 bp, Picea sitchensis
  CDS (1)..(819)
atgatcaaaaacaaagtaactggagctataaattgcatcgcaatgctgttgtcgatacccataatcggtacaggaatatggttgtcgggcaagcaagataacgagtgcgtcaaattcttacaggggcccgtcatagccatcggcgtactgctttttctggttggactgtcaggattcataggggccttctggaacatccgatgtctgttggttttgtacttagtcttcatgtttatcctccttgttctgctcatggccctcgttatctttgtattccgtgtcaccgataagggccatggccacacccttccaaacagagcttacaggcaatacaatctctatgacttctccggttggttacgccgccgtgtacagagctccggcaggtggaatcatatcagaaactgcctcagctcctccactacgtgcagcaggttgaagcagagattcacttttgcccaggacttcttcaacggccgaattggccctctggagtctggatgctgtacaccgccgacagaatgtggatatgcatttgtgactccggtattttggataactcccgtcagccaagatgtggattctgattgcccgctatggaataacgagcagacgcagctgtgctacagttgcaattcttgtaaagggggtctgttggcaagcctcaaaagagaatggaggaaggccaatattgtattgttgatcattctagtggctctcattgggctctacgtggctttcattttgacgtatttacttcaacggcggcggcgcttacagggctctcagcagtccaacaatataaagcatgttgggtag

SEQ ID NO: 3890 - protein, 272 aa, Picea sitchensis
MIKNKVTGAINCIAMLLSIPIIGTGIWLSGKQDNECVKFLQGPVIAIGVLLFLVGLSGFIGAFWNIRCLLVLYLVFMFILLVLLMALVIFVFRVTDKGHGHTLPNRAYRQYNLYDFSGWLRRRVQSSGRWNHIRNCLSSSTTCSRLKQRFTFAQDFFNGRIGPLESGCCTPPTECGYAFVTPVFWITPVSQDVDSDCPLWNNEQTQLCYSCNSCKGGLLASLKREWRKANIVLLIILVALIGLYVAFILTYLLQRRRRLQGSQQSNNIKHVG

SEQ ID NO: 3891 - DNA, 849 bp, Picea sitchensis
  CDS (1)..(849)
atgaatcacgccacgaacagcatagtggggttgataaatttcttgacgttcttactgtcgatcccgatcgtgggggccgggatatggctggccactagacatagcggcgattgcctaaggtttcttcagtggcccatcataataatcggggcggccatcatgctgctatctctggcgggctttatgggggcgtgttttagagtgacatccctcatgtggctctatctattcttcatgtttctactgttgctagcctacctggtattcatcatattcgccttcgcggttgctgggaagggccacggccactctgtgcccgggacgggcttcgaggaatacaagctccacgatttctccacctggcttcaagatcgcgtcaggagctccggaagctggaacaacatcaggtcttgtgttcgagacgctggggtgtgcaggaagctcggacagaagagtatgtacgagagctctgccggtttctatcaggagcatttgactccaattcagtcgggttgttgcaaaccaccaaccccttgtggatacacctatgtaaatgcaacattttggactgggacaatttcatacgcagattctgactgtagtaaatggagtagtgatgaccaaagtcagctttgttatgattgtgattcatgcaaagctggtgttttggcaaatttgaagcatgactggcataaggtgtctgttctgaacattgtgattttcatattgcttgtagtggtgtatgttattggatgcggtgctttcagaaataacttaagaagggacaattatgagtctcagggagaagccaggatgacaaagtcccagcctagtaggctacccttctga

SEQ ID NO: 3892 - protein, 282 aa, Picea sitchensis
MNHATNSIVGLINFLTFLLSIPIVGAGIWLATRHSGDCLRFLQWPIIIIGAAIMLLSLAGFMGACFRVTSLMWLYLFFMFLLLLAYLVFIIFAFAVAGKGHGHSVPGTGFEEYKLHDFSTWLQDRVRSSGSWNNIRSCVRDAGVCRKLGQKSMYESSAGFYQEHLTPIQSGCCKPPTPCGYTYVNATFWTGTISYADSDCSKWSSDDQSQLCYDCDSCKAGVLANLKHDWHKVSVLNIVIFILLVVVYVIGCGAFRNNLRRDNYESQGEARMTKSQPSRLPF

SEQ ID NO: 3893 - DNA, 810 bp, Populus trichocarpa
  CDS (1)..(810)
atggcactgagcagtaatgttattggtgctataaactttgttgccatgcttctctccattccgattatcggtgctgggatctggctagcaatggaaccagacaactcttgtgtcaagattctacaatggcctatcattattttgggaatactaatcttaatagtagctcttgcaggcttcgtgggaggtttttggagaatcccatggctccttatttcttatctcattgccatgctcatccttataatattgcttgcatgtctagtggttttcatctacatggtcactgttaggggttcgggtcaccttgaacccagcagagcctacttggagtatcgtcttgatgacttttcaggttggcttcgccggagggttcagagttcatataagtgggatcggataagaggctgccttagctcaaccaatatgtgtgctgagttgaaccagagttatcgcatggctcaagatttcttcaacgctcatattagccccttacagtcaggatgctgtaagcccccaacccaatgtgggtatacatttgtgaatccaacgtattggattagtcccattaacaacgctgcagatatggactgcctgcaatggaacaatgaccaaaatcaactttgctacaattgcgattcatgcaaggccgggttgctggctaatttgaaagaggaatggagaagggcagatatcatattgctcattactcttgttgccttaatatgcgtatacttggtaggctgttgtgcctttaggaatgccaagacagaagatttgttccgcagatacaagcaaggttatacatag

SEQ ID NO: 3894 - protein, 269 aa, Populus trichocarpa
MALSSNVIGAINFVAMLLSIPIIGAGIWLAMEPDNSCVKILQWPIIILGILILIVALAGFVGGFWRIPWLLISYLIAMLILIILLACLVVFIYMVTVRGSGHLEPSRAYLEYRLDDFSGWLRRRVQSSYKWDRIRGCLSSTNMCAELNQSYRMAQDFFNAHISPLQSGCCKPPTQCGYTFVNPTYWISPINNAADMDCLQWNNDQNQLCYNCDSCKAGLLANLKEEWRRADIILLITLVALICVYLVGCCAFRNAKTEDLFRRYKQGYT

SEQ ID NO: 3895 - DNA, 810 bp, Populus trichocarpa
  CDS (1)..(810)
atgggagtagccaacaacatcacagccgtcctaaacttcatagcctttctctgctcaatccctataatagccgctggcatttggctagcctccaaaccagagaatgaatgcatccaccttttccggtggcctgtagttctccttggattccttatcctcttggtctcacttgctggttttgtgggtgcctactggtataaggaaacacttttagcattctatctctgctgcatggccattctcataggacttctcttgatccttctggtcttcgcctttgtggtcacgcgcgccgatggtggctatgatgtgcctgggaggggttatagagagtataggcttcaaggattctctgcttggttgaggaatcatgtcgtttattccaagaattgggacaagattaggccttgtcttgctgagactgatgtttgttccaagatgactcaaaattatatcactgctgaccaattcttcatggctcacatctctcctctccagtcagggtgctgtaagccgccaacagtttgtggctacaattatgtgaaccctacgctgtggttaaacccagtgaacccagcggcggacccagactgctacttgtggaacaatgaccagaaccagctgtgctacaattgcaacgcttgcaaggctggattgctggggaacctgaggagagaatggaggaagaccaacgtaatcctcatcgtggcggtggtggtgctcatttgggtctatgtcattgcctgcagtgctttcaaaaatgcccaaactgaagaccttttccggcgatacaaacaaggttgggtttga

SEQ ID NO: 3896 - protein, 269 aa, Populus trichocarpa
MGVANNITAVLNFIAFLCSIPIIAAGIWLASKPENECIHLFRWPVVLLGFLILLVSLAGFVGAYWYKETLLAFYLCCMAILIGLLLILLVFAFVVTRADGGYDVPGRGYREYRLQGFSAWLRNHVVYSKNWDKIRPCLAETDVCSKMTQNYITADQFFMAHISPLQSGCCKPPTVCGYNYVNPTLWLNPVNPAADPDCYLWNNDQNQLCYNCNACKAGLLGNLRREWRKTNVILIVAVVVLIWVYVIACSAFKNAQTEDLFRRYKQGWV

SEQ ID NO: 3897 - DNA, 855 bp, Populus trichocarpa
  CDS (1)..(855)
atgagatctagcaatcacttgataggggtactcaacttcctgacctttttgctatcaatacccatcctaggaggtggtatatggctaagcagcagagccaacaacacagattgtctaaaattcttacagtggccattgataataattgggatctcaatcatggtcgtttctttagccggtttcgctggcgcgtgttatcgaaacactttcttgatgtgggcttacctatttgttatgttcttcatcatcgccgcgcttttagggttcatcatctttgcctatgttgtcaccgataaagggtcgggccgcccactcccgaatcgtgcgtattctgactattatctgcatgactattcagggtggttgaaggatcgagtagctagtgatagctactggcacaagattggctcttgtatacgagattctaaggtttgtggcaagatggggagaactacttctggcgtccctgagactgcagatacgttctatagcaggaagctcagctctattgagtctggttgttgcaagccccctacagaatgcggcttcacttatatgaacgagactttctggtcatcatctggaggagttgtttacagcactgactgtaacacctggaacaacgatcaagagcgactgtgctattcctgcaattcttgcaaagctggtttgctagccaacctgaggaagagttggaggaaggtctcggtcattaacatcgtcatattaatcattctagtgattgcctatgtggttggctgtgcagccttcaggaataatcgccggatcgataacgatgaaccctacggggaagcaaggatgaccaagtctcagcctagcagaatccatctttaa

SEQ ID NO: 3898 - protein, 284 aa, Populus trichocarpa
MRSSNHLIGVLNFLTFLLSIPILGGGIWLSSRANNTDCLKFLQWPLIIIGISIMVVSLAGFAGACYRNTFLMWAYLFVMFFIIAALLGFIIFAYVVTDKGSGRPLPNRAYSDYYLHDYSGWLKDRVASDSYWHKIGSCIRDSKVCGKMGRTTSGVPETADTFYSRKLSSIESGCCKPPTECGFTYMNETFWSSSGGVVYSTDCNTWNNDQERLCYSCNSCKAGLLANLRKSWRKVSVINIVILIILVIAYVVGCAAFRNNRRIDNDEPYGEARMTKSQPSRIHL

SEQ ID NO: 3899 - DNA, 816 bp, Populus jackii
  CDS (1)..(816)
atgtttcgtctaagcaataacttggtaggaatcctgaacttcattacattcctgctctcaatccccatcctgtgggcagggatctggttaagaaacaaaggagcatccgaatgtgagaaattcctcgacactccagttatagttcttggtgtcttcctcttagttgtctcactagccggtctaattggcgcgtgttgtggcgtttcatggctcctctgggtttacctcgtagtcatgtttcttctcattgtcgtactcttctgcttcacgattttaacttttgtggtgaccaacaaaggtgctggtaaagttttgtctgataaagggtataaagagtataggctgggtgattattcgaattggttgcagaagagagtgaccagtgggaagaattggagcaagattaagagttgcttgatcgatgctaagatttgtactgattttcaacagagatatttgaatgattctctcaccgttctctatactcgccatttatctgctcttcaggctggctgctgtaagccaccggatagctgtggctttaattatcaaaatccgactacttgggacaagactacaaatgtcacctccgatcctgactgtaatgcgtgggataatcaatcaaatgttctctgctttaactgcaactcttgcaaggctgggctgctggacaacctcaagagtgattggaagaaggtggctattatcaacattatattccttgtattcctcatcattgtgtactccattggatgctgtgcattcaggaacaacagaagcgaaaatgcttacttttctggatggaagcacacttaa

SEQ ID NO: 3900 - protein, 271 aa, Populus jackii
MFRLSNNLVGILNFITFLLSIPILWAGIWLRNKGASECEKFLDTPVIVLGVFLLVVSLAGLIGACCGVSWLLWVYLVVMFLLIVVLFCFTILTFVVTNKGAGKVLSDKGYKEYRLGDYSNWLQKRVTSGKNWSKIKSCLIDAKICTDFQQRYLNDSLTVLYTRHLSALQAGCCKPPDSCGFNYQNPTTWDKTTNVTSDPDCNAWDNQSNVLCFNCNSCKAGLLDNLKSDWKKVAIINIIFLVFLIIVYSIGCCAFRNNRSENAYFSGWKHT

SEQ ID NO: 3901 - DNA, 813 bp, Elaeis guineensis var. tenera
  CDS (1)..(813)
atgtttcgtgtgagcaacaacctgatcgggatcctcaactttttgacgttcctcctgtcgatcccgatcgtcggcggggggatatggctggcgacgagggggagcaccgactgcgagaagttcctccaggggccggtgatcgccgtcggcgtgttcttgatggtcgtctctctcgcggggctcgtcggtgcctgctgccgcgtcacctggctcctctgggtctacctcttcgtcatgttcctcctcatcgtcctcctcttctgcttcaccgtctttgccttcgtcgtgaccaataagggcgccggtgaggtcgtctccaaccggggttacaaggagtaccgcctgggggactactccaactggcttcagaagagggtcaacaacagcaaaacctgggccaggatccagagctgcatccaggacagcaaggtctgccagagtttgcaggagaagaaccagaccttccagcagttcgccaacgacaacctctcccccattcagtctggatgctgcaagccgcccacggaatgtaacttcacctatcagagtgaaacttcctgggctaaatccaccatctcaaactcaagcaacccagactgcaatgcctgggataataatccttccatcctttgctacaactgccaatcttgcaaggctggtgtgctggccaacatcaagaatgactggaagaaggttgcgatcatcaacatcatagtccttgtcttccttatcgttgtctactccatcggatgctgtgccttcagaaacaacagacgggacgatgcttatggcggatggaaaggacacccatag

SEQ ID NO: 3902 - protein, 270 aa, Elaeis guineensis var. tenera
MFRVSNNLIGILNFLTFLLSIPIVGGGIWLATRGSTDCEKFLQGPVIAVGVFLMVVSLAGLVGACCRVTWLLWVYLFVMFLLIVLLFCFTVFAFVVTNKGAGEVVSNRGYKEYRLGDYSNWLQKRVNNSKTWARIQSCIQDSKVCQSLQEKNQTFQQFANDNLSPIQSGCCKPPTECNFTYQSETSWAKSTISNSSNPDCNAWDNNPSILCYNCQSCKAGVLANIKNDWKKVAIINIIVLVFLIVVYSIGCCAFRNNRRDDAYGGWKGHP

SEQ ID NO: 3903 - DNA, 813 bp, Zea mays
  CDS (1)..(813)
atggcggtgagcaacaacatcacggcatgcgtgacgctgctggcgctgatctgcgcggtgcccgtgatcgcgtcgggggtgtggttcgcgtcggcgcagggcgaggagtgcgcgcgcctggcgcggtggcccgtggccatcctgggcgggctgctcctgctggccgcgctggcgggcttcgtgggcgcgtactggaaccggcgcggcctgcttgccttctacctcttcgccatggcgtcgctcgtcgtgctcctcatcgcgctcctcgccttcgccttcgccgtcacccgcgggtccggcgcctaccccgtgctcggccgcgcctacgacgactaccgcctcgacggcttctccatgtggctccgcgggtacgtctccgacgaccccgggcgctgggacaaggtcagggcctgcctcgccgtctccgacacctgcaagaagctcgcgcgccaggccgccttcaccagcgcagaccagttctatcagtcgcacctctccccgctccagtccgggtgctgcaagccgccgtcggtgtgcgggttcagctacgtgagcccgacggtgtggtccgccccggcggcgcggccggcggcggacgcggactgcgggctgtggagcaacgacccggggcagctgtgctacgggtgcgagtcctgcaaggcgggcctcctggaggcgctccgggaccagtggcacaaggccaacgtcgccctcgtcgtcgccaccgtcgccctcgtcatcctctacctcgtcggctgcagcgcctacaagaacgcgcaggccgccgccatcttcggacgccgcaagtattag

SEQ ID NO: 3904 - protein, 270 aa, Zea mays
MAVSNNITACVTLLALICAVPVIASGVWFASAQGEECARLARWPVAILGGLLLLAALAGFVGAYWNRRGLLAFYLFAMASLVVLLIALLAFAFAVTRGSGAYPVLGRAYDDYRLDGFSMWLRGYVSDDPGRWDKVRACLAVSDTCKKLARQAAFTSADQFYQSHLSPLQSGCCKPPSVCGFSYVSPTVWSAPAARPAADADCGLWSNDPGQLCYGCESCKAGLLEALRDQWHKANVALVVATVALVILYLVGCSAYKNAQAAAIFGRRKY

SEQ ID NO: 3905 - DNA, 894 bp, Zea mays
  CDS (1)..(894)
atgcattcgcagcacctatacccactaccacaccggcgtttgagcaacacgatgataggctacctgaacctggtgacgctggtggcatccatccccatcatcggtgcagggctgtggctggcccatggctctgcggcggtgacatgcgaatccgcactgcagacgccgctcctagccatcgggttcatcgtcctcctcatctccctggcgggcttcatcggcgcatgctaccatgtgacatgggcgctgtggctctacctcctggccatgctgctgctcgtcctcgccctgctcgggatcacagtctttggcctggcagtcacggccggcggcggcggcggcaggcaagtgcccggcaggccctaccgggagttccggatcacagattactcggcttggctccagaggcatgtcgaggtcgatcgctactggcgggcagcgctcgcatgcgtggtcgggtcaagagcctgccccaggatagccgcctggactcccctggactacctccagcataatctcacgccgatacagtctggatgctgcaagccaccgacatcatgcacatacaacgagcaaggcatacccatcgctgcgccggcgcaagacgaggaggactgctaccggtggaacaatgcccccagcgtcctgtgctaccagtgcgactcgtgcaaagccggagtgctggagcaggtgcgccgagactggcacaccatcaccatcctcaatgtcatcgtccttgttctactcatagccatctactcctgtggctgctgtgctttccgcaatgctcgccgtgccgactacacatacggtggcatgtcgtccaagaccaatccacgatgggattacttctggtcaaggtggtggaatggccatagagagcagctgtattaa

SEQ ID NO: 3906 - protein, 297 aa, Zea mays
MHSQHLYPLPHRRLSNTMIGYLNLVTLVASIPIIGAGLWLAHGSAAVTCESALQTPLLAIGFIVLLISLAGFIGACYHVTWALWLYLLAMLLLVLALLGITVFGLAVTAGGGGGRQVPGRPYREFRITDYSAWLQRHVEVDRYWRAALACVVGSRACPRIAAWTPLDYLQHNLTPIQSGCCKPPTSCTYNEQGIPIAAPAQDEEDCYRWNNAPSVLCYQCDSCKAGVLEQVRRDWHTITILNVIVLVLLIAIYSCGCCAFRNARRADYTYGGMSSKTNPRWDYFWSRWWNGHREQLY

SEQ ID NO: 3907 - DNA, 825 bp, Zea mays
  CDS (1)..(825)
atggcggtgagcaacaacatcacggcatgcatcaacttcctggtgcttctctgcaccatccccatcgccgcgacggggctgtggctggcctcgaggcacggcggcgaggactgcgccaggctggcccgctggcccatcgccgtgctgggcgcgctcctcctgctggtcgcgctggcgggtttcgcgggcgcctactggaaccgcaggggcctgctcgcctgctacctcttcgcgatggccgccctcatcacgctcctcctcgccctcctcgtcttcgccttcgccgtcgcgcacgactccggcgcctacccggctcccggcagggcctaccaggactaccgcctccagggctactcctcgtggctgcgggggtacgtcgccgacgacccccgcaggtgggagggggtccgggcctgcgtcgccgcctccggcacctgcaggaagctcgccatggatagatcattcatcgtgccggagcagttctacatgtcgcacctctcgcccatcgagtccgggtgctgcaagccaccgacggtgtgcgggtacgcgtacgcgaacccgacggcgtggacgggcccggcggcgagcccggcggcggacgcggactgcgcggcgtggagcaacgaccccggccagctctgctacgcctgcgcctcctgcaaggccggcgtgctgggcggcctgcgcgagcagtggcgcagggccaccgtcccgctgctcgtcgccaccgtcgcgctcatcttcgtctacgtcgtcggctgcagcgccttccgcaacgcgcagaccgaggacctcttccgccgctacaaatggggaaattattaa

SEQ ID NO: 3908 - protein, 274 aa, Zea mays
MAVSNNITACINFLVLLCTIPIAATGLWLASRHGGEDCARLARWPIAVLGALLLLVALAGFAGAYWNRRGLLACYLFAMAALITLLLALLVFAFAVAHDSGAYPAPGRAYQDYRLQGYSSWLRGYVADDPRRWEGVRACVAASGTCRKLAMDRSFIVPEQFYMSHLSPIESGCCKPPTVCGYAYANPTAWTGPAASPAADADCAAWSNDPGQLCYACASCKAGVLGGLREQWRRATVPLLVATVALIFVYVVGCSAFRNAQTEDLFRRYKWGNY

SEQ ID NO: 3909 - DNA, 828 bp, Hemerocallis sp
  CDS (1)..(828)
atgtcgatgtttcggctcagcaacaacctcgtcggaatcctcaacttcgtcaccctcctcctcaccattccgatcctctccaccggcgtctacctctcccaccactcgtccaccgactgcgcgcacttcctccaaggccccatcctcggccttggcatcgtcctcctcctcgtctccctcgccggcctcgtcggtgcctgctgcaagaactccctcctcctctggatctacctcttcgtcatgttcgtgctcatcatcgtcatcttctgcttcactatcttcgtctttgtggtgacgaacaagggggctggggaggtggtgagcgggagggggtataaggactacaggttgggggattactcgcattggcttcaaaagaggatggagaatgggaagaactggagaaagattaggagctgtttggtcgatgggaaggtctgcgagaggttctcgaccgatggtaccaatcggacactggatcagtttgttaaagagaatttgtcgcccattcagtctggatgctgcaagcccccaactgaatgtggttttacctaccaaagcccaaccgtgtggaacaagcctgcaactggcttcacctccaacaacacagactgcgcaacatgggagaatgatcccaccatcctctgctatgattgccagtcctgcaagggcggtgttattgcaaacctcaagagcaagtggaagaaggtggcagtggtcaatatcatcttccttatcttcataatcatcgtctactctgttggttgctgtgcatttaggaacaacttgaaggacaatgcctattctgggtggaaagggaacccttag

SEQ ID NO: 3910 - protein, 275 aa, Hemerocallis sp
MSMFRLSNNLVGILNFVTLLLTIPILSTGVYLSHHSSTDCAHFLQGPILGLGIVLLLVSLAGLVGACCKNSLLLWIYLFVMFVLIIVIFCFTIFVFVVTNKGAGEVVSGRGYKDYRLGDYSHWLQKRMENGKNWRKIRSCLVDGKVCERFSTDGTNRTLDQFVKENLSPIQSGCCKPPTECGFTYQSPTVWNKPATGFTSNNTDCATWENDPTILCYDCQSCKGGVIANLKSKWKKVAVVNIIFLIFIIIVYSVGCCAFRNNLKDNAYSGWKGNP

SEQ ID NO: 3911 - DNA, 777 bp, Arabidopsis thaliana
  CDS (1)..(777)
atgggtatgggcacaagcactttcgttatcagatgggtcaatcttcttacaatgctattggctgtggcagtgataatatttggggtgtggatgagtacacacaatgatggttgcagaaggtcacttacatttccagttatagctcttggtggtttcatcttcttgatatccataatcggatttcttggcgcgtgcaagagaagtgtggcgcttctttggatttatcttgccgtgctcctgatcgttttgatcgcgattcttgtctttaccgtactggcgttcattgtaacaaacaatggttctggccatactaaccctggtttaaggtacaaggagtataagctgaatgattacagctcatggtttctaaaacagcttaacaacaccagtaactggataagactaaagagttgtcttgttaaatccgagcaatgtcggaagctttccaagaaatacaagaccatcaaacagttgaaatccgcagaattaaccccgatagaagctggatgttgtcgaccaccatctgagtgtggttatcctgcggtgaatgcttcttactatgacttgagctttcattcgataagttctaacaaagattgtaagctttacaagaatttgaggactatcaagtgctacaactgtgattcttgcaaagctggagttggtcagtacatgaaaaccgagtggcgacttgttgcgatcttcaatgtgtcaatggtttactttgttggatgctgtgcgagaagaaatgctgctagttaccgatccaaagcttag

SEQ ID NO: 3912 - protein, 258 aa, Arabidopsis thaliana
MGMGTSTFVIRWVNLLTMLLAVAVIIFGVWMSTHNDGCRRSLTFPVIALGGFIFLISIIGFLGACKRSVALLWIYLAVLLIVLIAILVFTVLAFIVTNNGSGHTNPGLRYKEYKLNDYSSWFLKQLNNTSNWIRLKSCLVKSEQCRKLSKKYKTIKQLKSAELTPIEAGCCRPPSECGYPAVNASYYDLSFHSISSNKDCKLYKNLRTIKCYNCDSCKAGVGQYMKTEWRLVAIFNVSMVYFVGCCARRNAASYRSKA

SEQ ID NO: 3913 - DNA, 822 bp, Arabidopsis thaliana
  CDS (1)..(822)
atggctcgttgtagcaacaatctcgtagggatactcaatttcctagtatttcttctctcgatcccaatcttagctggtggaatctggctaagccaaaaagggtcaacagagtgtgaaagattcctagacaaaccagtgattgctcttggtgttttccttatggttgtagcaatagctggtctagtaggttcatgttgtagagtcacatggcttctttgggtttatctctttgtcatgttccttttgattctccttgtgttctgtataacagtttttgcctttgttgttactaacaaaggagctggtgaagctattgaaggaaaaggttataaagagtataaacttggtgattactctacttggttacagaaacgtgttgagaatggtaaaaattggaataagattaggagttgtcttgtggagagcaaagtttgttctaagcttgaagccaagtttgttaatgttcctgtcaatagtttctacaaggaacatcttactgctcttcagtctggttgctgcaaaccttcagatgaatgtggtttcgagtacgtaaacccaacaacctggaccaagaacacaacgggaacacacactaatccagactgccaaacctgggacaacgcaaaagaaaagctctgcttcgattgtcaatcttgtaaagcgggtctactcgacaacgtcaaaagcgcttggaagaaagttgcaatcgttaacatcgtcttccttgtcttcctcatcattgtctactctgttggttgctgtgctttcaggaacaacaagagggatgacagttattcccgtacctacggatataagccttga

SEQ ID NO: 3914 - protein, 273 aa, Arabidopsis thaliana
MARCSNNLVGILNFLVFLLSIPILAGGIWLSQKGSTECERFLDKPVIALGVFLMVVAIAGLVGSCCRVTWLLWVYLFVMFLLILLVFCITVFAFVVTNKGAGEAIEGKGYKEYKLGDYSTWLQKRVENGKNWNKIRSCLVESKVCSKLEAKFVNVPVNSFYKEHLTALQSGCCKPSDECGFEYVNPTTWTKNTTGTHTNPDCQTWDNAKEKLCFDCQSCKAGLLDNVKSAWKKVAIVNIVFLVFLIIVYSVGCCAFRNNKRDDSYSRTYGYKP

SEQ ID NO: 3915 - DNA, 1143 bp, Oryza sativa subsp. japonica
  CDS (1)..(1143)
atggggcggttctccaatggcgtcctgggcgccctgagcttcgccgccctcctcgcctccgtgccgctcatcggcgcgggcgcctacctcctcgaccacccggccagcgagtgccagcgccttgtgcgggtgcccgccgtggcgctcggcagcgcggcgctcctcctctccctcatggcgatcgccggagttacctgctgccgcggcgcggcgctcctctgggcctacgcgtccgccatgttcctgctcatcgtcggcatgttcttcgtcaccgccttcgtgttcgtcgtcaccaacaggggcgtcgccaccgccgtgtccggcaccggctacggggactaccgggtcagggactactcggagtggctgcgtgccaggatcgaggattacgagacgtggcaccggatcgagagctgcatggccgacgcggccgtgtgcggcggccctctcgccgggatcaaccccggcgagttctaccgtctgcatctgccgctaatccagtgtgaactaaacacaaccgtagtatctgactacctctgtgacgtgacaaccgtgcagtccggctgctgcaagccgccagtgtactgcgggtacgagcgcgtgaacgagacgttctggatagcgccggcgcggggcctggacgcggcggacgtcgactgcctggagtggagcaacgaccaggccgtgctgtgcttccgctgcaacgcctgcaaggccagtgcgctggacaccgtcaggcgaaactggagggccgtggccgtgctcaacgtcgccgtcctcgccatcctcatgctcgcctactccctcgcctgctgctccgtgcgggatcgcagccgagtcaggttgggcaagaaagaacccatcttagcagtgccggctatatccatcaagacatcaaagctaaaactttggaacaaccaagcgccaacaacaaccccatcggtgtgtgaccgtcgtgtcctactgaaaaggcaatggattagttctgaggaggccaataagatggttgccgtggcaaaagaagcagttgcgattgagaattcacaagttgtcaatgaacaagaatcggttgttacgaaccaggatgtcatagaagaacaattgctgcttcccaatcttcatctcaatcactgtcacaactag

SEQ ID NO: 3916 - protein, 380 aa, Oryza sativa subsp. japonica
MGRFSNGVLGALSFAALLASVPLIGAGAYLLDHPASECQRLVRVPAVALGSAALLLSLMAIAGVTCCRGAALLWAYASAMFLLIVGMFFVTAFVFVVTNRGVATAVSGTGYGDYRVRDYSEWLRARIEDYETWHRIESCMADAAVCGGPLAGINPGEFYRLHLPLIQCELNTTVVSDYLCDVTTVQSGCCKPPVYCGYERVNETFWIAPARGLDAADVDCLEWSNDQAVLCFRCNACKASALDTVRRNWRAVAVLNVAVLAILMLAYSLACCSVRDRSRVRLGKKEPILAVPAISIKTSKLKLWNNQAPTTTPSVCDRRVLLKRQWISSEEANKMVAVAKEAVAIENSQVVNEQESVVTNQDVIEEQLLLPNLHLNHCHN

SEQ ID NO: 3917 - DNA, 897 bp, Oryza sativa subsp. japonica
  CDS (1)..(897)
atgtatagccggcgggcagcggcgggaggagagcagcagcacctgagcaacagggtggtgggattggtgaacctggtgacgcttgtggcgtccgtccccatcatcggcgcggggctctggctgcaggctcacggcgggtcatcgccgtgcgggtccgcgctgcaggcgccgctgctggccatcgggttcgtgaccctcctcgtctcgctggctggcttcctaggcgcctgctaccacgtcccctcggcgctgtggctgtacctcgccgccatgctgctcctcgtgctggccctgctcgggatcaccgtcttcgggctggccgtcaccgcgggagggggcggcacgcaggtggccggcaggccctaccgtgagttccgcctcgccgactactcgtcgtggctgcagcgccacgtgcgggcggagcggtactggaggccggcgctggcctgcgtgctggctgccagggcctgcgacaccctcgccgcctggacgcccctcgactacctccgcaatgacctcacgcccgtgcagtccggttgctgcaagccgcccaccgcgtgcacctactatgacgatgcccagcagcagcagcagcagcccgactgctaccggtggagcaacgcccccggcgtgctgtgctacgggtgcgactcgtgcaaggccggcgtgctggagcagctgcgtcgccactggcacaacgtcaccatcctcaacgtcgtcctcctcctgcttctcatcctcttctactcctgcgcttgctgcgccttccgtaacactgccactgccacatcctccaagacgatcttccatctccatccgcgctgggagtaccgctggtatctactttatctttgcgcgcgagagagtcaaggtggtggcatggacgaagatagctag

SEQ ID NO: 3918 - protein, 298 aa, Oryza sativa subsp. japonica
MYSRRAAAGGEQQHLSNRVVGLVNLVTLVASVPIIGAGLWLQAHGGSSPCGSALQAPLLAIGFVTLLVSLAGFLGACYHVPSALWLYLAAMLLLVLALLGITVFGLAVTAGGGGTQVAGRPYREFRLADYSSWLQRHVRAERYWRPALACVLAARACDTLAAWTPLDYLRNDLTPVQSGCCKPPTACTYYDDAQQQQQQPDCYRWSNAPGVLCYGCDSCKAGVLEQLRRHWHNVTILNVVLLLLLILFYSCACCAFRNTATATSSKTIFHLHPRWEYRWYLLYLCARESQGGGMDEDS

SEQ ID NO: 3919 - DNA, 846 bp, Arabidopsis thaliana
  CDS (1)..(846)
atgaacagaatgagcaatacagtgataggattcttgaatatcctaacactaatttcctccatagttctattaggatcagctctatggatgggtaggagcaaaacgacatgcgagcattttcttcagaagccacttttgatcttaggcctagctatcttgatcttgtcagtagctggtctagtcggtgcatgttgtgacgtggcttgggtcttgtgggtgtacctcttcttcatggtcttcatcatagtcgcactcatgggtttgaccttgtttggattcatagtgactagccatagtggtggtgtggttgtcgatggtagggtttataaagagtttaagcttgaagcatatcacccttggcttaagacaagggtggtagatactaattattgggttactataaagacttgtctcttgggctcagtcacttgttccaagctcgctctttggactcctcttgattatctccaaaaagacttatctcctcttcagtctggatgctgcaaaccaccgacgtcgtgcgtttacaacacggacacggtgatacaacaagaccctgattgttaccggtggaacaacgcagcgacggtgctctgctatgattgtgacacgtgtagagctggcgttttagagactgtacgtcgcgattggcacaaactctctctagtgaacgtcattgttgttattttcctcatagctgtttactgtgttggctgttgcgcgtttaaaaacgccaaacgccctcaacattacggcttcccttatggacgttacggcatgtccaaatccagacctggatgggaacagtcctggtcaaggtggtggcatgggagagatcggtattag

SEQ ID NO: 3920 - protein, 281 aa, Arabidopsis thaliana
MNRMSNTVIGFLNILTLISSIVLLGSALWMGRSKTTCEHFLQKPLLILGLAILILSVAGLVGACCDVAWVLWVYLFFMVFIIVALMGLTLFGFIVTSHSGGVVVDGRVYKEFKLEAYHPWLKTRVVDTNYWVTIKTCLLGSVTCSKLALWTPLDYLQKDLSPLQSGCCKPPTSCVYNTDTVIQQDPDCYRWNNAATVLCYDCDTCRAGVLETVRRDWHKLSLVNVIVVIFLIAVYCVGCCAFKNAKRPQHYGFPYGRYGMSKSRPGWEQSWSRWWHGRDRY

SEQ ID NO: 3921 - DNA, 819 bp, Arabidopsis thaliana
  CDS (1)..(819)
atgtttcgagttagcaatttcgtggttggtctagcaaacacattggtgatgttagtgggcgcttcggccattggttattcgatttacatgttcgttcaccaaggcgtcactgattgtgaatctgccattcggataccacttctcacgaccggactcatcctcttcttggtgtctttgctcggagtgattggatcttgtttcaaggagaatttggcaatggtttcctacttgatcatattgtttgggggcattgttgcattgatgattttctccatatttctcttctttgtgaccaacaaaggagccggtcgtgtggtgtccggtcgagggtataaagagtaccggacggtggatttctcgacgtggcttaatgggttcgttggtgggaagagatgggttgggataaggtcttgtttggctgaggctaacgtttgtgatgatttgagtgatggtcgtgttagtcagatcgctgatgcgttttatcacaagaacttgtctcccatccagtcaggttgttgtaagccaccatcggattgcaacttcgagttcagaaacgcgacgttctggataccgccgagcaaaaacgaaacggcagttgcggccgaaaacggggactgtggtacgtggagcaacgtgcaaacagagttatgtttcaactgcaacgcatgcaaagcgggtgtgttaacgaacataagagagaagtggaggaatcttcttgttttcaacatttgtctcctcattctcctcataaccgtctattcctgcggttgctgtgctcgtcgaaacaatcggacggctaggaaaagtgattctgtctga

SEQ ID NO: 3922 - protein, 272 aa, Arabidopsis thaliana
MFRVSNFVVGLANTLVMLVGASAIGYSIYMFVHQGVTDCESAIRIPLLTTGLILFLVSLLGVIGSCFKENLAMVSYLIILFGGIVALMIFSIFLFFVTNKGAGRVVSGRGYKEYRTVDFSTWLNGFVGGKRWVGIRSCLAEANVCDDLSDGRVSQIADAFYHKNLSPIQSGCCKPPSDCNFEFRNATFWIPPSKNETAVAAENGDCGTWSNVQTELCFNCNACKAGVLTNIREKWRNLLVFNICLLILLITVYSCGCCARRNNRTARKSDSV

SEQ ID NO: 3923 - DNA, 819 bp, Arabidopsis thaliana
  CDS (1)..(819)
atggtacgttttagtaacagtcttgtaggaatactcaacttcttcgtcttccttctctcggttcccatactctcaaccggaatctggctcagccttaaagccacgacgcaatgcgcgagattcctcgacaaacccatgatcgctctcggtgttttcctcatgataatcgcaatcgctggagtcgttggatcttgttccagagtgacgtggcttctctggtcctatctctttgtgatgttcttcttaatcctcatcgtcctctgtttcaccatctttgccttcgttgtcactagtaaaggctccggcgaaactatccaaggaaaagcttataaggagtataggctcgaggcttactctgattggttgcagaggcgtgtgaacaacgctaagcattggaacagcattagaagctgtctttatgagagcaagttctgttacaacttggagttagtcactgctaatcacactgtttctgatttctacaaagaagatctcactgcttttgagtctggttgctgcaagccctctaatgactgtgacttcacctacataacttcaacaacttggaataaaacatcaagaacacataaaaactcagattgccaactttgggacaacgaaaagcataagctttgctacaattgcaaagcctgcaaggccggttttctcgacaacctcaaggccgcatggaaaagagttgctattgtcaacatcattttccttgtactcctcgttgtcgtctacgctatgagatgttgcgctttccgaaacaacaaagaagatagatatggccgttccaatggtttcaacaattcttga

SEQ ID NO: 3924 - protein, 272 aa, Arabidopsis thaliana
MVRFSNSLVGILNFFVFLLSVPILSTGIWLSLKATTQCARFLDKPMIALGVFLMIIAIAGVVGSCSRVTWLLWSYLFVMFFLILIVLCFTIFAFVVTSKGSGETIQGKAYKEYRLEAYSDWLQRRVNNAKHWNSIRSCLYESKFCYNLELVTANHTVSDFYKEDLTAFESGCCKPSNDCDFTYITSTTWNKTSRTHKNSDCQLWDNEKHKLCYNCKACKAGFLDNLKAAWKRVAIVNIIFLVLLVVVYAMRCCAFRNNKEDRYGRSNGFNNS

SEQ ID NO: 3925 - DNA, 810 bp, Arabidopsis thaliana
  CDS (1)..(810)
atgcctttaagcaacaatgtaattggttgcataaacttcatcaccgtcctcctctccattccggtcatcggcgccggaatctggctagccataggaacagtaaactcatgcgtcaagcttcttcaatggccagtaataatcctcggagtcttaatcctcttagtgggtctcgctggtttcattggagggttttggagaatcacatggcttcttgttgtttacttaatcgccatgcttattctcattgtacttttgggttgccttgtcggatttatttacatggttaccataagaggctctggtcatccagaaccaagtagagcttatcttgagtatagtcttcaagatttctctggttggttacgtagaagagttcagagatcttataaatgggaaaggattcgtacttgtttgagtacaactaccatttgccctgaactaaatcagagatacactttggctcaagatttcttcaatgctcatcttgatcccattcaatctggttgctgcaagcccccaacaaaatgtggattcacatttgttaatcctacttattgggtaagtcccatagatatgtctgctgatatggattgtctaaattggagcaatgaccaaaacactttgtgttacacttgtgattcttgtaaagccggcttgctcgcaaatattaaggtagattggttaaaagcggatatctttctactcttggcgcttatcggattgattatcgtctacattatcgggtgctgcgcattccgtaatgcggaaactgaggatattttcaggaagtacaagcagggttatacttga

SEQ ID NO: 3926 - protein, 269 aa, Arabidopsis thaliana
MPLSNNVIGCINFITVLLSIPVIGAGIWLAIGTVNSCVKLLQWPVIILGVLILLVGLAGFIGGFWRITWLLVVYLIAMLILIVLLGCLVGFIYMVTIRGSGHPEPSRAYLEYSLQDFSGWLRRRVQRSYKWERIRTCLSTTTICPELNQRYTLAQDFFNAHLDPIQSGCCKPPTKCGFTFVNPTYWVSPIDMSADMDCLNWSNDQNTLCYTCDSCKAGLLANIKVDWLKADIFLLLALIGLIIVYIIGCCAFRNAETEDIFRKYKQGYT

SEQ ID NO: 3927 - DNA, 813 bp, Arabidopsis thaliana
  CDS (1)..(813)
atgtacagattcagcaacacagttattggggtcttaaaccttctcaccttactagcctcgattccaatcatcggaaccgctttatacaaggcaagaagcagcacgacatgtgaaaacttcctccagacgccgctacttgttataggattcatcatactcatagtttcccttgcgggattcataggagcctgcttcaacgtggcatgggctctttgggtgtacttagtggtcatgatcttcctcatcgctaccctaatgggtctaacgctatttggtctggtggtgacgagccaaggaggtggagtggaagtgccagggaggatttataaagagtataggcttggagactatcatccatggttgagagagagagttagggatcctgagtattggaactccattagaagctgtatcttgagttccaagacttgtactaagattgagtcttggactacacttgattatttccaaagagacatgacttctgttcagtcgggatgttgtaagccaccgacggcgtgtacgtacgaagctggagtagtggacggaggaggagattgcttcagatggaacaatggagtggagatgttatgctacgagtgcgatgcttgcaaggctggtgttctcgaagagatccgtctcgactggagaaagttatcggttgtcaacattctcgtcctcgtcctcctcatcgcggtctacgccgctggttgctgcgccttccacaacactcgccacgcagctcatccttaccatccatctgatgataaccgcatgaccagagtccgtcctcgttgggactattactggtaa

SEQ ID NO: 3928 - protein, 270 aa, Arabidopsis thaliana
MYRFSNTVIGVLNLLTLLASIPIIGTALYKARSSTTCENFLQTPLLVIGFIILIVSLAGFIGACFNVAWALWVYLVVMIFLIATLMGLTLFGLVVTSQGGGVEVPGRIYKEYRLGDYHPWLRERVRDPEYWNSIRSCILSSKTCTKIESWTTLDYFQRDMTSVQSGCCKPPTACTYEAGVVDGGGDCFRWNNGVEMLCYECDACKAGVLEEIRLDWRKLSVVNILVLVLLIAVYAAGCCAFHNTRHAAHPYHPSDDNRMTRVRPRWDYYW

SEQ ID NO: 3929 - DNA, 813 bp, Oryza sativa
  CDS (1)..(813)
atggcggtgagcaacaacatcacggcgtgcgtgacgctgatggcgctgatctgcgccgtcccggtgatcgcctcgggcgtgtggttcgcgtcggcgcagggggaggagtgcgcccgcctggcgcggtggccggtggccatcctggggggcctcatcctccttgccgccctcgccggcttcgtcggcgcctactggaaccgccgccgcctcctcgcgttctacctcttcgccatggcgtcgctcatcgcgctgctcatcgcgctcctcgtcttcgccttcgccgtcacccgcggctccggcgcctacccggtgctcggccgcgcctacgacgagtaccacctcgatggcttctccatgtggctccggggctacgtctccgacgacccggcgcggtgggagcggatcaaggcgtgcctcgtcgtctccgacacctgcaagaagctggcgcgccaggccgggttcctcaccgccgaccagttctaccagtcgcgcctctcgccactccagtccgggtgttgcaagccgccggcggtgtgcgggtacaactacgtgagcccgacggtgtgggcggggccggcggcgcggccggcggcggacgcggactgcggggcgtgggggaacgacccgtcgcagctgtgctacgagtgcgagtcgtgccgcgcgggcctcctcgcggcgctccgcgcccagtggcaccgcgccaacgtcgccctcgtcgtcgccaccgtcgccctcgtcttcctctacctcgtcggctgcagcgcctacaagaacgcccaggccgaggccctcttccgccgctacaagtggtag

SEQ ID NO: 3930 - protein, 270 aa, Oryza sativa
MAVSNNITACVTLMALICAVPVIASGVWFASAQGEECARLARWPVAILGGLILLAALAGFVGAYWNRRRLLAFYLFAMASLIALLIALLVFAFAVTRGSGAYPVLGRAYDEYHLDGFSMWLRGYVSDDPARWERIKACLVVSDTCKKLARQAGFLTADQFYQSRLSPLQSGCCKPPAVCGYNYVSPTVWAGPAARPAADADCGAWGNDPSQLCYECESCRAGLLAALRAQWHRANVALVVATVALVFLYLVGCSAYKNAQAEALFRRYKW

SEQ ID NO: 3931 - DNA, 894 bp, Oryza sativa
  CDS (1)..(894)
atgacgccagaagaccgagcgtggttgataaagggcaagtcggtggtgctgacgtgcctagcgtcggtcctcctgctgtcggccggcagcatcaaggcccccaagacttgcaccggcggcatgttcttggggcctataatcgctatcggcctcttcctcattgtcatgttcgtggtgggttcgtgtggcctgaagaaaaacgatggtgacctctacgactgctacctcctcggcgtgttcttggcaatcctcctcctcctcgcctttatcatcttcggatacgttgccgtgggaggcatcgacgcggggcatgcggcgaatgcccgagagtacagcctcagtgagtgcaagcgggggtggcttaggggtcgcgtcacccactcctcgcatttctgggcatcaaccagcgcgtgcctccgccgcagccacgtctgcaacggcatgactaacctggtacgcaaccccgacaccggcatttttgttccccgcccatcctccttcgaaaggtgggccaagagacacggggtggacgccgacccacgtgtaatgtcccctatcgagtctggatgctgcaagccaccatcatcgtgtggattaacatacgtgaatgggacgacgtggatatcgacagcagcatcagcaggtgccccagctgccgttgcccaagtaaccaacaacaacaaggacgacgactgtagccggtggagcaacgaccatcaaacgctttgcttccagtgcgactcgtgcaaggctggcttcctccgccacaccagtcaggcctggagtgtcgctgccatctatatcgttctcgccttcatcgggctcattctttcctcacttgcactctacgcagatcaagcaactgggaataataatactggaagatcacgatga

SEQ ID NO: 3932 - protein, 297 aa, Oryza sativa
MTPEDRAWLIKGKSVVLTCLASVLLLSAGSIKAPKTCTGGMFLGPIIAIGLFLIVMFVVGSCGLKKNDGDLYDCYLLGVFLAILLLLAFIIFGYVAVGGIDAGHAANAREYSLSECKRGWLRGRVTHSSHFWASTSACLRRSHVCNGMTNLVRNPDTGIFVPRPSSFERWAKRHGVDADPRVMSPIESGCCKPPSSCGLTYVNGTTWISTAASAGAPAAVAQVTNNNKDDDCSRWSNDHQTLCFQCDSCKAGFLRHTSQAWSVAAIYIVLAFIGLILSSLALYADQATGNNNTGRSR

SEQ ID NO: 3933 - DNA, 858 bp, Oryza sativa
  CDS (1)..(858)
atgagtaatattgggatggggatgggggtgatagaagctgggcgatttatgagaatgagttcagaacgacgagcgaggcacttggtgggcatgggtgttgtgctgacgttgaacacgtcgatcctaatactgggtagcgccacccgtgccccgacgcattgcacccgtggcgtcttcttgtggccctgtatcgcgatcggcctcttcttcatggtcgtcttcatcttgggcctgtgcggcgcgaagaacaacaacgagggtctcttcttctgccacctcctcggcgtgttcatcgccatcctcgccctcatcggcttcatcatcttcggttacgtggccatcggaccaggcatcgacctcagcgatgtgaaggcacgcgagtacaatctggacgactacaagagcgggtggctcagggctcgtgtggacgacgccgcgtactgggcaacaaccagcgcctgcctccgcggcgacaggggcgccgggtgcaaggccatgacgaaactggtccgtgacccacactccggcttgttcgtccccgacggcggccgccggcacgtcgacatgtcacctatccagtctggatgctgcaagccaccatcatcgtgtggattcacatatgtcaacgggacgacgtggacaccaacaccagcagcagcaacaaacaacgtcgactgcagcaggtggagcaacgaccaacaaaagctctgcttccagtgcgattcatgcaaggcaggcttcctcgaccacaccaggaaggcctggagctcggctgccttctttcccattttctgcttgatcgcggccattctttcatgctgttcaggtttaaaatatggaggggttctccatgaataa

SEQ ID NO: 3934 - protein, 285 aa, Oryza sativa
MSNIGMGMGVIEAGRFMRMSSERRARHLVGMGVVLTLNTSILILGSATRAPTHCTRGVFLWPCIAIGLFFMVVFILGLCGAKNNNEGLFFCHLLGVFIAILALIGFIIFGYVAIGPGIDLSDVKAREYNLDDYKSGWLRARVDDAAYWATTSACLRGDRGAGCKAMTKLVRDPHSGLFVPDGGRRHVDMSPIQSGCCKPPSSCGFTYVNGTTWTPTPAAATNNVDCSRWSNDQQKLCFQCDSCKAGFLDHTRKAWSSAAFFPIFCLIAAILSCCSGLKYGGVLHE

SEQ ID NO: 3935 - DNA, 885 bp, Oryza sativa
  CDS (1)..(885)
atgttgcgaggagggacgagcttgctggggatcgtcaacttcgtgacgttcctgatctcgatcccgatcctggggggaggaatctggctggcgtcgagggccaactccaccgactgcatccgcttcctgcagtggccgatcatcgccatcgggctcgccgtcatggtggtgtccctcatggggttcgcgggggcgtgctaccgccagacgtggctgctccgcctctacctcttcgccatgttcttcatcgtcgtcgccctcctcttcttcatcgtcttcgccttcgccgtcaccgaccgcggcgacggccaggtggtgatgaaccggcggttcctcgagtaccagctctccgactacaacggatggctccgcgaccgcgtcgccgaccccgcctactgggccaccatcagcgcctgcctccgcgacggccgcgcctgcgccgccatgcgccgcttcgcccgcgaccccaacaccggcatgctcgtccccgagaccccctccatgttctacgcccgcgacctctcccccatccagtctggatgctgcaagccaccaacatcgtgtgcatacaactatgttaacgaaacgttctggaccgcaaaccctggcgttccgaccgtcgtgaatgatgtggactgcagcaagtggagcaatgaccagcagacgctttgcttccagtgtgactcctgcaaggcaggcgtcctcgctggcatcaagaagagctggcgtaaggttgccatcctcaacatcgtcgtgctgatcatcctcgtcatcgtgtatgttgctggctgtgccgctttccgcaacgccaggaggatcgaaaacgacgagccgtttggtatggcaaggatgaccaagactcaacctagcaggttccagttctga

SEQ ID NO: 3936 - protein, 294 aa, Oryza sativa
MLRGGTSLLGIVNFVTFLISIPILGGGIWLASRANSTDCIRFLQWPIIAIGLAVMVVSLMGFAGACYRQTWLLRLYLFAMFFIVVALLFFIVFAFAVTDRGDGQVVMNRRFLEYQLSDYNGWLRDRVADPAYWATISACLRDGRACAAMRRFARDPNTGMLVPETPSMFYARDLSPIQSGCCKPPTSCAYNYVNETFWTANPGVPTVVNDVDCSKWSNDQQTLCFQCDSCKAGVLAGIKKSWRKVAILNIVVLIILVIVYVAGCAAFRNARRIENDEPFGMARMTKTQPSRFQF

SEQ ID NO: 3937 - DNA, 861 bp, Oryza sativa
  CDS (1)..(861)
atgtatccttacagattcagcaacgtgatgatcggatacctgaacctggcgacgctgctggcgtcgatcccggtgatcggggcggggctgtggatggcgaaggggtcgacggcgacgtgctcgtcgatgctgcagacgccgctgctggtgatcggcttcgtcgtcctcctcgtctccctcgccggcttcgtgggcgcctgcttccacgtggcgtgggcgctgtggctctacctcctcgccatgatgctcctcatcgccttcctcctcggcctcaccgccttcggcttcgccgtcaccgccggcggcggcggcacccaggtccccggccgcccctaccgcgagtaccacacctccgactactcgtcctggctgcagaagcacatccaggacgccaaatactggcgccccgcgctcgcatgcgtcgttggatccaaggcttgccccaagatcgccaattggtcacccatggattacctccagcatgatctcaccccaatccagtcggggtgctgcaagccgccgacggcgtgcgcgtacagcggcggggtggccgtcggagcgcaggacgaggactgcttccggtggaacaacgcggcggggatactgtgctacgggtgcgagtcgtgcagggccggggtgatggagaaggtgagggaggattggcacaagatctcggtgctcaacgtcatggtgctggtggtgctcatctgcatctgcgcctgcggctgctgcgccttcaggaacgcccgccgctccgtctccgagtacccttacggggtaaaccgcatgcacaagatccacccccgatgggactactactggtggcgatggtggcgtgataggagagaacagctctactag

SEQ ID NO: 3938 - protein, 286 aa, Oryza sativa
MYPYRFSNVMIGYLNLATLLASIPVIGAGLWMAKGSTATCSSMLQTPLLVIGFVVLLVSLAGFVGACFHVAWALWLYLLAMMLLIAFLLGLTAFGFAVTAGGGGTQVPGRPYREYHTSDYSSWLQKHIQDAKYWRPALACVVGSKACPKIANWSPMDYLQHDLTPIQSGCCKPPTACAYSGGVAVGAQDEDCFRWNNAAGILCYGCESCRAGVMEKVREDWHKISVLNVMVLVVLICICACGCCAFRNARRSVSEYPYGVNRMHKIHPRWDYYWWRWWRDRREQLY

SEQ ID NO: 3939 - DNA, 831 bp, Oryza sativa
  CDS (1)..(831)
atgtatccttacagattcagcaacgtgatgatcggatacctgaacctggcgacgctgctggcgtcgatcccggtgatcggggcggggctgtggatggcgaaggggtcgacggcgacgtgctcgtcgatgctgcagacgccgctgctggtgatcggcttcgtcgtcctcctcgtctccctcgccggcttcgtgggcgcctgcttccacgtggcgtgggcgctgtggctctacctcctcgccatgatgctcctcatcgccttcctcctcggcctcaccgccttcggcttcgccgtcaccgccggcggcggcggcacccaggtccccggccgcccctaccgcgagtaccacacctccgactactcgtcctggctgcagaagcacatccaggacgccaaatactggcgccccgcgctcgcatgcgtcgttggatccaaggcttgccccaagatcgccaattggtcacccatggattacctccagcatgatctcaccccaatccagtcggggtgctgcaagccgccgacggcgtgcgcgtacagcggcggggtggccgtcggagcgcaggacgaggactgcttccggtggaacaacgcggcggggatactgtgctacgggtgcgagtcgtgcagggccggggtgatggagaaggtgagggaggattggcacaagatctcggtgctcaacgtcatggtgctggtggtgctcatctgcatctgcgcctgcggctgctgcgccttcaggaacgcccgccgctccgtctccgagtacccttacggggtaaaccgcatgcacaagatccacccccgatgggactactactggtactcttaa

SEQ ID NO: 3940 - protein, 276 aa, Oryza sativa
MYPYRFSNVMIGYLNLATLLASIPVIGAGLWMAKGSTATCSSMLQTPLLVIGFVVLLVSLAGFVGACFHVAWALWLYLLAMMLLIAFLLGLTAFGFAVTAGGGGTQVPGRPYREYHTSDYSSWLQKHIQDAKYWRPALACVVGSKACPKIANWSPMDYLQHDLTPIQSGCCKPPTACAYSGGVAVGAQDEDCFRWNNAAGILCYGCESCRAGVMEKVREDWHKISVLNVMVLVVLICICACGCCAFRNARRSVSEYPYGVNRMHKIHPRWDYYWYS

SEQ ID NO: 3941 - DNA, 819 bp, Oryza sativa
  CDS (1)..(819)
atggcggtgagcaacaacatcacggcgtgcgtcaacttcctggcgctggtgtgcgccgtcccggtggtggccacgggcgtctggttcgcctccaagcagggcgacgactgcgcccgcgtcgcgcgctggccgctcgctatcctcggcgccgccctcctcctcgtcgccctcgccggcttcgccggcgcctactggaaccgccggggcctcctcgccgcctacctcttcgccatggccgcgctcatcaccctcctcctcgccctcctcgtcttcgccttcgccgtcacccgcccctccggcgcctaccccgccttcgcccgcgcctacgacgactaccgcctcgacggctactccacctggctgcgggaccgcgtcgccggcgaccctcgccggtgggaggggatcagggcttgcctcgccgcctccgacacctgcaggaagctggcgcaggagagcgtcttcttcatcacccccgagcagttctaccaatcacacctcaccccgctccagtcgggctgctgcaagccgccgacggtgtgcgggtacgcgtacgtgagcccgacggtgtgggtgaacccggcgaacccggctgcggacgcggactgcgccgcgtgggggaacgacccgtcgcagctctgctacgagtgcagctcctgcaaggccgggatgctgggcaccctgcgggagcagtggcgcagggccaacgtcgccctcgtcatcgccaccgtcgcgctcatcttcttctacgtcatcggctgcagcgccttcaagaacgcgcagaccgaggacctcttccgccgctacaagtggcgcaactga

SEQ ID NO: 3942 - protein, 272 aa, Oryza sativa
MAVSNNITACVNFLALVCAVPVVATGVWFASKQGDDCARVARWPLAILGAALLLVALAGFAGAYWNRRGLLAAYLFAMAALITLLLALLVFAFAVTRPSGAYPAFARAYDDYRLDGYSTWLRDRVAGDPRRWEGIRACLAASDTCRKLAQESVFFITPEQFYQSHLTPLQSGCCKPPTVCGYAYVSPTVWVNPANPAADADCAAWGNDPSQLCYECSSCKAGMLGTLREQWRRANVALVIATVALIFFYVIGCSAFKNAQTEDLFRRYKWRN

SEQ ID NO: 3943 - DNA, 810 bp, Oryza sativa
  CDS (1)..(810)
atggcgcggtgcagcaacggcctcctcggcctcctcaacgccggcgtgctggtcctcgccgtggtggtgctgggcggcgggatctggctcagcaaccgcgccgccaccactgactgcgagcggttcatggagcgccccgtcgtcgcgctgggcgtgctcctccttgcgctctccctcgccggcctcgccggcgcgctctgcggcgcctcctgcctcctgtggctctacctcctcgcgctcttcctcctcatcctcgccctcttcgtcttcaccgtcttcgccttcgtcgtcaccaaccgcggcgccggctgggtcgtctccgggagagggtacagggagtaccgcctcggggactactccacgtggctgcagaggagggtggagaactccgcgaactgggccaagatccggagctgcctccaggacggcaaggtctgcgagaagcttggggccaggcgcgagaccatggaccagttcgtcggcagcaatctctccccgattcagtctggatgctgcaagcccccaacaggatgcaacttcgcctacgtgagcgagaccgtctggaccaaaccttctggctttaactctaccgatgacccggactgcacgacatggtcgaatgatcagaccgccctgtgctacgactgccagtcatgcaaagctggtgtgctcgctaacctgaagaatgactggaagaagattgcgactgtcaacatcatcttcctgatcttcctcatcatcgtctactccgttgggtgctgcgctttcaggaacaacaggcgggacaactcgtacccggcttggaaatga

SEQ ID NO: 3944 - protein, 269 aa, Oryza sativa
MARCSNGLLGLLNAGVLVLAVVVLGGGIWLSNRAATTDCERFMERPVVALGVLLLALSLAGLAGALCGASCLLWLYLLALFLLILALFVFTVFAFVVTNRGAGWVVSGRGYREYRLGDYSTWLQRRVENSANWAKIRSCLQDGKVCEKLGARRETMDQFVGSNLSPIQSGCCKPPTGCNFAYVSETVWTKPSGFNSTDDPDCTTWSNDQTALCYDCQSCKAGVLANLKNDWKKIATVNIIFLIFLIIVYSVGCCAFRNNRRDNSYPAWK

SEQ ID NO: 3945 - DNA, 822 bp, Oryza sativa
  CDS (1)..(822)
atggcgccgcggtgcagcaacgccgtcttcgcggccatcaacgtcgtcacgctcctcctgggcgccgccgtcctcgccgcggggatctactacggcgccccgcaccgcggcggcggcggcgtcaccgagtgcgagcggttcctccgcgcgccggcgctcgccctcggcggcgccatcgtggccgtgtccctggcggggctcgccggcgcgtgctgccgcgcgacgccgctgctgtgggcctacctcctcctgacgggcctcctcatcctcgccgccgcctgcttcggcgtgttcgcgctcgtcgtcaccaacgccggcgccgggcgggccgtgtccgggagagggttcagggagtaccacctcggcgactactcgacgtggctccgccggagcgtggaggacggcggccactgggcgaggatcaggagctgcctcgtcgacaccggcgtgtgccggagcttgaagagcaaccagacgctcgacgaattcgtcaactccaacctctcgccgctgcagtctggatgctgcaagccaccaacagcatgcaacttcacataccagaacgagacatactggatcaagcctcctacacccagcaactactcagaccctgactgcaactcttggtcgaatgaccagtctgagctctgctacggctgccagtcctgcaaggccggtgttcttggcaacctgaggagcagctggaagaagatcgccttcgtcaacgccgccttcgtcgccctcctcctcgtcgtctactccctcggctgctgcgcgctccggaacaaccggcggcacaagtactcgctggttgggaaatga

SEQ ID NO: 3946 - protein, 273 aa, Oryza sativa
MAPRCSNAVFAAINVVTLLLGAAVLAAGIYYGAPHRGGGGVTECERFLRAPALALGGAIVAVSLAGLAGACCRATPLLWAYLLLTGLLILAAACFGVFALVVTNAGAGRAVSGRGFREYHLGDYSTWLRRSVEDGGHWARIRSCLVDTGVCRSLKSNQTLDEFVNSNLSPLQSGCCKPPTACNFTYQNETYWIKPPTPSNYSDPDCNSWSNDQSELCYGCQSCKAGVLGNLRSSWKKIAFVNAAFVALLLVVYSLGCCALRNNRRHKYSLVGK

SEQ ID NO: 3947 - DNA, 834 bp, Oryza sativa
  CDS (1)..(834)
atggcgttccggctcagcaacaacgtgatcggggcgctcaacctggtgacgctgctgctctccgctcccatcctcagcggcgggatctggatggccacccgcggcgacggcggcgagtgcgaccgccacctctcctcgccggccatcgcgctgggggcggtcctcatggccgtctccctcgcgggcctcgtcggcgcgtgctgccgcgtcacctggctactctgggtctacctcctcgccatgttcgccctcatcgtcgccctcctcggcttcaccgccttcgcctttgccgtcaccaaccgtggcgccggcgaggccgtctccggccgcgggtacagggagtaccgcctcggggactactccacgtggctgcggcgccacgtggggagcagcaagaactgggacaagatcaggagctgcctcgccggcgccgacgtttgcaggagcctgcaggacaggaacgagacgtgggcgcagttcgtcgccgacgacctctccccggtccagtccggctgctgcaagccgcccacgagctgcaacttcacgtacggcggcggcacgcggtggggcaagacggcgaggctgagctccgccgacccggactgcgacgagtggagcaacgacgccgacgaggtctgctacggctgccggtcgtgcaaggccggcgtggtggccgcgctcaagagggactggaagcgcgtggccatcgtcaacgtcgtcttcctcgccttcatcgtcgtcgtctactccgtcgggtgctgcgcgttcaagaacagccggcgcgacagtgtccaccgccgcagcggcgggtggaagcaggccggatacgcctag

SEQ ID NO: 3948 - protein, 277 aa, Oryza sativa
MAFRLSNNVIGALNLVTLLLSAPILSGGIWMATRGDGGECDRHLSSPAIALGAVLMAVSLAGLVGACCRVTWLLWVYLLAMFALIVALLGFTAFAFAVTNRGAGEAVSGRGYREYRLGDYSTWLRRHVGSSKNWDKIRSCLAGADVCRSLQDRNETWAQFVADDLSPVQSGCCKPPTSCNFTYGGGTRWGKTARLSSADPDCDEWSNDADEVCYGCRSCKAGVVAALKRDWKRVAIVNVVFLAFIVVVYSVGCCAFKNSRRDSVHRRSGGWKQAGYA

SEQ ID NO: 3949 - DNA, 831 bp, Oryza sativa
  CDS (1)..(831)
atggcgttccggctgagcaacagcctgctcgggatcctgaacgcggtgacgttcctcctgtcggtgcccgtgctgggcggcggcatctggctggcgacgcgcgccgacggcacggagtgcgagcgctacttctcggcgccggtgatcgcgttcggggtgttcctcctcctcgtctccctcgcgggcctcgtcggcgcctgctgccgcgtcaactgcctcctctggttctacctcgtcgccatgttcgtcctcatcgtcgtcctcttctgcttcaccgtcttcgccttcgtcgtcaccaacaagggcgccggcgaggccgtctccggcagagggtacaaggagtacaggctcggcgactactccaactggctgcagaagcggatggagaacagcaagaactggaacaggatcaggagctgcctccaggactccaaggtctgcaagaaactgcaggacaagaactgggatcggacccagttcttcaaagccgacctctccccgctcgagtccggatgctgcaagccacccagcagctgcaacttcctctacgtcagcggcacgaactggacgaaggtgcccaccaactcgtcggacccggactgcaacacgtgggtcgacgacggcacgcagctgtgctacaactgccagtcgtgcaaggccggcgcggtggcgaccctgaagcgggactggaagcgcgtcgccgtcgtctgcatcgtcttcctcgtcttcatcgtcatcgtctactccctcggctgctgcgcgttcaggaacaaccggagggacaaccgcggcgcctatcgcggtgccgcgtggaagggcggatacgcctga

SEQ ID NO: 3950 - protein, 276 aa, Oryza sativa
MAFRLSNSLLGILNAVTFLLSVPVLGGGIWLATRADGTECERYFSAPVIAFGVFLLLVSLAGLVGACCRVNCLLWFYLVAMFVLIVVLFCFTVFAFVVTNKGAGEAVSGRGYKEYRLGDYSNWLQKRMENSKNWNRIRSCLQDSKVCKKLQDKNWDRTQFFKADLSPLESGCCKPPSSCNFLYVSGTNWTKVPTNSSDPDCNTWVDDGTQLCYNCQSCKAGAVATLKRDWKRVAVVCIVFLVFIVIVYSLGCCAFRNNRRDNRGAYRGAAWKGGYA

SEQ ID NO: 3951 - DNA, 813 bp, Oryza sativa
  CDS (1)..(813)
atgggtagtagcacaagcgccttcgtcatcaggtggatcaacttcttcaccatgatactggcactactggtggtggggttcgggttctggatgagcacccacaacgacgaatgcaggcggtccttgacgatccctgtcatgggtcttggaggagtaattttcctcatatcgctcgtggggtttcttggtgcttggaagaaaattgcttgcttgctatggacatatctggtaatgctgttcgtggttttggtggcaatcatggtgttcacagtgcttgcgtttattatcacaaataccggaactggccattctgtctctggggtgagatacaaagagtatcgtctgcaggattatagctcttggtttatcaaacagctgaatgacactgaaaaatggactcacctgagaagctgtcttgtgaaatcagatgattgtaatggcttgtcaagaagatacaagactctgaaacaatacaagcttgcagatcttactcctatggagtctggttgctgccgtccaccggcagagtgcgggtacccagctgtaaacgcttcctactttgatttgagctatcatccagtcagcacgaatgtcgactgcaaactgtacaaaaacgcacgctctgttctgtgctatgattgtgattcttgcaaagctggggttgctcaatacatgaaaacagagtggagggtggtagccatctttaacgtcatactgtttgtcatcttgtctttcgtctacttcgtcgcgtgctgtgcgcgccgaaacaccggagagagcgactccaaggttcctacaagatggcatgcatga

SEQ ID NO: 3952 - protein, 270 aa, Oryza sativa
MGSSTSAFVIRWINFFTMILALLVVGFGFWMSTHNDECRRSLTIPVMGLGGVIFLISLVGFLGAWKKIACLLWTYLVMLFVVLVAIMVFTVLAFIITNTGTGHSVSGVRYKEYRLQDYSSWFIKQLNDTEKWTHLRSCLVKSDDCNGLSRRYKTLKQYKLADLTPMESGCCRPPAECGYPAVNASYFDLSYHPVSTNVDCKLYKNARSVLCYDCDSCKAGVAQYMKTEWRVVAIFNVILFVILSFVYFVACCARRNTGESDSKVPTRWHA

SEQ ID NO: 3953 - DNA, 933 bp, Oryza sativa
  CDS (1)..(933)
atggcgttatttggggtaagagagatgagacgatttgagagaatgacgccggaaaggcgagctgaatatctactaggcatggccggtgtcgtgacgttggtaacgtcgatcctcctcctgttaagcggcagcacctatgggtacggccctaaggtttgcaccggccgtggcgtcttctttagccccacgatcgctctcggcctcctgctgatggccgccttcattttgggtacgtgcggccagaggtacggtgatgagtgcctctttggttgctacctcctcggtctcctcatcgccttccccctcctccttgccttcataatcttcggctacgtcgctgttggaggcatcgacctcggcggcgtaagtattcgcgagtacaatctggaggagtacagcgggtggctcaggggccgtgtggccgacccgcactactgggaaacaaccagcgcatgcctacgcgacgggaacgtctgcagcggcatgacgcggttggtacgcgacccagacaccggcatattcgtccctgagttatcccggtatgaaaggtggctcaaggaacatgggattaaaaaaggcgtgcacgtaatgtcgcctatcgagtctggatgctgcaagccaccgacatcatgtggtttcagatatgtcaacgggacgacgtggataccaacaccagcagcagcaggcacccctgccgcggcgaccaacgtcgactgcagcaggtggagcaacaaccaacagacgctctgcttccagtgcgactcatgcaaggctggcttcctggacgacatcaagaaagcctggagtttcgatgccctgtatccaattctcgcgttggtcggagcctttctttcatgctttgcaggcgtcaagtattggagaccaagactagacactgggtactcactaattagagaacgagcagtggcttaa

SEQ ID NO: 3954 - protein, 310 aa, Oryza sativa
MALFGVREMRRFERMTPERRAEYLLGMAGVVTLVTSILLLLSGSTYGYGPKVCTGRGVFFSPTIALGLLLMAAFILGTCGQRYGDECLFGCYLLGLLIAFPLLLAFIIFGYVAVGGIDLGGVSIREYNLEEYSGWLRGRVADPHYWETTSACLRDGNVCSGMTRLVRDPDTGIFVPELSRYERWLKEHGIKKGVHVMSPIESGCCKPPTSCGFRYVNGTTWIPTPAAAGTPAAATNVDCSRWSNNQQTLCFQCDSCKAGFLDDIKKAWSFDALYPILALVGAFLSCFAGVKYWRPRLDTGYSLIRERAVA

SEQ ID NO: 3955 - DNA, 858 bp, Brassica napus
  CDS (1)..(858)
atgagatcgagcaaccatctaataggtatggtcaacttcctcaccttcctcctatcgatccccatcctcggcggagggatatggctaagcagcagagctaactcaaccgactgtttacgtttcctccagtggccactcatcgtcatcggaatctccatcatggtcgtatcacttgccggattcgccggagcttgttaccgtaacaagttcctcatgtggctatacctcgtggccatgcttctcatcatcgcagccttgataggattcatcatctttgcttacgcagtcactgataaaggatctggccgaaccgtgcttaaccggggttatcttgactattatcttcaagattattccggttggttgaaggatagggtctcggatgatggatactggggaaaaatcagctcgtgtattagagattctggagcttgtaggaagatcggaaggaactttaatggcgcccctgaaagtgctgatatgttcttccagagaagccttagccctgttgagtctggctgttgcaagccgccatcagattgcgggtatgcatatggtaacgagacattttggacgcaaggaggagggctcgtaggtgcaaacccggactgtatgttgtggaataacgagcagagcatgctctgttaccagtgcagtgctggtaaagcgggtgttctagggagcttgaagaagagctggagaaaagtgtctgtgatcaacatcgtggtgcttattattctcgtgatcttctacgttatcgcttatgcggcttacaggaatgtcaagaggattgataacgatgagccggccggtgaggctaggatgacaaaatcacaccctagtcatttccacctttga

SEQ ID NO: 3956 - protein, 285 aa, Brassica napus
MRSSNHLIGMVNFLTFLLSIPILGGGIWLSSRANSTDCLRFLQWPLIVIGISIMVVSLAGFAGACYRNKFLMWLYLVAMLLIIAALIGFIIFAYAVTDKGSGRTVLNRGYLDYYLQDYSGWLKDRVSDDGYWGKISSCIRDSGACRKIGRNFNGAPESADMFFQRSLSPVESGCCKPPSDCGYAYGNETFWTQGGGLVGANPDCMLWNNEQSMLCYQCSAGKAGVLGSLKKSWRKVSVINIVVLIILVIFYVIAYAAYRNVKRIDNDEPAGEARMTKSHPSHFHL

SEQ ID NO: 3957 - DNA, 795 bp, Brassica napus
  CDS (1)..(795)
atggtgcagtgtagcaataaccttgtcggaatcctaaacttcttcaccttcctcctctcagtccccatcctctccgccggaatctggctcggcaaaaatgcagccaccgagtgtgagcggttcctcgacaaaccaatcgtcgttctcggaatcttcctcatgtttgtctccatcgccggtctagtcggcgcttgctgccgtgtctcttgcctcctatggctttaccttttcgctatgttccttctcatactcctcgggttctgttttaccatcttcgccttcgtcgtcaccaaccgcggcgccggtgaggttttgtccgatagagggtataaggagtaccgtgtaggtgattactctaactggctccagaagcgagttagcaatgctaagaattgggaccggatcaagagctgcttggtttactccaacgtgtgttccactttcagcagtcgctacgccagcgtcaccgtcaaagagttctacaagactaatctcaatgcccttcagtctggttgctgtaagccgtccaatgattgtaacttcacctatgtgagcccgactaattggacaaagactactggtccatacacaaacgaggactgtaacgtttgggacaacaggccgggaactttatgctacaactgccaagcgtgcaaggctggcctgctagataacctcaagaactcgtggaaaaaagtggctaaggtgaacattgtcttcctcatattcctcatcatcgtctactccgttggttgttgcgccttcaggaacaacaggaaacgcagctattattag

SEQ ID NO: 3958 - protein, 264 aa, Brassica napus
MVQCSNNLVGILNFFTFLLSVPILSAGIWLGKNAATECERFLDKPIVVLGIFLMFVSIAGLVGACCRVSCLLWLYLFAMFLLILLGFCFTIFAFVVTNRGAGEVLSDRGYKEYRVGDYSNWLQKRVSNAKNWDRIKSCLVYSNVCSTFSSRYASVTVKEFYKTNLNALQSGCCKPSNDCNFTYVSPTNWTKTTGPYTNEDCNVWDNRPGTLCYNCQACKAGLLDNLKNSWKKVAKVNIVFLIFLIIVYSVGCCAFRNNRKRSYY

SEQ ID NO: 3959 - DNA, 795 bp, Brassica napus
  CDS (1)..(795)
atggtgcagtgtagcaacaaccttctcggaatcctaaacttcttcaccttcctcctctcagtcccaatcctctccgccgggatctggctcggcaaaaatgcagccaccgagtgcgagcgtttcctcgacaaaccaatcgtcgtcatcggaatcttcctcatgttcgtctccatcgccggtctcgtcggcgcttgctgccgcgtctcgtgcctcctctggctctacctttgcgccatgttcctcctcatactcctcgggttctgcttcaccatcttcgccttcgccgtcaccaaccgcggcgccggagaggttttgtccgatagagggtataaggagtaccgcgtcggtgattactcgaactggttgcagaaacgagtgagcaatgctaagaattgggatcggatcaagagctgcttgatctactccaacgtgtgctccactttcagcactcgctacgctagcgtcaacgttgaagagttctaccagactaatctcaatgcccttcagtctggttgctgtaagccgtccaatgattgtaacttcacgtacgtgggccccactaattggacaaagaccactggtccttacacaaacgaggactgtaacgtttgggacaacaggccgggaactttatgctacaactgccaagcgtgcaaggctggcctgctagataacctcaagaactcgtggaaaaaagtggctaaggtgaacattgtcttcctcatattcctcatcatcgtctactccgttggttgttgcgccttcaggaacaacaggaaacgcagctattattag

SEQ ID NO: 3960 - protein, 264 aa, Brassica napus
MVQCSNNLLGILNFFTFLLSVPILSAGIWLGKNAATECERFLDKPIVVIGIFLMFVSIAGLVGACCRVSCLLWLYLCAMFLLILLGFCFTIFAFAVTNRGAGEVLSDRGYKEYRVGDYSNWLQKRVSNAKNWDRIKSCLIYSNVCSTFSTRYASVNVEEFYQTNLNALQSGCCKPSNDCNFTYVGPTNWTKTTGPYTNEDCNVWDNRPGTLCYNCQACKAGLLDNLKNSWKKVAKVNIVFLIFLIIVYSVGCCAFRNNRKRSYY

SEQ ID NO: 3961 - DNA, 858 bp, Brassica napus
  CDS (1)..(858)
atgagatcgagcaaccatctaataggtatggtcaacttcctcaccttcctcctatcgatccccatcctcggcggagggatatggctaagcagcagagctaactcaaccgactgtttacgtttcctccagtggccactcatcgtcatcggaatctccatcatggtcgtatcacttgccggattcgccggagcttgttaccgtaacaagttcctcatgtggctatacctcgtggccatgcttctcatcatcgcagccttgataggattcatcatctttgcttacgcagtcactgataaaggatctggccgaaccgtgcttaaccggggttatcttgactattatcttcaagattattccggttggttgaaggatagggtctcggatgatggatactggggaaaaatcagctcgtgtattagagattctggagcttgtaggaagatcggaaggagctttaatggcgtccctgaaagtgctgatatgttcttccagagaagccttagccctgttgagtctggctgttgcaagccaccatcagattgcgggtatgcatatggtaacgagacattttggacgcaaggaggagggctcgtaggtgcaaacccggactgtatgttgtggaataacgagcagagcatgctctgttaccagtgcagtgcttgtaaagcgggtgttctagggagcttgaagaagagctggagaaaagtgtctgtgatcaacatcgtggtgcttattattctcgtgatcttctacgttatcgcttatgcggcttacaggaatgtcaagaggattgataacgatgagccggccggtgaggctaggatgacaaaatcacaccctagtcatttccacctttga

SEQ ID NO: 3962 - protein, 285 aa, Brassica napus
MRSSNHLIGMVNFLTFLLSIPILGGGIWLSSRANSTDCLRFLQWPLIVIGISIMVVSLAGFAGACYRNKFLMWLYLVAMLLIIAALIGFIIFAYAVTDKGSGRTVLNRGYLDYYLQDYSGWLKDRVSDDGYWGKISSCIRDSGACRKIGRSFNGVPESADMFFQRSLSPVESGCCKPPSDCGYAYGNETFWTQGGGLVGANPDCMLWNNEQSMLCYQCSACKAGVLGSLKKSWRKVSVINIVVLIILVIFYVIAYAAYRNVKRIDNDEPAGEARMTKSHPSHFHL

SEQ ID NO: 3963 - DNA, 852 bp, Glycine max
  CDS (1)..(852)
atgtataggttcagcaacacagtgatcgggttcttgaacttgttcacacttttagcatccataccaataattggagcaggtctatggatggcaaggagcagcacaacctgtgaaaattttctccaaacccctcttttggttataggatttgttgtgcttgtggtgtcactagcaggcttcattggtgcatgctttcatgtggcatgtgcactatggttgtacttggtggtcatgttgttcctcatagcagcactgatgggtttgactatatttggttttggggtgactagcaagggtggcggtgtggaagtgcctggaagggtttacaaggagtatcatcttcaggattactcaccatggttgaggaagagaattcaggatcctcgctattggaatactattagaggctgtattttggggtccaaaacttgtgaaaagcttgcctcttggacccctcttgattatatgcaaagggatatgtctccaatacagtctggatgttgtaagccaccaactgcttgcacttacaacgtggcaacaatgatgatgacccaagaccctgattgctacaggtggaacaatgcccctaatttgctctgctatgagtgtgattcttgcaaagctggtgtgcttgaagacataagagggaattggcacaagctctcagttctcactgtcaccatgcttgtgcttcttatagggatttattccattgggtgctgtgctttcagaaacacaagaagagctgaaacggactatccctatggtgaaaaccggatgaccaaagtccgacccagatgggattaccattgttggaggtggttacatgacaggagagaacagctttattag

SEQ ID NO: 3964 - protein, 283 aa, Glycine max
MYRFSNTVIGFLNLFTLLASIPIIGAGLWMARSSTTCENFLQTPLLVIGFVVLVVSLAGFIGACFHVACALWLYLVVMLFLIAALMGLTIFGFGVTSKGGGVEVPGRVYKEYHLQDYSPWLRKRIQDPRYWNTIRGCILGSKTCEKLASWTPLDYMQRDMSPIQSGCCKPPTACTYNVATMMMTQDPDCYRWNNAPNLLCYECDSCKAGVLEDIRGNWHKLSVLTVTMLVLLIGIYSIGCCAFRNTRRAETDYPYGENRMTKVRPRWDYHCWRWLHDRREQLY

SEQ ID NO: 3965 - DNA, 852 bp, Glycine max
  CDS (1)..(852)
atgcaacgtttcagcaacacggtgataggattcttgaactttttcacgctcttggcatcaatacccatcataggtgcgggtctatggatggcaaggagcaccacaacatgtgaaaatttcttccaaaccccacttttggtgataggctttgttgtgcttgtgatttcgctagcgggtttcataggggcatgttttcatgtggcatgggcattgtgggtgtacttggtgatcatggtgttcattatagctgccctcttagggtttgccgtttttggctttgttgtgacggaacagggtgggggagtggaagtgcctggtaaggcttacaaagagtatcgtctcgaccgttattcgccatggctgaggaataggattaaggatcctcagtactggagcaccattaggagctgcattttggggtctaacacttgtgcaaagcttgccttttggacccctcttgagtatgtgcagagggacatgtctcccatacagtctggatgttgtaagccacccacagggtgcagttacaacgaggaaacagtggtagtgacacaagatccggactgctaccgttggaacaacgcccccactctgctttgctacgattgcgactcttgcaaggctggtgtgctcgaaaacattagaaggggctggcacaacatctctgttcttaacgttgtcgttcttgtgttcctcataggcatatattccattgccttttgtgctttcaggaatgccagaagagctcaaactgattatcctcatggagtaaaccgcatgaccaaagttaaacccagatgggattactattgttggagatggtggtataacaagaaggaggagcttttttga

SEQ ID NO: 3966 - protein, 283 aa, Glycine max
MQRFSNTVIGFLNFFTLLASIPIIGAGLWMARSTTTCENFFQTPLLVIGFVVLVISLAGFIGACFHVAWALWVYLVIMVFIIAALLGFAVFGFVVTEQGGGVEVPGKAYKEYRLDRYSPWLRNRIKDPQYWSTIRSCILGSNTCAKLAFWTPLEYVQRDMSPIQSGCCKPPTGCSYNEETVVVTQDPDCYRWNNAPTLLCYDCDSCKAGVLENIRRGWHNISVLNVVVLVFLIGIYSIAFCAFRNARRAQTDYPHGVNRMTKVKPRWDYYCWRWWYNKKEELF

SEQ ID NO: 3967 - DNA, 858 bp, Glycine max
  CDS (1)..(858)
atgagaacaagcaaccacttgatcggtcttttgaacttcctaacgttcctgctgtcgattccgatcctaggaggcgggatatggctgagcagcagggcgaacaacaccgactgcctcaagttcctgcagtggccgctcatcatcatcggcgtcagcatcatggtcgtgtccctggcggggttcgccggcgcgtgttaccgcaacaccttcctcatgcggctctacctcgtcgtcatgttcctggtcattgccgttctgatcgggttcatcatattcgcctacgttgtcaccgacaaggggtccggtcggagggtgatgaaccgcgcttacttggagtattatcttgaggactattcggggtggttggaggagcgcgtggcgagtgatagctactggggaaagattgcttcgtgtattagggattctaaagtgtgtggtaggatggggagaaccgttaatgggatgcccgagactcctgatatgttctacctcagccatctcacgcctattcagtctggttgctgcaagcccccaacagattgtggctatgtctatcagaatgagacagtgtggatcccaggatcaggattgatgggagccaacccagattgcacaaggtggagcaatgatcaagagcagctttgctatgcatgtgattcttgcaaggctggtgtgctggcaagtctcaagaagagttggaggaaggtctcagtgatcaacattgttgttatgatcatccttgtcattgtttacataattgcttatgcagcttataggaacaaccgcaagatggataacgatgagccctatggtgaagcaaggatgacaaaggctcaacctagtgccttccatctttag

SEQ ID NO: 3968 - protein, 285 aa, Glycine max
MRTSNHLIGLLNFLTFLLSIPILGGGIWLSSRANNTDCLKFLQWPLIIIGVSIMVVSLAGFAGACYRNTFLMRLYLVVMFLVIAVLIGFIIFAYVVTDKGSGRRVMNRAYLEYYLEDYSGWLEERVASDSYWGKIASCIRDSKVCGRMGRTVNGMPETPDMFYLSHLTPIQSGCCKPPTDCGYVYQNETVWIPGSGLMGANPDCTRWSNDQEQLCYACDSCKAGVLASLKKSWRKVSVINIVVMIILVIVYIIAYAAYRNNRKMDNDEPYGEARMTKAQPSAFHL

SEQ ID NO: 3969 - DNA, 852 bp, Glycine max
  CDS (1)..(852)
atgtataggttcagcaacacagtaatcgggttcttgaacttgttcacacttttagcatccataccaataattggagcaggtctatggatggcaaggagcagcacaacctgtgagaattttctccaaacccctcttttggttataggattcgttgtgctagtggtgtcactagcaggcttcattggtgcatgttttcatgtggcatgtgcactatggttgtacttggtggtcatgttgttcctcatagcagcactcatgggcttcacaatatttggttttggtgtgactagcaagggtggcggtgtggaagtgcctggaagggtttacaaggagtatcatcttcaagattactcaccatggttgaggaagagaattcaggatcctcgctattggaacactattagaggctgtattttggggtccaaaacttgtgaaaagcttgcctcttggacccctcttgattatatgcaaagggatatgtctccaatacagtctggatgttgtaagccaccaactgcttgcacttacaacgtggcaacaatgatgatgacccaagaccctgattgctacaggtggaacaatgcccctaatttgctctgctatgagtgtgattcttgcaaagctggtgtgcttgaagacataagagggaattggcacaagctctcagttctcactgtcaccatgcttgtgcttcttatagggatttattccattgggtgctgtgctttcagaaacacaagaagagctgaaacggactatccctatggtgaaaaccggatgaccaaagtccgacccagatgggattaccattggtggaggtggttacatgacaggagagaacagctttattag

SEQ ID NO: 3970 - protein, 283 aa, Glycine max
MYRFSNTVIGFLNLFTLLASIPIIGAGLWMARSSTTCENFLQTPLLVIGFVVLVVSLAGFIGACFHVACALWLYLVVMLFLIAALMGFTIFGFGVTSKGGGVEVPGRVYKEYHLQDYSPWLRKRIQDPRYWNTIRGCILGSKTCEKLASWTPLDYMQRDMSPIQSGCCKPPTACTYNVATMMMTQDPDCYRWNNAPNLLCYECDSCKAGVLEDIRGNWHKLSVLTVTMLVLLIGIYSIGCCAFRNTRRAETDYPYGENRMTKVRPRWDYHWWRWLHDRREQLY

SEQ ID NO: 3971 - DNA, 858 bp, Glycine max
  CDS (1)..(858)
atgagaacaagcaaccacttgatcggtctcttaaacttcctaacattcctgctgtcgattccgatcctaggaggcgggatatggctgagcagcagggcgaacaacaccgactgcctcaagttcctgcagtggccgctcatcatcatcggcgtcagcatcatggtcgtgtccctggcggggttcgccggcgcgtgttaccgcaacaccttcctcatgcggctctacctcgtcgtcatgttcctggtcattgccgttctgatcgggttcatcatattcgcctacgttgtcaccgacaaggggtccggtcggagggtgatgaaccgcgcttacttggagtattatcttgaggactattcggggtggttggaggagcgcgtggcgagtgatagctactggggaaagattgcttcgtgtattagggattctaaagtgtgtggtaggatggggagaaccgttaatgggatgccccaaactcctgatatgttctacctcacccacctcacgcctattcagtctggttgctgcaagcccccaacagattgtggatatgtgtatcagaatgagacagtgtggatcccaggatcaggattgatgggaaccaacgcagattgcacaaggtggagcaatgaccaagagcagctttgctatgcctgtgattcttgcaaggctggtgtgctggcaagtctcaagaagagttggaggaaggtctcagtgatcaacattgttgttatgatcatccttgtcattgtttacataattgcttatgcagcttataggaacaaccgcaagatggataacgatgagccctatggtgaagcaaggatgacaaaggctcaacctagtgccttccatctttag

SEQ ID NO: 3972 - protein, 285 aa, Glycine max
MRTSNHLIGLLNFLTFLLSIPILGGGIWLSSRANNTDCLKFLQWPLIIIGVSIMVVSLAGFAGACYRNTFLMRLYLVVMFLVIAVLIGFIIFAYVVTDKGSGRRVMNRAYLEYYLEDYSGWLEERVASDSYWGKIASCIRDSKVCGRMGRTVNGMPQTPDMFYLTHLTPIQSGCCKPPTDCGYVYQNETVWIPGSGLMGTNADCTRWSNDQEQLCYACDSCKAGVLASLKKSWRKVSVINIVVMIILVIVYIIAYAAYRNNRKMDNDEPYGEARMTKAQPSAFHL

SEQ ID NO: 3973 - DNA, 861 bp, Oryza sativa
  CDS (1)..(861)
atgtatccttacagattcagcaacgtgatgatcggatacctgaacctggcgacgctgctggcgtcgatcccggtgatcggggcggggctgtggatggcgaaggggtcaacggcgacgtgcgggtcgatgctgcagacgccgctgctggtgatcggcttcgtcgtcctcctcgtctccctcgccggcttcgtgggcgcctgcttccacgtggcgtgggcgctgtggctctacctcctcgccatgatgctcctcatcgccttcctcctcggcctcaccgccttcggcttcgccgtcaccgccggcggcggcggcacccaggtccccggccgcccctaccgcgagtaccacacctccgactactcgtcctggctgcagaagcacatccaggacgccaaatactggcgccccgcgctcgcatgcgtcgttggatccaaggcttgccccaagatcgccaattggtcacccatggattacctccagcatgatctcaccccaatccagtcggggtgctgcaagccgccgacggcgtgcgcgtacagcggcggggtggccgtcggagcgcaggacgaggactgcttccggtggaacaacgcggcggggatactgtgctacgggtgcgagtcgtgcagggccggggtgatggagaaggtgagggaggattggcacaagatctcggtgctcaacgtcatggtgctggtggtgctcatctgcatctgcgcctgcggctgctgcgccttcaggaacgcccgccgctccgtctccgagtacccttacggggtaaaccgcatgcacaagatccacccccgatgggactactactggtggcgatggtggcgtgataggagagaacagctctactag

SEQ ID NO: 3974 - protein, 286 aa, Oryza sativa
MYPYRFSNVMIGYLNLATLLASIPVIGAGLWMAKGSTATCGSMLQTPLLVIGFVVLLVSLAGFVGACFHVAWALWLYLLAMMLLIAFLLGLTAFGFAVTAGGGGTQVPGRPYREYHTSDYSSWLQKHIQDAKYWRPALACVVGSKACPKIANWSPMDYLQHDLTPIQSGCCKPPTACAYSGGVAVGAQDEDCFRWNNAAGILCYGCESCRAGVMEKVREDWHKISVLNVMVLVVLICICACGCCAFRNARRSVSEYPYGVNRMHKIHPRWDYYWWRWWRDRREQLY

SEQ ID NO: 3975 - DNA, 819 bp, Triticum aestivum
  CDS (1)..(819)
atggtgcggctgagcaacaccatgatcgggatcctgaacgccatcaccttcctcctctcggtgccgatcctggcggggggcatctggctgcgcgcgcgcgccgacggcaccgagtgcgagcggtacctggcggcgccggtcatcgtcctgggggtcttcctcatgctcgtctccatcgcggggcttgtcggcgcctgctgccgcgtgacatgcctcctctggttctacctcgtcgccatgttcctgctcatcgtcgtcctcctcggcatcaccgtcttcgccttcgtcgtcacgcacaagggcaccggcgaggccgtctccggccgcgggttcaaggagtaccggctcggggactactccacctggctgcagaggcgggtggagaacgacaggaactggaacaggatcagggggtgcctccaggacgccaaggtctgcaagtcgctcgaggacaggagggagacggtcgaccagttcatgtcctccgatctctcccccatccagtccggctgctgcaagcctccgatcagctgcggcttcacctacgtcaacagcacgcaatggaccggccccgccaagtcgacggagcccgactgcggcgcgtggtccaacgacggggcgctctgctacggctgccagtcgtgcaaggccggcgtggtggccaccctcaagcgcaattggaagcgctccgccatcatcaacatcgtcttcctcgtcttcatcatcattgtctactccgtcggctgctgcgccttcaggaacaaccgccgcgaccaccgcaacggcggcgggtacaagcagcagggcgcgtacgcctga

SEQ ID NO: 3976 - protein, 272 aa, Triticum aestivum
MVRLSNTMIGILNAITFLLSVPILAGGIWLRARADGTECERYLAAPVIVLGVFLMLVSIAGLVGACCRVTCLLWFYLVAMFLLIVVLLGITVFAFVVTHKGTGEAVSGRGFKEYRLGDYSTWLQRRVENDRNWNRIRGCLQDAKVCKSLEDRRETVDQFMSSDLSPIQSGCCKPPISCGFTYVNSTQWTGPAKSTEPDCGAWSNDGALCYGCQSCKAGVVATLKRNWKRSAIINIVFLVFIIIVYSVGCCAFRNNRRDHRNGGGYKQQGAYA

SEQ ID NO: 3977 - DNA, 810 bp, Triticum aestivum
  CDS (1)..(810)
atggcgcggtgcagcaacgggctgctgggcctgctgaacgcgggggtgctggtcctcgccctcgtcgtcctcggcggcggcatctggctgagccaccgggccgccaccaccgactgcgagcggttcctggagcggccggtcatcgcgctgggtgccctgctcctggcgctctccctcgcgggcctcgcggggtccctctgccgcgcctcctgcctcctctggctctacctcgtcgcgctcttcctcctcatcgcgctcctcctcgtcttcaccgtcttcgccttcgtcgtcaccaaccgcggcgccggctccgtcgtctccgggaggggctacagggaataccgcctcggggagtactccacctggctccagcgccgggtcgagagcgccggcaactgggccaagatccgcagctgcctccgcgatggcggggtctgccagaggttcggcgccaggggggagtccctgcagcagttcgtcaccaacaacctctccccgattcagtctggatgctgcaaacccccaactgggtgcaacttcacctaccagagcgagaccgtctgggccaaacctactggcttcaactctaccaacgaccccgactgcaacacgtggtcgaatgatccgagggccctctgctatgactgccagtcatgcaaggctggcgtgctcgctaatgtgaagaatgactggaagaaaatcgccaccgtcaacatcatattcctcatcttcctcatcatcgtctactctgttgggtgctgcgctttcaggaataacaggcgggacaactcgtacccagcctggaagtga

SEQ ID NO: 3978 - protein, 269 aa, Triticum aestivum
MARCSNGLLGLLNAGVLVLALVVLGGGIWLSHRAATTDCERFLERPVIALGALLLALSLAGLAGSLCRASCLLWLYLVALFLLIALLLVFTVFAFVVTNRGAGSVVSGRGYREYRLGEYSTWLQRRVESAGNWAKIRSCLRDGGVCQRFGARGESLQQFVTNNLSPIQSGCCKPPTGCNFTYQSETVWAKPTGFNSTNDPDCNTWSNDPRALCYDCQSCKAGVLANVKNDWKKIATVNIIFLIFLIIVYSVGCCAFRNNRRDNSYPAWK

SEQ ID NO: 3979 - DNA, 885 bp, Triticum aestivum
  CDS (1)..(885)
atgcacggcggcgggtcgaagatgctgggggtggtgaacttcatcaccttcctggcgtcgatcccggtgctggggggcggcatctggctggcgtcccgggccaactccaccgactgcatccgctttctgcagtggcccatcatcatcatcggcctcgccgtcatggtcgtctccctcatgggcttcgccggcgcctgctaccgccagacctggctgctccgcatctacctcttcgccatgttcttcatcgtcgtcgcgctgctcttcttcatcgtcttcgccttcgccgtcaccgaccgcggggagggccaggtggtcatgaaccgccgcttcctcgagtaccagctctccgactacaacggatggctccgcaaccgcgtcgccgacccggagtactgggccaccatcagcgcatgcctccgcgacggccgcgcatgcgcctccatgcgccgccccgcccgcgaccacaacaccggcatgctcgtcaccgagccccccgtcatgttctacggccgcaacctctccccgattcagtccggatgctgcaagccaccgacatcgtgcgccttcacctacaacaacgagacgtactggagcgcgaaccccggcgtccccaccgtggtgaccgaccccgactgcctcaaatggagcaacgaccagcagacgctgtgcttccagtgcgactcgtgcaaggccggcgtcctggccggcatcaagaagagctggcgcaaggtggccatcatcaacatcgtcgtgctcatcatcctcatcatcgtctacgtcgccggctgcgccgcgttccgcaacgccaagagggacgacaacgacgagtcgtatggcatggccaggatgaccaagtcccggccgagcaggttccagttctag

SEQ ID NO: 3980 - protein, 294 aa, Triticum aestivum
MHGGGSKMLGVVNFITFLASIPVLGGGIWLASRANSTDCIRFLQWPIIIIGLAVMVVSLMGFAGACYRQTWLLRIYLFAMFFIVVALLFFIVFAFAVTDRGEGQVVMNRRFLEYQLSDYNGWLRNRVADPEYWATISACLRDGRACASMRRPARDHNTGMLVTEPPVMFYGRNLSPIQSGCCKPPTSCAFTYNNETYWSANPGVPTVVTDPDCLKWSNDQQTLCFQCDSCKAGVLAGIKKSWRKVAIINIVVLIILIIVYVAGCAAFRNAKRDDNDESYGMARMTKSRPSRFQF

SEQ ID NO: 3981 - DNA, 810 bp, Triticum aestivum
  CDS (1)..(810)
atggcgcggtgcagcaacgggctgctgggcctgctgaacgcgggggtgctggtgctcgccctcgtcgtcctcggcggcggcatctggctgagccaccgggcctccaccaccgactgcgagcggttcctggagcggccggtcatcgcgctcggcgccctcctcctcgcgctctccctcgcgggcctcgccgggtccctctgccgcgcctcctgcctcctctggctctacctcgtcgcgctcttcctcctcatcgcgctcctcctcgtcttcaccgtcttcgccttcgtcgtcaccaaccgcggcgccggctccgtcgtctccggccgcggctacaaggagtaccgcctcggggagtactccacctggctccagcgccgggtcgagagcgccgacaactgggccaagatccgcagctgcctccgcgacggcggcgtctgccagaggttcggggccaggggggagtcgctgcagcagttcgtcaccaacaacctctccccgattcagtctggatgctgcaagcccccaaccgggtgcaacttcacctaccagagcgagaccgtctgggccaaacctactggcctcaactctaccaacgaccctgactgcaacacgtggtcgaatgatcagagggccctctgctacgactgccagtcatgcaaggccggcgtgcttgccaacctgaagaacgactggaagaagatcgccaccgtcaacatcatattcctcatcttcctcatcatcgtctactctgttgggtgctgcgctttcaggaacaacaggcgggacaactcgtacccagcctggaagtga

SEQ ID NO: 3982 - protein, 269 aa, Triticum aestivum
MARCSNGLLGLLNAGVLVLALVVLGGGIWLSHRASTTDCERFLERPVIALGALLLALSLAGLAGSLCRASCLLWLYLVALFLLIALLLVFTVFAFVVTNRGAGSVVSGRGYKEYRLGEYSTWLQRRVESADNWAKIRSCLRDGGVCQRFGARGESLQQFVTNNLSPIQSGCCKPPTGCNFTYQSETVWAKPTGLNSTNDPDCNTWSNDQRALCYDCQSCKAGVLANLKNDWKKIATVNIIFLIFLIIVYSVGCCAFRNNRRDNSYPAWK

SEQ ID NO: 3983 - DNA, 813 bp, Zea mays
  CDS (1)..(813)
atggcgcggtgcagcaacggcctcctgggtctcctcaacgcgggcgtgctggtcctcgccatcgtcgcgctggggggcggcgcctggctcagccaccgcgcgtccaccaccgactgcgagcggttcctcgagcggcccgtcatcgcgctgggcgtgctcctcctcgcgctctccctcgcgggcctggccggcgcgctctgccgcgcctcctgcctcctctggctctacctcctcgcgctcttcctcctcatcctgctcctcttcgcattcaccgtcttcgcgttcgtcgtcaccaaccgcggcgccgggtgggtcgtctccggcagggggtacaaggagtaccgcctcggggactactccacctggctgcagaggagggtggagaactcgcagaactgggccaagatccgcagctgcctccaggacggcaaggtctgccagaagcttgcgtccagaaaggagacggccgcccagttcgtcaacagcaacctctccccgatccagtctggatgctgcaagccaccaacgggttgcaacttcacgtaccagagcgagactgtctggaccaagcccgctggcttcaacaccacaactgacgaccctgactgcaccacatggtcgaacgaccagaccgtgctctgctacgactgcatggcctgcaaggcaggcgtgctggccaacctgaagaacgactggaagaagatcgccaccgtcaacatcgtcttcctgatcttcctcgtcgtcgtctactccgtcgggtgctgcgcgttcaggaacaaccggcaggacaactcgtacccggcctggaaatga

SEQ ID NO: 3984 - protein, 270 aa, Zea mays
MARCSNGLLGLLNAGVLVLAIVALGGGAWLSHRASTTDCERFLERPVIALGVLLLALSLAGLAGALCRASCLLWLYLLALFLLILLLFAFTVFAFVVTNRGAGWVVSGRGYKEYRLGDYSTWLQRRVENSQNWAKIRSCLQDGKVCQKLASRKETAAQFVNSNLSPIQSGCCKPPTGCNFTYQSETVWTKPAGFNTTTDDPDCTTWSNDQTVLCYDCMACKAGVLANLKNDWKKIATVNIVFLIFLVVVYSVGCCAFRNNRQDNSYPAWK

SEQ ID NO: 3985 - DNA, 885 bp, Zea mays
  CDS (1)..(885)
atgctgcgcgggggctcgagcgtgctggggatcatcaacttcatcaccttcctgatctcgatcccgatcctgggcggcggcatctggctggcgtcgcgggccaactccaccgactgcatccgcttactgcagtggcccatcatcatcgtggggctcgtcctcatggtcatctccctcatgggcttcgccggcgcctgctaccgccagacctggctgctccgcctctacctcttcgccatgttcttcgtcgtcctcgcgcttctcttcttcatcgtcttcgccttcgccgtcaccgaccgcggcgacggccaggtcgtcatgaaccgccgcttccccgagtaccagctctccgactacggaggctggctccgcgaccgcgtcgccgacccacagtactgggccaccatcagcgcctgcctccgcgacggccacgcctgcgccggcatgaggcgcctcgcacgggaccccaacactggcatgctcgtgccggagacgtccaccatgttctacggccgcaacctctccccgatccagtctggatgctgcaagccaccgacgtcatgtgcgttcagctacatgaacgagacgtactggacacaaaaccccagcgtcccgacggtgaccaacgacccagactgcaaaaggtggagcaacgaccagcagacgctgtgcttccagtgcgactcgtgcaaggctggcgtcctcgcgggcatcaagaagagctggcgcaaggtggccgtcctgaacatcgtggtgctgattatccttgtgatcgtctacgtcgcgggctgcgccgcgttccgcaacgcgaagaggatcgagaacggcgaggcggtcggcatggcgcggatgaccaagtcccatccgagcaggttccagttctag

SEQ ID NO: 3986 - protein, 294 aa, Zea mays
MLRGGSSVLGIINFITFLISIPILGGGIWLASRANSTDCIRLLQWPIIIVGLVLMVISLMGFAGACYRQTWLLRLYLFAMFFVVLALLFFIVFAFAVTDRGDGQVVMNRRFPEYQLSDYGGWLRDRVADPQYWATISACLRDGHACAGMRRLARDPNTGMLVPETSTMFYGRNLSPIQSGCCKPPTSCAFSYMNETYWTQNPSVPTVTNDPDCKRWSNDQQTLCFQCDSCKAGVLAGIKKSWRKVAVLNIVVLIILVIVYVAGCAAFRNAKRIENGEAVGMARMTKSHPSRFQF

SEQ ID NO: 3987 - DNA, 813 bp, Zea mays
  CDS (1)..(813)
atggcgaggctgagccacggcctcctgggcgccctgaacctggtgacgctcctgctgtccctgccggtgctgtgcgccggcgtgtacatcgtcacgcgcgccaccacggcgtgcgagcgcggcctccagatccccgtcgtcgcgttcggctgcggactgctcctgctctccctcgtcggcctcgccggcgcctgcggacgccgcggcgccgccaggccgttcctctgggtgtacgtggccttcatgtttctgctcgccgtcctcgtgttcgcgttcgccgtgttcgcgttcgtggtcacccaccggggcgcgggcggcgccgtgtccgggagcgggtacagggagtaccgcctcggggactactccggctggctgcaggcgcggatcgccgagccggagacgtggcggcgcgtcgagagctgcctctctgaggcgcgcgtgtgcggcggccgggaattctacaggcaacacctctcgccaatccagtccggttgctgcaagccgccgacgtggtgcaggttccggtacgtgaacgccacgttctgggaggcaccgagatcggggctgtctgcggcggcggccagcgacggtgactgccgggcatggagcaacgaccagcaggtgctttgcttcgagtgcgacacgtgcaaagcccgcgtgctggagaccgccaagaagaagtggaagacagtggctatcgtcaacgtttccctcctcgcgttcatcgttattgtctacacggtcgggtgcttcgccttgcgcagcaaaggtggtggtcggtacttcaatggcggtggtcctgaccaaacataa

SEQ ID NO: 3988 - protein, 270 aa, Zea mays
MARLSHGLLGALNLVTLLLSLPVLCAGVYIVTRATTACERGLQIPVVAFGCGLLLLSLVGLAGACGRRGAARPFLWVYVAFMFLLAVLVFAFAVFAFVVTHRGAGGAVSGSGYREYRLGDYSGWLQARIAEPETWRRVESCLSEARVCGGREFYRQHLSPIQSGCCKPPTWCRFRYVNATFWEAPRSGLSAAAASDGDCRAWSNDQQVLCFECDTCKARVLETAKKKWKTVAIVNVSLLAFIVIVYTVGCFALRSKGGGRYFNGGGPDQT

SEQ ID NO: 3989 - DNA, 825 bp, Zea mays
  CDS (1)..(825)
atggcggtgagcaacaacatcacggcatgcatcaacttcctggtgcttctctgcaccatccccatcgccgcgacggggctgtggctggcctcgaggcacggcagcgaggactgcgccaggctggcccgctggcccgtcgccgtgctgggcgcgctcctcctgctggtcgcgctggcgggtttcgcgggcgcctactggaaccgcaggggcctgctcgcctgctacctcttcgcgatggccgccctcatcacgctcctcctcgccctcctcgtcttcgccttcgccgtcgcgcacgactccggcgcctacccggctcccggcagggcctaccaggactaccgcctccagggctactcctcgtggctgcgggggtacgtcgccgacgacccccgcaggtgggagggggtccgggcctgcgtcgccgcctccggcacctgcaggaagctcgccatggatagatcattcatcgtgccggagcagttctacatgtcgcacctctcgcccatcgagtccgggtgctgcaagccaccgacggtgtgcgggtacgcgtacgcgagcccgacggcgtggacgggcccggcggcgagcccggtggcggacgcggactgcgcggcgtggagcaacgaccccggccagctctgctacgcctgcgcctcctgcaaggccggcgtgctgggcggcctgcgcgagcagtggcgcggggccaccgtcccgctgctcgtcgccaccgtcgcgctcatcttcgtctacgtcgtcggctgcagcgcgttccgcaacacgcagaccgaggacctcttccgccgctacaaatggggaaattattaa

SEQ ID NO: 3990 - protein, 274 aa, Zea mays
MAVSNNITACINFLVLLCTIPIAATGLWLASRHGSEDCARLARWPVAVLGALLLLVALAGFAGAYWNRRGLLACYLFAMAALITLLLALLVFAFAVAHDSGAYPAPGRAYQDYRLQGYSSWLRGYVADDPRRWEGVRACVAASGTCRKLAMDRSFIVPEQFYMSHLSPIESGCCKPPTVCGYAYASPTAWTGPAASPVADADCAAWSNDPGQLCYACASCKAGVLGGLREQWRGATVPLLVATVALIFVYVVGCSAFRNTQTEDLFRRYKWGNY

SEQ ID NO: 3991 - DNA, 822 bp, Zea mays
  CDS (1)..(822)
atggccttccggctgagcaacaacctgatcggggtcctaaacttcgtcaccttcctgctctccgtcccgatcctgggcgcgggcatctggctgggccaccgcgccgacggcaccgagtgcgagcgctacctctcggcgcccgtcatcgcgctgggggccttcctcctcgccgtctccctggcgggcctcgtcggcgcctgctgccgcgtcacctggctgctctgggcctacctcctcgccatgttcgtcctcatcctcgtcctcttctgcttcaccgtcttcgccttcgtcgtcaccaacaggggcgccggcgaggccgtctccggccgcggatacaaggagtaccgcctcggggactactccaactggctgcagaagcgcgtcgagaacaccaggaactgggaccggatcaggagctgcctccaggactccaaggtctgcaagagcctgcaggacaagaacgagaccgtcgcccagttcatgagttccagcctctcccccatcgagtctggctgctgcaagccccccaccagctgcggctacacctacgtcggcggcacggactggacgccggtgaccaccaactcgacggacccggactgcaagacctggagcaacgacgcctcggcgctctgctacaactgccagtcgtgcaaggccggcgtggtggccacgttccagcggaactggaagcgcgtcgccatcgtctgcatcgtcttcctcgtcttcatcatcatcgtctactccgtcggctgctgcgccttcaggaacaaccgcagagacaacgcctaccgcggcgggtggaagggcgggtacgcttga

SEQ ID NO: 3992 - protein, 273 aa, Zea mays
MAFRLSNNLIGVLNFVTFLLSVPILGAGIWLGHRADGTECERYLSAPVIALGAFLLAVSLAGLVGACCRVTWLLWAYLLAMFVLILVLFCFTVFAFVVTNRGAGEAVSGRGYKEYRLGDYSNWLQKRVENTRNWDRIRSCLQDSKVCKSLQDKNETVAQFMSSSLSPIESGCCKPPTSCGYTYVGGTDWTPVTTNSTDPDCKTWSNDASALCYNCQSCKAGVVATFQRNWKRVAIVCIVFLVFIIIVYSVGCCAFRNNRRDNAYRGGWKGGYA

SEQ ID NO: 3993 - DNA, 885 bp, Zea mays
  CDS (1)..(885)
atgctgcgcgggggcacgggcatgctgggggttgtcaacttcataaccttcctgatctcgatcccgatccttggcggcggcatctggctggcgtcgcgggccaactccaccgactgcatccgcttcctgcagtggcccatcatcgtggtggggctcgtcctcatggtcgtctccctcatgggcttcgccggcgcctgctaccgccagacctggctgctccgcctctacctcttcgccatgttcttcgtcgtcctcgcgctcctcttcttcgtcgtcttcgccttcgccgtcaccgaccgcggcgccggccaggtcgtcatgagccgccgcttccccgagtaccagctctccgactacggcggatggctccgcgaccgcgtcgccgacccgcagtactgggccaccatcagcgcctgcctccgcgacggccacgcctgcgccggcatgaggcgcctcgcgcgggaccccaacacgggcatgctcgtgccggagacgcccgccatgttctacggccgcaacctctccccgattcagtctggatgctgcaagccaccgacgtcatgcgcattcacctacatgaacgagacgtactgggaacaaaaccccggtgtcccgaccgtgaccaatgaccctgactgcagcaggtggagcaacgaccagcagatgctgtgcttccagtgcgactcgtgcaaggccggcgtcctcgcgggcatcaagaagagctggcgcaaggtggccgtcctgaacatcgtggtgttgatcatccttgtgattgtctatgtcgcgggctgcgccgcgttccgcaacgccaagaggatcgacaacgacgagccggtgggcatggcgcggatgaccaagtcccatccaagcaggttccagttctag

SEQ ID NO: 3994 - protein, 294 aa, Zea mays
MLRGGTGMLGVVNFITFLISIPILGGGIWLASRANSTDCIRFLQWPIIVVGLVLMVVSLMGFAGACYRQTWLLRLYLFAMFFVVLALLFFVVFAFAVTDRGAGQVVMSRRFPEYQLSDYGGWLRDRVADPQYWATISACLRDGHACAGMRRLARDPNTGMLVPETPAMFYGRNLSPIQSGCCKPPTSCAFTYMNETYWEQNPGVPTVTNDPDCSRWSNDQQMLCFQCDSCKAGVLAGIKKSWRKVAVLNIVVLIILVIVYVAGCAAFRNAKRIDNDEPVGMARMTKSHPSRFQF

SEQ ID NO: 3995 - DNA, 801 bp, Zea mays
  CDS (1)..(801)
atgggcagcaccagcgcgttcgtcatcaggtggatcaacttcttcaccatgatactggcgctactggtggtgggcttcgggttctggatgagcacccacgacgacgagtgcaggcggaccttgaccgtccccgtcatcgccctcggtggagtgatcttcctcatatcgctcgtcggattccttggtgcctggaagaacatctcctgcttgctctggacatatctgatcatgctgttcgtggtcttggtggcaatcatggtgttcacggtgctcgcgtttatcataacaaactccggaagtggccatactgttcctggggctaggtataaagagtaccgtctccaggactacagctcctggtttgtcaaacagctcgatgacacggagaaatgggctcgcctgaaaagctgcctggtgaagacagatgactgcaatagcctgtcgagaagatacaagaccgcgagagaatacaagctcgcggacctcactcccatggagtcgggttgctgccgcccgccagcagagtgcgggttcccagctctgaacgcgtcctatttcgatctgagctatcacccggcgagcgccaacgccgactgcaaactgtacaggaacgcgcgctctgtccggtgctacgactgcagctcttgcaaagctggtgtcgcgcagtacatgaagacggagtggcgagtggtggctatcttcaacgtgatattgttcgtcatcctgtcgttcgtgtacttcgttggctgctgcgcgcggcgaaacgctggaggaggcgacgcgaaaggccgtggcaggtga

SEQ ID NO: 3996 - protein, 266 aa, Zea mays
MGSTSAFVIRWINFFTMILALLVVGFGFWMSTHDDECRRTLTVPVIALGGVIFLISLVGFLGAWKNISCLLWTYLIMLFVVLVAIMVFTVLAFIITNSGSGHTVPGARYKEYRLQDYSSWFVKQLDDTEKWARLKSCLVKTDDCNSLSRRYKTAREYKLADLTPMESGCCRPPAECGFPALNASYFDLSYHPASANADCKLYRNARSVRCYDCSSCKAGVAQYMKTEWRVVAIFNVILFVILSFVYFVGCCARRNAGGGDAKGRGR

SEQ ID NO: 3997 - DNA, 864 bp, Zea mays
  CDS (1)..(864)
atgtacccgtaccgcatgagcaacgtggcgatcggctacctgaacctggcgacgctgctggcctcgatcccggtcatcggcgcgggcctctggctggccaagggctcggcaacgcccacgtgctcctccatccttcaagcaccgctcctcgccgtcggcttcgccgtgctgctcgtgtccctcgcgggcttcgtcggcgcctgcttccacgtggcctgggcgctgtggctgtatctcgccgccgtgatgctcctcatcgccttcctcctcggcctcaccgtgttcgggttcgccgtcaccgcaggcggcggcggcgagcaggtgtacggtcggccgtaccgggagtaccgcgtcgccgactactccccgtggctgcagaggcacgtgcgggacgccaggtactggcgccccgcactcgcctgcgtcgtcgggtccagggcgtgccccaagatccacaactggactcccatggactacctccagcacgacctcacgccgatacagtccggctgctgcaagccgccgacggcgtgccagtacagcgggggcgtggccgtcggggcgcaggacgaggactgctaccgctggaacaacgccccgggcgtcctctgctaccagtgcgactcgtgcaaggccggcgtcatggagcaggtgcgccaggactggcacaagatcgccgtgctcaacgtcgtcgtgctcgtcgccctcgtctgcatctgctcctgcggctgctgcgccttcaggaacgcccgccgctccctctccgagtacccgtacggggtaaaccaaatgtccaagattgacccgcgctgggactactactggtggcgatggtggcgtggtagaagagaacagctctactag

SEQ ID NO: 3998 - protein, 287 aa, Zea mays
MYPYRMSNVAIGYLNLATLLASIPVIGAGLWLAKGSATPTCSSILQAPLLAVGFAVLLVSLAGFVGACFHVAWALWLYLAAVMLLIAFLLGLTVFGFAVTAGGGGEQVYGRPYREYRVADYSPWLQRHVRDARYWRPALACVVGSRACPKIHNWTPMDYLQHDLTPIQSGCCKPPTACQYSGGVAVGAQDEDCYRWNNAPGVLCYQCDSCKAGVMEQVRQDWHKIAVLNVVVLVALVCICSCGCCAFRNARRSLSEYPYGVNQMSKIDPRWDYYWWRWWRGRREQLY

SEQ ID NO: 3999 - DNA, 885 bp, Zea mays
  CDS (1)..(885)
atgctgcgcgggggctcgagcgtgctggggatcatcaacttcatcaccttcctgatctcgatcccgatcctgggcggcggcatctggctggcgtcgcgggccaactccaccgactgcatccgcttcctgcagtggcccatcatcattgtggggctcgtcctcatggtcatctccctcatgggcttcgccggcgcctgctaccgccagacctggctgctccgcctctacctcttcgccatgttcttcgtcgtcctcgcgcttctcttcttcatcgtcttcgccttcgccgtcaccgaccgcggcgacggccaggtcgtcatgaaccgccgcttccccgagtaccagctctccgactacggaggctggctccgcgaccgcgtcgccgacccacagtactgggccaccatcagcgcctgcctccgcgacggccacgcctgcgccggcatgaggcgcctcgcgcgggaccccaacactggcatgctcgtgccggagacgtccaccatgttctacggccgcaacctctccccgatccagtctggatgctgcaagccaccgacgtcatgtgcgttcagctacatgaatgagacgtactggacacaaaaccccagcgtcccgacggtgaccaacgacccagactgcaaaaggtggagcaacgaccagcagacgctgtgcttccagtgcgactcgtgcaaggctggcgtcctcgcgggcatcaagaagagctggcgcaaggtggccgtcctgaacatcgtggtgctgattatccttgtgatcgtttacgtcgcgggctgcgccgcgttccgcaacgcgaagaggatcgagaacggcgaggcggtcggcatggcgcggatgaccaagtcccatccgagcaggttccagttttag

SEQ ID NO: 4000 - protein, 294 aa, Zea mays
MLRGGSSVLGIINFITFLISIPILGGGIWLASRANSTDCIRFLQWPIIIVGLVLMVISLMGFAGACYRQTWLLRLYLFAMFFVVLALLFFIVFAFAVTDRGDGQVVMNRRFPEYQLSDYGGWLRDRVADPQYWATISACLRDGHACAGMRRLARDPNTGMLVPETSTMFYGRNLSPIQSGCCKPPTSCAFSYMNETYWTQNPSVPTVTNDPDCKRWSNDQQTLCFQCDSCKAGVLAGIKKSWRKVAVLNIVVLIILVIVYVAGCAAFRNAKRIENGEAVGMARMTKSHPSRFQF

SEQ ID NO: 4001 - DNA, 813 bp, Zea mays
  CDS (1)..(813)
atggcgaggctgagccacggcctcctgggcgccctgaacctggtgacgctcctgctgtccctgccggtgctgtgcgccggcgtgtacatcgtcacgcgcgccaccacggcgtgcgagcgcggcctccagatccccgtcgtcgcgttcggctgcggactgctcctgctctccctcgtcggcctcgccggcgcctgcggacgccgcggcgccgccaggccgttcctctgggtgtacgtggccttcatgtttctgctcgccgtcctcgtgttcgcgttcgccgtgttcgcgttcgtggtcacccaccggggcgcgggcggcgccgtgtccgggcgcgggtacagggagtaccgcctcggggactactccggctggctgcaggcgcggatcgccgagccggagacgtggcggcgcgtcgagagctgcctctctgaggcgcgcgtgtgcggcggccgggaattctacaggcaacacctctcgccaatccagtccggttgctgcaagccgccgacgtggtgcaggttccggtacgtgaacgccacgttctgggaggcaccgagatcggggctgtctgcggcggcggccagcgacggtgactgccgggcatggagcaacgaccagcaggtgctttgcttcgagtgcgacacgtgcaaggccggcgtgctggagaccgccaagaagaagtggaagacagtggctatcgtcaacgtttccctcctcgcgttcatcgttattgtctacacggtcgggtgcttcgccttgcgcagcaaaggtggtggtcggtacttcaatggcggtggtcctgaccaaacataa

SEQ ID NO: 4002 - protein, 270 aa, Zea mays
MARLSHGLLGALNLVTLLLSLPVLCAGVYIVTRATTACERGLQIPVVAFGCGLLLLSLVGLAGACGRRGAARPFLWVYVAFMFLLAVLVFAFAVFAFVVTHRGAGGAVSGRGYREYRLGDYSGWLQARIAEPETWRRVESCLSEARVCGGREFYRQHLSPIQSGCCKPPTWCRFRYVNATFWEAPRSGLSAAAASDGDCRAWSNDQQVLCFECDTCKAGVLETAKKKWKTVAIVNVSLLAFIVIVYTVGCFALRSKGGGRYFNGGGPDQT

SEQ ID NO: 4003 - DNA, 23 bp, Artificial sequence
  primer
atggcgttagcgaataacttaac

SEQ ID NO: 4004 - DNA, 25 bp, Artificial sequence
  primer
ttagacccaaccttgtttgtatttg

SEQ ID NO: 4005 - protein, 326 aa, Artificial sequence
  consensus sequence
  Variant (2)..(8): Xaa in position 2 to 8 is any amino acid
  Variant (10)..(14): Xaa in position 10 to 14 is any amino acid
  Variant (15)..(17): Xaa in position 15 to 17 is any or no amino acid
  Variant (19)..(22): Xaa in position 19 to 22 is any amino acid
  Variant (24)..(24): Xaa in position 24 is any amino acid
  Variant (26)..(32): Xaa in position 26 to 32 is any amino acid
  Variant (33)..(38): Xaa in position 33 to 38 is any or no amino acid
  Variant (40)..(44): Xaa in position 40 to 44 is any amino acid
  Variant (45)..(45): Xaa in position 45 is any or no amino acid
  Variant (47)..(50): Xaa in position 47 to 50 is any amino acid
  Variant (52)..(60): Xaa in position 52 to 60 is any amino acid
  Variant (62)..(63): Xaa in position 62 to 63 is any amino acid
  Variant (66)..(72): Xaa in position 66 to 72 is any amino acid
  Variant (73)..(75): Xaa in position 73 to 75 is any or no amino acid
  Variant (77)..(78): Xaa in position 77 to 78 is any amino acid
  Variant (81)..(82): Xaa in position 81 to 82 is any amino acid
  Variant (84)..(95): Xaa in position 84 to 95 is any amino acid
  Variant (97)..(99): Xaa in position 97 to 99 is any amino acid
  Variant (102)..(102): Xaa in position 102 is any amino acid
  Variant (103)..(106): Xaa in position 103 to 106 is any or no amino acid
  Variant (108)..(114): Xaa in position 108 to 114 is any amino acid
  Variant (115)..(115): Xaa in position 115 is any or no amino acid
  Variant (117)..(117): Xaa in position 117 is any amino acid
  Variant (120)..(120): Xaa in position 120 is any amino acid
  Variant (122)..(124): Xaa in position 122 to 124 is any amino acid
  Variant (126)..(126): Xaa in position 126 is any amino acid
  Variant (127)..(127): Xaa in position 127 is any or no amino acid
  Variant (130)..(137): Xaa in position 130 to 137 is any amino acid
  Variant (138)..(141): Xaa in position 138 to 141 is any or no amino acid
  Variant (143)..(147): Xaa in position 143 to 147 is any amino acid
  Variant (149)..(153): Xaa in position 149 to 153 is any amino acid
  Variant (154)..(156): Xaa in position 154 to 156 is any or no amino acid
  Variant (158)..(168): Xaa in position 158 to 168 is any amino acid
  Variant (169)..(196): Xaa in position 169 to 196 is any or no amino acid
  Variant (198)..(199): Xaa in position 198 to 199 is any amino acid
  Variant (201)..(225): Xaa in position 201 to 225 is any amino acid
  Variant (232)..(233): Xaa in position 232 to 233 is any amino acid
  Variant (235)..(245): Xaa in position 235 to 245 is any amino acid
  Variant (246)..(267): Xaa in position 246 to 267 is any or no amino acid
  Variant (270)..(271): Xaa in position 270 to 271 is any amino acid
  Variant (273)..(273): Xaa in position 273 is any amino acid
  Variant (274)..(274): Xaa in position 274 is any or no amino acid
  Variant (276)..(277): Xaa in position 276 to 277 is any amino acid
  Variant (278)..(279): Xaa in position 278 to 279 is any or no amino acid
  Variant (282)..(283): Xaa in position 282 to 283 is any amino acid
  Variant (285)..(286): Xaa in position 285 to 286 is any amino acid
  Variant (291)..(291): Xaa in position 291 is any amino acid
  Variant (293)..(298): Xaa in position 293 to 298 is any amino acid
  Variant (300)..(308): Xaa in position 300 to 308 is any amino acid
  Variant (309)..(312): Xaa in position 309 to 312 is any or no amino acid
  Variant (314)..(315): Xaa in position 314 to 315 is any amino acid
  Variant (316)..(316): Xaa in position 316 is any or no amino acid
  Variant (318)..(319): Xaa in position 318 to 319 is any amino acid
  Variant (320)..(320): Xaa in position 320 is any or no amino acid
  Variant (322)..(322): Xaa in position 322 is any amino acid
  Variant (324)..(325): Xaa in position 324 to 325 is any amino acid
SXXXXXXXNXXXXXXXXPXXXXGXWXXXXXXXXXXXXXCXXXXXXPXXXXGXXXXXXXXXGXXGAXXXXXXXXXXLXXYLXXMXXXXXXXXXXXXFXXXVTXXXXXGXXXXXXXXYXEYXLXXXSXXWLXXXXXXXXXXXXWXXXXXCXXXXXXXXCXXXXXXXXXXXXXXXXXXXXXXXXXXXXXXXXXXXXXXXPXXSXXXXXXXXXXXXXXXXXXXXXXXXXGCCKPPXXCXXXXXXXXXXXXXXXXXXXXXXXXXXXXXXXXXDCXXWXXNXXXXLCXXCXXCKAGXLXXXXXXWXXXXXXXXXXXXXLXXXYXXXCXAXXN

SEQ ID NO: 4006 - protein, 20 aa, Artificial sequence
  protein pattern
  Variant (3)..(3): Xaa in position 3 is Phe or Tyr
  Variant (4)..(4): Xaa in position 4 is any amino acid
  Variant (6)..(6): Xaa in position 6 is any amino acid
  Variant (7)..(7): Xaa in position 7 is Ala, Ser or Thr
  Variant (10)..(10): Xaa in position 10 is Ala or Gly
  Variant (11)..(11): Xaa in position 11 is Gly or Ser
  Variant (12)..(19): Xaa in position 12 to 19 is any amino acid
LCXXCXXCKXXXXXXXXXXW

SEQ ID NO: 4007 - protein, 15 aa, Artificial sequence
  protein pattern
  Variant (2)..(2): Xaa in position 2 is Ile, Leu, Met or Val
  Variant (3)..(3): Xaa in position 3 is Glu or Gln
  Variant (4)..(4): Xaa in position 4 is Ala or Ser
  Variant (8)..(8): Xaa in position 8 is Lys or Arg
  Variant (10)..(12): Xaa in position 10 to 12 is any amino acid
  Variant (14)..(14): Xaa in position 14 is any amino acid
  Variant (15)..(15): Xaa in position 15 is Phe or Tyr
PXXXGCCXPXXXCXX

SEQ ID NO: 4008 - protein, 20 aa, Artificial sequence
  protein pattern
  Variant (2)..(2): Xaa in position 2 is Ile, Leu or Val
  Variant (3)..(4): Xaa in position 3 to 4 is Ala, Ile, Leu or Val
  Variant (5)..(5): Xaa in position 5 is Phe, Ile, Leu or Val
  Variant (7)..(9): Xaa in position 7 to 9 is any amino acid
  Variant (10)..(10): Xaa in position 10 is Phe, Leu or Met
  Variant (11)..(12): Xaa in position 11 to 12 is any amino acid
  Variant (13)..(13): Xaa in position 13 is Ala, Gly or Ser
  Variant (14)..(15): Xaa in position 14 to 15 is any amino acid
  Variant (17)..(17): Xaa in position 17 is Phe, Ile, Leu or Met
  Variant (18)..(18): Xaa in position 18 is any amino acid
  Variant (20)..(20): Xaa in position 20 is Ala, Gly or Ser
PXXXXGXXXXXXXXXGXXGX

SEQ ID NO: 4009 - DNA, 1860 bp, Arabidopsis thaliana
  CDS (1)..(1860)
atgtttccaagggtttctatgaggcgtcgctctgctgaagtttctcctacagagccaatggagaagggaaatggaaaaaatcagactaatcgaatctgtttgttggttgctttgtcactctttttctgggcattgttgttgtacttccattttgttgtcttagggactagtaacattgataaacagctccaattgcaacctagttatgctcaatctcagccatcatcagtctctcttcgtgttgataaattccctatagagcctcatgcagctccatcgaaaccacctcccaaagagcctttagttactatcgataagccaatactccctcctgcaccagtagccaattctagttccacctttaagccacctagaattgttgagagcgggaagaaacaggagttttcgtttataagagccttgaagacagtagacaacaagagtgacccttgtggagggaagtacatttatgttcacaatctaccctcaaagttcaatgaggatatgcttagagactgtaagaagcttagtctctggactaacatgtgtaagttcacaaccaatgctggccttgggccgccgcttgagaatgttgaaggtgtcttctctgatgaaggttggtatgcgactaatcagtttgctgttgatgtgatattcagcaaccggatgaagcagtacaaatgtttgacaaatgattcttcccttgctgctgccatctttgtgccgttctatgctggattcgacattgctaggtatctgtggggatacaatatctcgagaagggatgctgcttcgcttgagttggtcgattggctcatgaagcggcctgagtgggatataatgaggggaaaagatcatttccttgtggcgggtaggataacgtgggattttaggagattgtctgaagaagaaactgattggggcaacaagcttctcttcttaccggctgccaagaacatgtctatgcttgtggttgagtcgagcccatggaatgctaatgattttgggatcccgtacccaacctacttccacccagcaaaggactcagaggtttttgaatggcaagaccggatgagaaacctggaaaggaagtggcttttctcgtttgcaggagccccacgacctgacaatccgaaatctatcagagggcagatcattgatcagtgtcgaaactcaaatgttggcaaattattagaatgcgattttggggagagcaaatgccatgcaccaagcagcattatgcaaatgtttcaaagctctctcttctgcctgcagccacagggagactcttacacccgaagatcggcatttgactcaatgcttgccggttgtataccggtcttcttccatccgggttcagcctacacgcaatacacgtggcatctacccaagaactacacaacctactcggtattcatccccgaggatgatgttcggaagagaaacataagcatcgaggagcgactcctccagattccagccaagcaggtcaagataatgagagagaatgtcatcaacctcatcccaaggctgatctacgcagacccgagatcagaactggagacgcagaaagatgcatttgatgtctcggtacaggctgtgatagacaaggtgactcggttaaggaagaacatgatcgagggccgaaccgagtatgactacttcgtggaggagaacagctggaagtatgcgttgctggaggaaggccaacgggaagcagggggccatgtgtgggacccgttcttctccaaaccaaagcccggagaagatggcagcagcgatggtaatggaggcacgactatttcagcagatgcagctaagaattcatggaagagtgagcagagagataagacacagtga

SEQ ID NO: 4010 - protein, 619 aa, Arabidopsis thaliana
MFPRVSMRRRSAEVSPTEPMEKGNGKNQTNRICLLVALSLFFWALLLYFHFVVLGTSNIDKQLQLQPSYAQSQPSSVSLRVDKFPIEPHAAPSKPPPKEPLVTIDKPILPPAPVANSSSTFKPPRIVESGKKQEFSFIRALKTVDNKSDPCGGKYIYVHNLPSKFNEDMLRDCKKLSLWTNMCKFTTNAGLGPPLENVEGVFSDEGWYATNQFAVDVIFSNRMKQYKCLTNDSSLAAAIFVPFYAGFDIARYLWGYNISRRDAASLELVDWLMKRPEWDIMRGKDHFLVAGRITWDFRRLSEEETDWGNKLLFLPAAKNMSMLVVESSPWNANDFGIPYPTYFHPAKDSEVFEWQDRMRNLERKWLFSFAGAPRPDNPKSIRGQIIDQCRNSNVGKLLECDFGESKCHAPSSIMQMFQSSLFCLQPQGDSYTRRSAFDSMLAGCIPVFFHPGSAYTQYTWHLPKNYTTYSVFIPEDDVRKRNISIEERLLQIPAKQVKIMRENVINLIPRLIYADPRSELETQKDAFDVSVQAVIDKVTRLRKNMIEGRTEYDYFVEENSWKYALLEEGQREAGGHVWDPFFSKPKPGEDGSSDGNGGTTISADAAKNSWKSEQRDKTQ

SEQ ID NO: 4011 - DNA, 2562 bp, Oryza sativa
  CDS (343)..(2157)
gagtttcctcctcattattcctcctcttcccccctcgccgcttacaacatccatccccaaacccgcattcaaaacaagcaaccctcctcccgaatcgaacaaggaaacagatatcgcctctaaaacccccatcgtctcgtctcgtctcgttcccctctccatcttccgcggctttccgcgcgatccaccgatccggtttccccgcgccgtgcccggagtcggcgctccattcccgcgccgggttttggggtggtgtgttgatgcggcgggattcgagccctggcctgtgagttgggcgtcggctcggcggctgcggggtcggcgcgggcgcggacgcggcggatgtctgctatgaggcggcggccggtgctgccgactcaccaggacgacatggagaaggtgggcgggaagccgccgcagtcgcgcctctgcttcctcgccacgctctgcgccatgttctgggtcctcatcttctacttccacttcttcgtcatcgccaacgagcctggctccgcgggggcggacaccgccgccggcgccgcggcgagcattgcccgcgcagaacttccgctccccgaacccgagcgcgtctccgatcccgcggttcccctccctccgcctgccctcgtctcggagccgccacctaccaccgctactgtcgccaaagtggaagatgaggagaagcccacggccgtcgcccaccaggaggcggcgcccagggattacgcgttccagcgagcgctcaagaccgcggagaacaagagcgacccgtgcggcggccggtacatctacgtgcacgagctgccgccgcggttcaacgacgacatgctccgggagtgcgagaggctcagcctctggaccaatatgtgcaagttcatgagcaacgaagggcttggtccgccgttgggcaacgaggaaggggtgttctccaacaccggctggtacgcgacgaaccagtttatggtggatgtcatcttcaggaaccggatgaagcagtacgagtgcctgaccaaggactcgtccatcgctgccgcggtgtttgtgccgttctacgccgggtttgatgtggcgaggtatctttgggggcacaacatttcgacgagggatgccgcgtcgctggatttgatagattggctgaggaagaggcctgaatggaatgtgatgggcgggcgtgaccatttcttagttggcggcaggattgcgtgggatttcaggcgcttgacggacgaagagtcggattggggcaacaagctgcttttcatgccggctgcgaagaatatgtcgatgttggtggtggagtcaagcccatggaatgccaatgattttgcgataccatatcctacttacttccaccctgccaaggatgctgatgttttgctttggcaggatagaatgaggagcctggaacgaccatggttgttctcgtttgctggggctcctcgtcctgatgatcccaagtctatcagaagtcagcttattgatcaatgcaggacatcaagtgtctgtaaattgctggagtgtgatcttggggagagcaagtgccattcccctagcgcaatcatgaatatgttccagaactctttgttctgcttgcagccccaaggtgattcgtatacgagaagatctgccttcgactcgatgctggctggttgcattcctgttttctttcatcctggttcagcgtatgtccaatatacgtggcatcttccgaagaactatacacggtactctgtcttcatccctgaagatggcgtccgtaagggaaatgtcagcattgaggacaggcttaaaagtatccatccagatatggtcaggaagatgagggaagaggtcattagtctcatcccaagggtgatatatgctgatccaaggtcaaagctggagaccctgaaggatgcattcgatgtttctgtagaggcaataattaacaaggtgacacagttgagaagagatatcatcgaagatcatgaagataaagattttgttgaagagaatagctggaagtatgatctgttggaagaagggcagaggacaattgggcctcatgaatgggacccgttcttctctaagcccaaggacaagggtggagattctactaatccatctactaatgctgccaagaactcctggaaaaacgaacaaagaggtcagaactaaaatacaggtagttagatatgtgatcgaggaaaggaactagatatcctctctagagaagctccttgcaaataccttgcccatatgtcaaagatcctccaacgcagtagctctgatgatcatgtatgttcttgatgatctagcccctacaggtgtaagtggtggtagaaaagatgcttggggaaaaaaatgcacggccttcgagttgcccttataaataccatttcacactctatttttgttttgctttgctcaataatcctttgtaagtccttacgggatttataggtatatcaattttgctgttgtttctgttttgtttgctttgatctgtatgtgtatggtttagaatttgtgtatactacctttttatactcacaattagtaagcaatcaaagagatttttgt

SEQ ID NO: 4012 - protein, 604 aa, Oryza sativa
MSAMRRRPVLPTHQDDMEKVGGKPPQSRLCFLATLCAMFWVLIFYFHFFVIANEPGSAGADTAAGAAASIARAELPLPEPERVSDPAVPLPPPALVSEPPPTTATVAKVEDEEKPTAVAHQEAAPRDYAFQRALKTAENKSDPCGGRYIYVHELPPRFNDDMLRECERLSLWTNMCKFMSNEGLGPPLGNEEGVFSNTGWYATNQFMVDVIFRNRMKQYECLTKDSSIAAAVFVPFYAGFDVARYLWGHNISTRDAASLDLIDWLRKRPEWNVMGGRDHFLVGGRIAWDFRRLTDEESDWGNKLLFMPAAKNMSMLVVESSPWNANDFAIPYPTYFHPAKDADVLLWQDRMRSLERPWLFSFAGAPRPDDPKSIRSQLIDQCRTSSVCKLLECDLGESKCHSPSAIMNMFQNSLFCLQPQGDSYTRRSAFDSMLAGCIPVFFHPGSAYVQYTWHLPKNYTRYSVFIPEDGVRKGNVSIEDRLKSIHPDMVRKMREEVISLIPRVIYADPRSKLETLKDAFDVSVEAIINKVTQLRRDIIEDHEDKDFVEENSWKYDLLEEGQRTIGPHEWDPFFSKPKDKGGDSTNPSTNAAKNSWKNEQRGQN

SEQ ID NO: 4013 - DNA, 1779 bp, Glycine max
  CDS (1)..(1779)
atgagaaagcgccctgaccaaatggaaaaaggggcagcagcaaagaaccagaattcccgcctttgctgtttagcatccctttctgctttcttctggtttttgctcctttacttccattttgtggtactttcaggagatgataccaatgccaatagcagtagaaagaatagttataataatcatgttgatctagatcactcaaccctatcaacaacacctgtttctgttggttatgaacctcccccaatccatcaagtgcaagcctctcctagaaagattggcttacctgatcccgatgtgcggcggagtgatgctgacactgacacccctcgcgccgagaagattttcccttttatgagagcaatgagagcttctgaaaacaagagtgatccctgtggggggaggtacatttatgtgcatgaccttccctccaggtttaatgaggatatgttgaaggagtgcaaaagtttgagtctttggactaatatgtgtaagttcaccaccaatgctggccttggtccgccccttgagaatgctgaaggggtgttctctaatactggctggtatgctactaatcagtttgctgttgatgtgatatttggcaaccggatgaagcagtatgagtgcttgacaaatgattcctccattgctgctgcggtttttgtgcccttttatgctggatttgacatagcacgttatctttggggttataatatttcaatgagggatgctgcttctcttgatctggttcactggctcatgaagaggccagagtggagcacaatgaatggaagagaccattttcttgttgcgggaaggataacatgggatttcaggagactatctgaggaagaatcggattggggcaataagcttctgtttttaccagcagcaaagaatatgtcaatgcttgtggttgagtccagcccttggaatgcaaatgattttggaattccgtatcctacatacttccaccctgcaaaggatgctgatgtgttcatgtggcaagatagaatgaggcaactagataggaagtggcttttctcctttgctggtgctccccgtcctggcaaccccaaatcaatcaggggtcagttaattgatcaatgcagaaggtcaaatgtttgtaagctgttggaatgcgactttggcgaaagcaaatgtcattctcccagcagcataatgcagatgtttcaaagctcacttttctgcttgcaaccccagggtgattcgtacacgcgaagatctgcttttgattcaatgttggctggttgtatacctgttttcttccatcctggctcagcatatacacaatatacttggcatcttcccaagaattacactaagtattctgtcttcattccagaggatgatatccgcaagaggaatatcagtatagaggaaaggcttagtcagatacctcctgagcaggtgaagatcatgagagaagaggtcattagtctcattccaagactagtatatgctgatcctcgctccaaattagaaactcttaaagatgcatttgatgttgcggtgcaagcagtaattgacaaggttacaaatttgaggaaggatattattgaaggtcgcacagatgacaacttcattgaggagaacagttggaaatatgctttgttgcctgagggagagcatgaggtaggacctcatgaatgggatcctttcttctccaaaccaaaggatggtagtggagattccaatgattcatctgctgaagttgcaaaaaattcttggaagaatgagcgaagaaatcaatcatga

SEQ ID NO: 4014 - protein, 592 aa, Glycine max
MRKRPDQMEKGAAAKNQNSRLCCLASLSAFFWFLLLYFHFVVLSGDDTNANSSRKNSYNNHVDLDHSTLSTTPVSVGYEPPPIHQVQASPRKIGLPDPDVRRSDADTDTPRAEKIFPFMRAMRASENKSDPCGGRYIYVHDLPSRFNEDMLKECKSLSLWTNMCKFTTNAGLGPPLENAEGVFSNTGWYATNQFAVDVIFGNRMKQYECLTNDSSIAAAVFVPFYAGFDIARYLWGYNISMRDAASLDLVHWLMKRPEWSTMNGRDHFLVAGRITWDFRRLSEEESDWGNKLLFLPAAKNMSMLVVESSPWNANDFGIPYPTYFHPAKDADVFMWQDRMRQLDRKWLFSFAGAPRPGNPKSIRGQLIDQCRRSNVCKLLECDFGESKCHSPSSIMQMFQSSLFCLQPQGDSYTRRSAFDSMLAGCIPVFFHPGSAYTQYTWHLPKNYTKYSVFIPEDDIRKRNISIEERLSQIPPEQVKIMREEVISLIPRLVYADPRSKLETLKDAFDVAVQAVIDKVTNLRKDIIEGRTDDNFIEENSWKYALLPEGEHEVGPHEWDPFFSKPKDGSGDSNDSSAEVAKNSWKNERRNQS

SEQ ID NO: 4015 - DNA, 1749 bp, Glycine max
  CDS (1)..(1749)
atgaggaagcgccccgaccaaatggaaaaaggggcagcagcaaagaaccagaattcccgcatttgctttttggcatccctttctgccttcttctggtttttgctcctttacttccattttgtggtccttgcaggagataatagcaatagaaagattagttataataatcaagttgatcttgatcactcaaccctatcaacaacacctgtttctgttagttatgaacctcccccaacccatcaagtgcaagcccctcctagaaagattggcttccctgacaccgacactgacaccctacacgccaccaagaagagtttccctttcatgagagcaatgagagcttctgagaacaagagtgatccctgtggggggaggtacatttatgtgcatgaccttccctccaggtttaatgaggatatgttgaaggagtgccggagtttgagtctttggactaatatgtgtaagttcacaaccaatgccggtcttggtccaccccttgagaatgctgaaggggtgttctcgaatactggctggtatgctaccaatcagtttgcggttgatgtgatatttggcaaccggatgaagcagtatgagtgcttgacaaatgattcctccattgctgctgcggttttcgtgcccttttatgctggatttgacatagcgcgttacctttggggttataatatttcaacgagggatgcagcttcacttgctctggttgactggctcatgaagaggccggagtggagcacaatgaatggaagagaccattttcttgttgcaggaaggataacctgggatttcaggagactgtctgaggaagaatcagattggggcaataagcttttgtttttaccagcggcgaagaatatgtccatgcttgtggttgaatccagcccttggaatgcaaatgattttggaattccatatcctacatacttccaccctgcaaaggatgctgatgtgttcatgtggcaagatcgaatgaggcaactagagaggaagtggcttttctcctttgccggtgctccccgtcctggcaaccccaaatcaatcaggggtcagttaattgatcaatgcagacggtcaaatgtttgtaaactgttggaatgtgactttggcgaaagcaaatgtcattctcccagcagcataatgcagatgtttcaaagctcgcttttctgcttgcaaccccagggtgattcatacacgcgaagatctgcttttgattcaatgctggctggttgtatacctgtcttcttccatccaggctcagcatatacacagtatacttggcatcttcccaagaatttcacaaagtattctgtcttcattcccgaggatgatattcgtaagaggaatatcagtatagaggaaaggcttagtcagataccccctgagcaagtgaagatcatgagagaagaggtcattagtctcattccaagactagtgtatgctgatcctcgctccaaattagaaactcttaaagatgcatttgatgttgcggtgcaagcagtaattgacaaggttacaaatttgaggaaggatattattgaaggccgtacagatgacaacttcattgaggagaacagttggaaatatgctttgctgcctgagggagagcacgaggtaggacctcatgaatgggatcctttcttctccaaaccaaaggatggtaatggagattccaatgattcatctgctgaagttgcaaaaaactcttggaagaatgagcgaagaaatcaatcatga

SEQ ID NO: 4016 - protein, 582 aa, Glycine max
MRKRPDQMEKGAAAKNQNSRICFLASLSAFFWFLLLYFHFVVLAGDNSNRKISYNNQVDLDHSTLSTTPVSVSYEPPPTHQVQAPPRKIGFPDTDTDTLHATKKSFPFMRAMRASENKSDPCGGRYIYVHDLPSRFNEDMLKECRSLSLWTNMCKFTTNAGLGPPLENAEGVFSNTGWYATNQFAVDVIFGNRMKQYECLTNDSSIAAAVFVPFYAGFDIARYLWGYNISTRDAASLALVDWLMKRPEWSTMNGRDHFLVAGRITWDFRRLSEEESDWGNKLLFLPAAKNMSMLVVESSPWNANDFGIPYPTYFHPAKDADVFMWQDRMRQLERKWLFSFAGAPRPGNPKSIRGQLIDQCRRSNVCKLLECDFGESKCHSPSSIMQMFQSSLFCLQPQGDSYTRRSAFDSMLAGCIPVFFHPGSAYTQYTWHLPKNFTKYSVFIPEDDIRKRNISIEERLSQIPPEQVKIMREEVISLIPRLVYADPRSKLETLKDAFDVAVQAVIDKVTNLRKDIIEGRTDDNFIEENSWKYALLPEGEHEVGPHEWDPFFSKPKDGNGDSNDSSAEVAKNSWKNERRNQS

SEQ ID NO: 4017 - DNA, 1686 bp, Glycine max
  CDS (1)..(1686)
atgagacggcgccccgtggcgggtgttctccccgaccaaatggagaaagcaaacaccaaaaaccctaattccagactttgctttctcgcttccctctccgtattcttctggttcctcctcctctacttccacttcgccgtcctccgccaccaacccaccaaccctaaccccgtagtccccatcactctccaacctcaacaacctcgtaaaaacctcggcttccccgagaaaatttcccaaccggagaaacccactttccccttcgaccgtgccctccgaaccgccgacaacaagagcgacccatgcggggggcgctacatctacgtccacgacctcccctcgcgcttcaacgaggacatgttaaagcattgcagaagcttatctctttggaccaacatgtgcaagttcaccaccaatgccggcctcggtccgccgttggagaacgttaacggtgtgttctccgacaccggctggtatgccaccaaccagttcaccgtcgacgtcatcttcagcaacaggatgaagcagtaccaatgcctcactcgagatccttccgtcgccgccgcattcttcgtccccttctacgccggctttgacatcgcccgctatctatggggttacaacatctcaatgcgcgatgctgcatcgcttgacctcgtgaattggctcatgaatagaccggagtggaagatcatgaatgggagagaccattttcttgtcgccggtaggatcacatgggattttcgaagactcactgaagaagaatcggattgggggaacaagcttttgtttttgcccgctgcgaagaacatgtcgatgcttgtggtggagtcaagtccttggaatgccaatgatttcgggattccgtatccgacttattttcatcctgccaaggatgatgatgtgttcacctggcaggagaggatgaggaggctggagaggaagtggttgttttcgtttgccggagctccgcggccggataacccgaaatcgataaggggccagattattgagcagtgtaggagatccaaagttgggaagctgttggagtgtgattttggggagagtaagtgtcattcccctagtagtataatgcagatgtttcaagggtcgcttttctgtcttcagcctcaaggggattcgtataccagaagatctgcttttgattcaatgctggctgggtgtataccagtgttcttccatccgggttcggcgtacacccagtatacatggcatcttcctaagaattataccaagtactcggtgttcattccggaggatgatcttaggaagaggaatgttagtatagaagagaggcttagtcagattcctgaggaggaagttaggatcatgagggaggaggtcattggtttgatccctagattggtgtacgcagatcctcgatccaaacttgagactcttgaggatgcatttgatgtttcggtgcaggctgtgattgacaaggttaccaacttgaggaaggacattatggaaggtcgcacggacgagaacttcattgaggagaacagttggaagtacgcgttgttggatgagggacagcgcgaggttggacctcatgaatgggatcctttcttctccaaaccaaagccgggtggggattccgatgatttgtcagctgaggctgcgaagaattcttggaaaaatgaacaaagaaatcagtcgtga

SEQ ID NO: 4018 - protein, 561 aa, Glycine max
MRRRPVAGVLPDQMEKANTKNPNSRLCFLASLSVFFWFLLLYFHFAVLRHQPTNPNPVVPITLQPQQPRKNLGFPEKISQPEKPTFPFDRALRTADNKSDPCGGRYIYVHDLPSRFNEDMLKHCRSLSLWTNMCKFTTNAGLGPPLENVNGVFSDTGWYATNQFTVDVIFSNRMKQYQCLTRDPSVAAAFFVPFYAGFDIARYLWGYNISMRDAASLDLVNWLMNRPEWKIMNGRDHFLVAGRITWDFRRLTEEESDWGNKLLFLPAAKNMSMLVVESSPWNANDFGIPYPTYFHPAKDDDVFTWQERMRRLERKWLFSFAGAPRPDNPKSIRGQIIEQCRRSKVGKLLECDFGESKCHSPSSIMQMFQGSLFCLQPQGDSYTRRSAFDSMLAGCIPVFFHPGSAYTQYTWHLPKNYTKYSVFIPEDDLRKRNVSIEERLSQIPEEEVRIMREEVIGLIPRLVYADPRSKLETLEDAFDVSVQAVIDKVTNLRKDIMEGRTDENFIEENSWKYALLDEGQREVGPHEWDPFFSKPKPGGDSDDLSAEAAKNSWKNEQRNQS

SEQ ID NO: 4019 - DNA, 1767 bp, Oryza sativa subsp. indica
  CDS (1)..(1767)
atggagaaggtgggcgggaagccgccgcagtcgcgcctctgcttcctcgccacgctctgcgccatgttctgggtcctcatcttctacttccatttcttcgtcatcgccaacgagcctggctccgcgggggcggacaccgccgccggcgccgcggcgagcattgcccgcgcagaacttccgctccccgaacccgagcgcgtctccgatcccgcggttcccctccctccgcctgccctcgtctcggagccgccacctaccaccgctactgtcgccaaagtggaagatgaggagaagcccacggccgtcgcccaccaggaggcggcgcccagggattacgcgttccagcgagcgctcaagaccgcggagaacaagagcgacccgtgcggcggccggtacatctacgtgcacgagctgccgccgcggttcaacgacgacatgctccgggagtgcgagaggctcagcctctggaccaatatgtgcaagttcatgagcaacgaagggcttggtccgccgttgggcaacgaggaaggggtgttctccaacaccggctggtacgcgacgaaccagtttatggtggatgtcatcttcaggaaccggatgaagcagtacgagtgcctgaccaaggactcatccatcgctgccgcggtgtttgtgccgttctacgccgggtttgatgtggcgaggtatctttgggggcacaacatttcgacgagggatgccgcgtcgctggatttgatagattggctgaggaagaggcctgaatggaatgtgatgggcgggcgtgaccatttcttagttggcggcaggattgcgtgggatttcaggcgcttgacggacgaagagtcggattggggcaacaagctgcttttcatgccggctgcgaagaatatgtcgatgttggtggtggagtcaagcccatggaatgccaatgattttgcgataccatatcctacttacttccaccctgccaaggatgctgatgttttgctttggcaggatagaatgaggagcctggaacgaccatggttgttctcgtttgctggggctcctcgtcctgatgatcccaagtccatcagaagtcagcttattgatcaatgcaggacatcaagtgtctgtaaattgctggagtgtgatcttggggagagcaagtgccattcccctagcgcaatcatgaatatgttccagaactctttgttctgcttgcagccccaaggtgattcgtatacgagaagatctgccttcgactcgatgctggctggttgcattcctgttttctttcatcctggttcagcgtatgtccaatatacgtggcatcttccgaagaactatacacggtactctgtcttcatccctgaagatggcgtccgtaagggaaatgtcagcattgaggacaggcttaaaagtatccatcgagatatggtcaagaagatgagggaagaggtcattagtctcatcccaagggtgatatatgctgatccaaggtcaaagctggagaccctgaaggatgcattcgatgtttctgtagaggcaataattaacaaggtgacacagttgagaagagatatcatcgaagatcatgaagataaagattttgttgaagagaatagctggaagtatgatctgttggaagaagggcagaggacaattggacctcatgaatgggacccgttcttctctaagcccaaggacaagggtggagattctactaatccatctactaatgctgccaagaactcctggaaaaacgaacaaagaggtcagaactaa

SEQ ID NO: 4020 - protein, 588 aa, Oryza sativa subsp. indica
MEKVGGKPPQSRLCFLATLCAMFWVLIFYFHFFVIANEPGSAGADTAAGAAASIARAELPLPEPERVSDPAVPLPPPALVSEPPPTTATVAKVEDEEKPTAVAHQEAAPRDYAFQRALKTAENKSDPCGGRYIYVHELPPRFNDDMLRECERLSLWTNMCKFMSNEGLGPPLGNEEGVFSNTGWYATNQFMVDVIFRNRMKQYECLTKDSSIAAAVFVPFYAGFDVARYLWGHNISTRDAASLDLIDWLRKRPEWNVMGGRDHFLVGGRIAWDFRRLTDEESDWGNKLLFMPAAKNMSMLVVESSPWNANDFAIPYPTYFHPAKDADVLLWQDRMRSLERPWLFSFAGAPRPDDPKSIRSQLIDQCRTSSVCKLLECDLGESKCHSPSAIMNMFQNSLFCLQPQGDSYTRRSAFDSMLAGCIPVFFHPGSAYVQYTWHLPKNYTRYSVFIPEDGVRKGNVSIEDRLKSIHRDMVKKMREEVISLIPRVIYADPRSKLETLKDAFDVSVEAIINKVTQLRRDIIEDHEDKDFVEENSWKYDLLEEGQRTIGPHEWDPFFSKPKDKGGDSTNPSTNAAKNSWKNEQRGQN

SEQ ID NO: 4021 - DNA, 1788 bp, Oryza sativa subsp. indica
  CDS (1)..(1788)
atgggtggggctaagcaggggcgcggcggcggcggcggctgctgctcccgcctctggttcatggtcgtgctctccgtcaccgtgacgctgctggtgcgccactgctacgactccggcgtgatcggccacggcgccgccgccggcggcgtggtgcgcatcgagccggtgcaccgtggtttttaccacactcggaaggcgagcccggtggatcgcggcggtggcacgtcgttctctggccattcgtcgtcgccgcccgacgccggcggcagcgcgaagccggagtctccgcacgacagcggcgtcaaggcgccgtcggagctgaccaccgtcgagcacaccaagcagccgtccgagccagcttctaccggcacggagtcggatgatggaggcaagccatcgtcggcgtcgtcatcctcgctgccggcggcggcgcacccgttcgcgcgcgcgctcgcggcggcgggcgacaagggcgaccggtgcggcgggcggtacgtgtacgtgcaggagctgccaccgcggttcaacaccgacatggtaaagaactgcgcgacgctgttcccgtggacggacatgtgcgcgttcacggcgaacggcggcttcggcccgcagatgagcggcggcgacggcggcgtgttccaggagaccgggtggtacaactccgaccagtacacggtggacatcatcttccacgaccggatcaggcggtacgagtgcctcaccgacgacccctccctcgccgccgccgtgtacgtgccgttcttcgccggcctcgaggtggcgcgccacctctgggggttcaacgtcaccacccgggacgccatggcgctggaggtggtggacatcatcacgtcgaggcccgagtggcgcgccatgggaggccgcgaccacttcttcaccgccggccgcaccacgtgggacttccggaggctgaacgacggcgacgccggctggggcagcaagctgttcagccttccggcgatcaagaacatgacggcgctcgtggtggaggcgagcccgtggcacctcaacgacgccgccatcccgttcccgacggcgttccacccggcgagcgacgaggccgtgttcgtctggcaggacaaggtccgccgcctcgagcgcccatggctcttctccttcgccggcgcggcgcgcccgggcagcgccaagtccatccgttccgagctcatcgcgcagtgcagggcgtcgagcgtgtgctccctgatggagtgcgccgacgggccgagcaacaagtgcggctcgccggcgagctacatgaggctgttccagagctccaccttctgcctccagccgcagggcgactcgtacacgcgcaagtcggcgttcgacgccatgctcgccggctgcatcccggtgttcttccaccccggcacggcgtacgtccagtacacctggcacctgcccaggaaccacgccgactactccgtctacatctccgaggacgacgtgcgccgtaacgccagcatcgaggagcggctgcggcggatcgcgccggccgccgtggagcggatgagggagacggtcatctcgctcatcccgacggtggtgtacgcgcagccgtcgtcgaggctggacacgatgaaggacgcgttcgacgtggcggtggacgccatcgtcgacaaggtgacgaggctgcggcgcgacatcgtcgacggccgcggcgaggaggagaagctggagatgtacagttggaagtatccattgctgcgagaagggcagaaggtcgaggacccccatgagtgggatccattgttcgcgttcggttag

SEQ ID NO: 4022 - protein, 595 aa, Oryza sativa subsp. indica
MGGAKQGRGGGGGCCSRLWFMVVLSVTVTLLVRHCYDSGVIGHGAAAGGVVRIEPVHRGFYHTRKASPVDRGGGTSFSGHSSSPPDAGGSAKPESPHDSGVKAPSELTTVEHTKQPSEPASTGTESDDGGKPSSASSSSLPAAAHPFARALAAAGDKGDRCGGRYVYVQELPPRFNTDMVKNCATLFPWTDMCAFTANGGFGPQMSGGDGGVFQETGWYNSDQYTVDIIFHDRIRRYECLTDDPSLAAAVYVPFFAGLEVARHLWGFNVTTRDAMALEVVDIITSRPEWRAMGGRDHFFTAGRTTWDFRRLNDGDAGWGSKLFSLPAIKNMTALVVEASPWHLNDAAIPFPTAFHPASDEAVFVWQDKVRRLERPWLFSFAGAARPGSAKSIRSELIAQCRASSVCSLMECADGPSNKCGSPASYMRLFQSSTFCLQPQGDSYTRKSAFDAMLAGCIPVFFHPGTAYVQYTWHLPRNHADYSVYISEDDVRRNASIEERLRRIAPAAVERMRETVISLIPTVVYAQPSSRLDTMKDAFDVAVDAIVDKVTRLRRDIVDGRGEEEKLEMYSWKYPLLREGQKVEDPHEWDPLFAFG

SEQ ID NO: 4023 - DNA, 1797 bp, Oryza sativa subsp. indica
  CDS (1)..(1797)
atgggtggggctaagcaggggcgcggcggcggcggcggctgctgctcccgcctctggttcatggtcgttctctccgccaccgtgacgctgctggtgcgccactgctacgactccggcgtgatcggccacggcgccgccgccggcggcgtggtgcgcatcgagccggtgcaccgtggtttgtaccacactcggaaggcgagcccggtggatcgcggcggcggcggcggcggcacgtcgttctctggccattcgccgtcgccgcccgacgccggcggcagcgcgaagccggagtctccgcacgacagcggcgtcaaggcgccgtcggagctgaccaccgtcgagcacaccaagcagccgtccgagccagcttctaccggcacggagtcggatgatggaggcaagccatcgtcggcgtcgtcatcctcgctgccggcggcggcgcacccgttcgcgcgcgcgctcgcggcggcgggcgacaagggcgaccggtgcggcgggcggtacgtgtacgtgcaggagctgccaccgcggttcaacaccgacatggtaaagaactgcgcgacgctgttcccgtggacggacatgtgcgcgttcacggcgaacggcggcttcggcccgcagatgagcggcggcgacggcggcgtgttccaggagaccgggtggtacaactccgaccagtacacggtggacatcatcttccacgaccggatcaggcggtacgagtgcctcaccgacgacccctccctcgccgccgccgtgtacgtgccgttcttcgccggcctcgaggtggcgcgccacctctgggggttcaacgtcaccacccgggacgccatggcgctggaggtggtggacatcatcacgtcgcggtccgagtggcgcgccatgggaggccgcgaccacttcttcaccgccggccgcaccacgtgggacttccggaggctgaacgacggcgacgccggctggggcagcaagctgttcagccttccggcgatcaagaacatgacggcgctcgtggtggaggcgagcccgtggcacctcaacgacgccgccatcccgttcccgactgcgttccacccggcgagcgacgaggccgtgttcgtctggcaggacaaggtccgccgcctcgagcgcccatggctcttctccttcgccggcgcggcgcgcccgggcagcgccaagtccatccgttccgagctcatcgcgcagtgcagggcgtcgagcgtgtgctccctgatggagtgcgccgacgggccgagcaacaagtgcggctcgccggcgagctacatgaggctgttccagagctccaccttctgcctccagccgcagggcgactcgtacacgcgcaagtcggcgttcgacgccatgctcgccggctgcatcccggtgttcttccaccccggcacggcgtacgtccagtacacctggcacctgcccaggaaccacgccgactactccgtctacatctccgaggacgacgtgcgccgcaacgccagcatcgaggagcggctgcggcggatcgcgccggccgccgtggagcggatgagggagacggtcatctcgctcatcccgacggtggtgtacgcgcagccgtcgtcgaggctggacacgatgaaggacgcgttcgacgtggcggtggacgccatcgtcgacaaggtgacgaggctgcggcgcgacatcgtcgacggccgcggcgaggaggagaagctggagatgtacagctggaagtatccattgctgcgagaagggcagaaggtcgaggacccccatgagtgggatccattgttcgcgttcggttag

SEQ ID NO: 4024 - protein, 598 aa, Oryza sativa subsp. indica
MGGAKQGRGGGGGCCSRLWFMVVLSATVTLLVRHCYDSGVIGHGAAAGGVVRIEPVHRGLYHTRKASPVDRGGGGGGTSFSGHSPSPPDAGGSAKPESPHDSGVKAPSELTTVEHTKQPSEPASTGTESDDGGKPSSASSSSLPAAAHPFARALAAAGDKGDRCGGRYVYVQELPPRFNTDMVKNCATLFPWTDMCAFTANGGFGPQMSGGDGGVFQETGWYNSDQYTVDIIFHDRIRRYECLTDDPSLAAAVYVPFFAGLEVARHLWGFNVTTRDAMALEVVDIITSRSEWRAMGGRDHFFTAGRTTWDFRRLNDGDAGWGSKLFSLPAIKNMTALVVEASPWHLNDAAIPFPTAFHPASDEAVFVWQDKVRRLERPWLFSFAGAARPGSAKSIRSELIAQCRASSVCSLMECADGPSNKCGSPASYMRLFQSSTFCLQPQGDSYTRKSAFDAMLAGCIPVFFHPGTAYVQYTWHLPRNHADYSVYISEDDVRRNASIEERLRRIAPAAVERMRETVISLIPTVVYAQPSSRLDTMKDAFDVAVDAIVDKVTRLRRDIVDGRGEEEKLEMYSWKYPLLREGQKVEDPHEWDPLFAFG

SEQ ID NO: 4025 - DNA, 1695 bp, Oryza sativa subsp. japonica
  CDS (1)..(1695)
atgggtggggctaagcaggggcgcggcggcggcggcggctgctgctcccgcctctggttcatggtcgttctctccgccaccgtgacgctgctggtgcgccactgctacgactccggcgtgatcggccacggcgccgccgccggcggcgtggtgcgcatcgagccggtgcaccgtgcgcgaagccggagtctccgcacgacagcggcgtcaagggcgccgtcggagctgaccaccgtcgagcacaccaagcagccgtccgagccagcttctaccggcacggagtcggatgatggaggcaagccatcgtcggcgtcgtcatcctcgctgccggcggcggcgcacccgttcgcgcgcgcgctcgcggcggcgggcgacaagggcgaccggtgcggcgggcggtacgtgtacgtgcaggagctgccaccgcggttcaacaccgacatggtaaagaactgcgcgacgctgttcccgtggacggacatgtgcgcgttcacggcgaacggcggcttcggcccgcagatgagcggcggcgacggcggcgtgttccaggagaccgggtggtacaactccgaccagtacacggtggacatcatcttccacgaccggatcaggcggtacgagtgcctcaccgacgacccctccctcgccgccgccgtgtacgtgccgttcttcgccggcctcgaggtggcgcgccacctctgggggttcaacgtcaccacccgggacgccatggcgctggaggtggtggacatcatcacgtcgcggtccgagtggcgcgccatgggaggccgcgaccacttcttcaccgccggccgcaccacgtgggacttccggaggctgaacgacggcgacgccggctggggcagcaagctgttcagccttccggcgatcaagaacatgacggcgctcgtggtggaggcgagcccgtggcacctcaacgacgccgccatcccgttcccgactgcgttccacccggcgagcgacgaggccgtgttcgtctggcaggacaaggtccgccgcctcgagcgcccatggctcttctccttcgccggcgcggcgcgcccgggcagcgccaagtccatccgttccgagctcatcgcgcagtgcagggcgtcgagcgtgtgctccctgatggagtgcgccgacgggccgagcaacaagtgcggctcgccggcgagctacatgaggctgttccagagctccaccttctgcctccagccgcagggcgactcgtacacgcgcaagtcggcgttcgacgccatgctcgccggctgcatcccggtgttcttccaccccggcacggcgtacgtccagtacacctggcacctgcccaggaaccacgccgactactccgtctacatctccgaggacgacgtgcgccgcaacgccagcatcgaggagcggctgcggcggatcgcgccggccgccgtggagcggatgagggagacggtcatctcgctcatcccgacggtggtgtacgcgcagccgtcgtcgaggctggacacgatgaaggacgcgttcgacgtggcggtggacgccatcgtcgacaaggtgacgaggctgcggcgcgacatcgtcgacggccgcggcgaggaggagaagctggagatgtacagctggaagtatccattgctgcgagaagggcagaaggtcgaggacccccatgagtgggatccattgttcgcgttcggttag

SEQ ID NO: 4026 - protein, 564 aa, Oryza sativa subsp. japonica
MGGAKQGRGGGGGCCSRLWFMVVLSATVTLLVRHCYDSGVIGHGAAAGGVVRIEPVHRARSRSLRTTAASRAPSELTTVEHTKQPSEPASTGTESDDGGKPSSASSSSLPAAAHPFARALAAAGDKGDRCGGRYVYVQELPPRFNTDMVKNCATLFPWTDMCAFTANGGFGPQMSGGDGGVFQETGWYNSDQYTVDIIFHDRIRRYECLTDDPSLAAAVYVPFFAGLEVARHLWGFNVTTRDAMALEVVDIITSRSEWRAMGGRDHFFTAGRTTWDFRRLNDGDAGWGSKLFSLPAIKNMTALVVEASPWHLNDAAIPFPTAFHPASDEAVFVWQDKVRRLERPWLFSFAGAARPGSAKSIRSELIAQCRASSVCSLMECADGPSNKCGSPASYMRLFQSSTFCLQPQGDSYTRKSAFDAMLAGCIPVFFHPGTAYVQYTWHLPRNHADYSVYISEDDVRRNASIEERLRRIAPAAVERMRETVISLIPTVVYAQPSSRLDTMKDAFDVAVDAIVDKVTRLRRDIVDGRGEEEKLEMYSWKYPLLREGQKVEDPHEWDPLFAFG

SEQ ID NO: 4027 - DNA, 1581 bp, Vitis vinifera
  CDS (1)..(1581)
atgagacgtcgtccaacgacgactattctgcctgagcaaatggataagggaatgcccaagaatcagcaaacccgcctctgtttcttagcctcattgtccgcacttttctgggttttgttgctgtactttcattttgttctggataattatccctttatgagagcattgagaactgttgagaacaagagtgatccatgtggtggaaggtatatttatgttcatgatcttccacctcggtttaacgaggatatgctgaaggagtgcaagagtctcagtctttggaccaacatgtgtacgttcacaagtaatgctgggttgggtcctccacttgagaatgttgaaggtgtgttctccaatacagggtggtacgcaaccaatcagtttgctgttgatgtgatattcagcaacaggatgaagcaatatgactgcttgacaacggattcttctattgctgctgcaatttttgtgcccttctatgcgggattcgatattgcacggtatctttggggctataatatatcagtgcgggatgcagcttcactcaatttggttgattggcttatgaagaggccagagtggaagattatgggagggaaggaccattttcttgttgcaggaaggataacatgggattttaggagactaaccgatcttgaatcagactggggtaataaacttttgtttctgccggctgcaaagaatatgtcaatgcttgttgttgaatctagcccttggaatgcaaacgattttggcatcccttatccaacctacttccatccggcaaaggatactgatgtgcttatttggcaggacagaatgaggaagttggagaggaagtggcttttctcttttgctggtgcaccacgtcctggtaacacaaagtcgattaggggccagatcatcgatcagtgcaggacgtccaaggttggcaaacttttggaatgtgattttggggagagcaagtgccattcaccaagcagtatcatgcagatgttccagagttctcttttctgcctacaacctcagggtgattcatacacccgaagatctgcttttgactcaatgctggccgggtgcattcctgtttttttccatcctggttctgcatacacacaatacacttggcatcttccgaagaacttttcaagttactcagtgttcattccagaggacgatattcgaaaaaggaatgtcagtatagaggaaagacttggccaaattccacctgagcaggtgaaggcgatgagggaggaggtcataagtctgattccaaggttgatatatgctgatcctcgctctaaactggagactcttaaggatgcctttgatgtagccgtacaagcagtgattgggaaggttacaaagttgagaaaggacattattggaggtcaaacagatgataattttgtggaggagaacagttggaaatatgatttgttagaggaaggacaacgagaagtgggacctcatgaatgggatcctttcttctcaaaaccaaaggaccagaatggggattctggaggttcatctgcagaggcagctaaaaattcctggaagaatgagcaaagacatcaatcatga

SEQ ID NO: 4028 - protein, 526 aa, Vitis vinifera
MRRRPTTTILPEQMDKGMPKNQQTRLCFLASLSALFWVLLLYFHFVLDNYPFMRALRTVENKSDPCGGRYIYVHDLPPRFNEDMLKECKSLSLWTNMCTFTSNAGLGPPLENVEGVFSNTGWYATNQFAVDVIFSNRMKQYDCLTTDSSIAAAIFVPFYAGFDIARYLWGYNISVRDAASLNLVDWLMKRPEWKIMGGKDHFLVAGRITWDFRRLTDLESDWGNKLLFLPAAKNMSMLVVESSPWNANDFGIPYPTYFHPAKDTDVLIWQDRMRKLERKWLFSFAGAPRPGNTKSIRGQIIDQCRTSKVGKLLECDFGESKCHSPSSIMQMFQSSLFCLQPQGDSYTRRSAFDSMLAGCIPVFFHPGSAYTQYTWHLPKNFSSYSVFIPEDDIRKRNVSIEERLGQIPPEQVKAMREEVISLIPRLIYADPRSKLETLKDAFDVAVQAVIGKVTKLRKDIIGGQTDDNFVEENSWKYDLLEEGQREVGPHEWDPFFSKPKDQNGDSGGSSAEAAKNSWKNEQRHQS

SEQ ID NO: 4029 - DNA, 1860 bp, Arabidopsis thaliana
  CDS (1)..(1860)
atgtttccaagggtttctatgaggcgtcgctctgctgaagtttctcctacagagccaatggagaagggaaatggaaaaaatcagactaatcgaatctgtttgttggttgctttgtcactctttttctgggcattgttgttgtacttccattttgttgtcttagggactagtaacattgataaacagctccaattgcaacctagttatgctcaatctcagccatcatcagtctctcttcgtgttgataaattccctatagggcctcatgcagctccatcgaaaccacctcccaaagagcctttagttactatcgataagccaatactccctcctgcaccagtagccaattctagttccacctttaagccacctagaattgttgagagcgggaagaaacaggagttttcgtttataagagccttgaagacagtagacaacaagagtgacccttgtggagggaagtacatttatgttcacaatctaccctcaaagttcaatgaggatatgcttagagactgtaagaagcttagtctctggactaacatgtgtaagttcacaaccaatgctggccttgggccgccgcttgagaatgttgaaggtgtcttctctgatgaaggttggtatgcgactaatcagtttgctgttgatgtgatattcagcaaccggatgaagcagtacaaatgtttgacaaatgattcttcccttgctgctgccatctttgtgccgttctatgctggattcgacattgctaggtatctgtggggatacaatatctcgagaagggatgctgcttcgcttgagttggtcgattggctcatgaagcggcctgagtgggatataatgaggggaaaagatcatttccttgtggcgggtaggataacgtgggattttaggagattgtctgaagaagaaactgattggggcaacaagcttctcttcttaccggctgccaagaacatgtctatgcttgtggttgagtcgagcccatggaatgctaatgattttgggatcccgtacccaacctacttccacccagcaaaggactcagaggtttttgaatggcaagaccggatgagaaacctggaaaggaagtggcttttctcgtttgcaggagccccacgacctgacaatccgaaatctatcagagggcagatcattgatcaatgtcgaaactcaaatgttggcaaattattagaatgcgattttggggagagcaaatgccatgcaccaagcagcattatgcaaatgtttcaaagctctctcttctgcctgcagccacagggagactcttacacccgaagatcggcatttgactcaatgcttgccggttgtataccggtcttcttccatccgggttcagcctacacgcaatacacgtggcatctacccaagaactacacaacctactcggtattcatccccgaggatgatgttcggaagagaaacataagcatcgaggagcgactcctccagattccagccaagcaggtcaagataatgagagagaatgtcatcaacctcatcccaaggctgatctacgcagacccgagatcagaactggagacgcagaaagatgcatttgatgtctcggtacaggctgtgatagacaaggtgactcggttaaggaagaacatgatcgagggccgaaccgagtatgactacttcgtggaggagaacagctggaagtatgcgttgctggaggaaggccaacgggaagcagggggccatgtgtgggacccgttcttctccaaaccaaagcccggagaagatggcagcagcgatggtaatggaggcacgactatttcagcagatgcagctaagaattcatggaagagtgagcagagagataagacacagtga

SEQ ID NO: 4030 - protein, 619 aa, Arabidopsis thaliana
MFPRVSMRRRSAEVSPTEPMEKGNGKNQTNRICLLVALSLFFWALLLYFHFVVLGTSNIDKQLQLQPSYAQSQPSSVSLRVDKFPIGPHAAPSKPPPKEPLVTIDKPILPPAPVANSSSTFKPPRIVESGKKQEFSFIRALKTVDNKSDPCGGKYIYVHNLPSKFNEDMLRDCKKLSLWTNMCKFTTNAGLGPPLENVEGVFSDEGWYATNQFAVDVIFSNRMKQYKCLTNDSSLAAAIFVPFYAGFDIARYLWGYNISRRDAASLELVDWLMKRPEWDIMRGKDHFLVAGRITWDFRRLSEEETDWGNKLLFLPAAKNMSMLVVESSPWNANDFGIPYPTYFHPAKDSEVFEWQDRMRNLERKWLFSFAGAPRPDNPKSIRGQIIDQCRNSNVGKLLECDFGESKCHAPSSIMQMFQSSLFCLQPQGDSYTRRSAFDSMLAGCIPVFFHPGSAYTQYTWHLPKNYTTYSVFIPEDDVRKRNISIEERLLQIPAKQVKIMRENVINLIPRLIYADPRSELETQKDAFDVSVQAVIDKVTRLRKNMIEGRTEYDYFVEENSWKYALLEEGQREAGGHVWDPFFSKPKPGEDGSSDGNGGTTISADAAKNSWKSEQRDKTQ

SEQ ID NO: 4031 - DNA, 1767 bp, Oryza sativa subsp. japonica
  CDS (1)..(1767)
atggagaaggtgggcgggaagccgccgcagtcgcgcctctgcttcctcgccacgctctgcgccatgttctgggtcctcatcttctacttccacttcttcgtcatcgccaacgagcctggctccgcgggggcggacaccgccgccggcgccgcggcgagcattgcccgcgcagaacttccgctccccgaacccgagcgcgtctccgatcccgcggttcccctccctccgcctgccctcgtctcggagccgccacctaccaccgctactgtcgccaaagtggaagatgaggagaagcccacggccgtcgcccaccaggaggcggcgcccagggattacgcgttccagcgagcgctcaagaccgcggagaacaagagcgacccgtgcggcggccggtacatctacgtgcacgagctgccgccgcggttcaacgacgacatgctccgggagtgcgagaggctcagcctctggaccaatatgtgcaagttcatgagcaacgaagggcttggtccgccgttgggcaacgaggaaggggtgttctccaacaccggctggtacgcgacgaaccagtttatggtggatgtcatcttcaggaaccggatgaagcagtacgagtgcctgaccaaggactcgtccatcgctgccgcggtgtttgtgccgttctacgccgggtttgatgtggcgaggtatctttgggggcacaacatttcgacgagggatgccgcgtcgctggatttgatagattggctgaggaagaggcctgaatggaatgtgatgggcgggcgtgaccatttcttagttggcggcaggattgcgtgggatttcaggcgcttgacggacgaagagtcggattggggcaacaagctgcttttcatgccggctgcgaagaatatgtcgatgttggtggtggagtcaagcccatggaatgccaatgattttgcgataccatatcctacttacttccaccctgccaaggatgctgatgttttgctttggcaggatagaatgaggagcctggaacgaccatggttgttctcgtttgctggggctcctcgtcctgatgatcccaagtctatcagaagtcagcttattgatcaatgcaggacatcaagtgtctgtaaattgctggagtgtgatcttggggagagcaagtgccattcccctagcgcaatcatgaatatgttccagaactctttgttctgcttgcagccccaaggtgattcgtatacgagaagatctgccttcgactcgatgctggctggttgcattcctgttttctttcatcctggttcagcgtatgtccaatatacgtggcatcttccgaagaactatacacggtactctgtcttcatccctgaagatggcgtccgtaagggaaatgtcagcattgaggacaggcttaaaagtatccatccagatatggtcaagaagatgagggaagaggtcattagtctcatcccaagggtgatatatgctgatccaaggtcaaagctggagaccctgaaggatgcattcgatgtttctgtagaggcaataattaacaaggtgacacagttgagaagagatatcatcgaagatcatgaagataaagattttgttgaagagaatagctggaagtatgatctgttggaagaagggcagaggacaattgggcctcatgaatgggacccgttcttctctaagcccaaggacaagggtggagattctactaatccatctactaatgctgccaagaactcctggaaaaacgaacaaagaggtcagaactaa

SEQ ID NO: 4032 - protein, 588 aa, Oryza sativa subsp. japonica
MEKVGGKPPQSRLCFLATLCAMFWVLIFYFHFFVIANEPGSAGADTAAGAAASIARAELPLPEPERVSDPAVPLPPPALVSEPPPTTATVAKVEDEEKPTAVAHQEAAPRDYAFQRALKTAENKSDPCGGRYIYVHELPPRFNDDMLRECERLSLWTNMCKFMSNEGLGPPLGNEEGVFSNTGWYATNQFMVDVIFRNRMKQYECLTKDSSIAAAVFVPFYAGFDVARYLWGHNISTRDAASLDLIDWLRKRPEWNVMGGRDHFLVGGRIAWDFRRLTDEESDWGNKLLFMPAAKNMSMLVVESSPWNANDFAIPYPTYFHPAKDADVLLWQDRMRSLERPWLFSFAGAPRPDDPKSIRSQLIDQCRTSSVCKLLECDLGESKCHSPSAIMNMFQNSLFCLQPQGDSYTRRSAFDSMLAGCIPVFFHPGSAYVQYTWHLPKNYTRYSVFIPEDGVRKGNVSIEDRLKSIHPDMVKKMREEVISLIPRVIYADPRSKLETLKDAFDVSVEAIINKVTQLRRDIIEDHEDKDFVEENSWKYDLLEEGQRTIGPHEWDPFFSKPKDKGGDSTNPSTNAAKNSWKNEQRGQN

SEQ ID NO: 4033 - DNA, 1515 bp, Oryza sativa
  CDS (1)..(1515)
atgaggtttagtgtggtgattagttcttggatcttgaatcggcagctgatcaaatccgcgccgaaaggcggtggtcggcagcaacgccgggcgaaggggatggagaaggtcgcggttggcttgttgccgccgctgcggttcatcgccgtcctcgccgtcgtgtcgtggacgtcgttcatctactgccatttctccttgctcagcggcgggttgctgctgggccacggcggcggcgacgacggcgccgacccgtgccgggggaggtacatctacgtgcacgacctgccgcgccggttcaacgacgacatcctccgcgactgccggaagacgagagaccactggccggacatgtgcgggttcgtcagcaacgccggcctcggccggccgctcgtcgaccgggccgacggcgtgctgacgggcgaggccgggtggtacggcacgcaccagttcgcgctggacgccatcttccacaaccggatgaagcagtacgagtgcctgaccaaccaatcggcggtggctgacgcggtgttcgtcccgttctacgccggcttcgacttcgtccgctaccactggggttacgacaacgcgacgagggacgccgcgtcggtcgacctcacgcagtggctcatgcggcggccggagtggaggcgcatgggcggccgcgaccacttcctcgtcgccgggaggacggggtgggacttccggagggacaccaacatcaacccaaactggggcaccaacctcctcgtcatgccgggcggccgggacatgtcggtgctcgtgctggagtcctcgctgctcaacggcagcgactacgccgtgccgtacccgacctacttccacccgaggtccgacgccgacgtgttccggtggcaggacagggtgcgcggcatgcagcgtcggtggctcatggcgttcgtcggcgcgccgcggccggacgacccgaagaacatccgcgcccagatcatcgcgcagtgcaacgcgacgagcgcgtgcagccagctcggctgcgcgttcggcagcagccagtgccactccccgggcaacatcatgcggctgttccagaaggccaccttctgcctgcagccgccgggggactcctacacgcggcggtcggtgttcgactcgatggtcgccgggtgcatcccggtgttcttccacaacgcgacggcgtacctgcagtatgcgtggcacctcccccgggagcacgccaagtactcggtgttcatctccgagcacgacgtgcgcgccggcaacgtgagcatcgaggcgacgctccgggcgatccccgccgccaccgtggagcggatgcgggaggaggtgatccggctcatcccgtcggtgatctacgccgacccgaggtcgaagctggagacggtgagggacgccttcgacgtcgccgtcgaggggatcatcgacagaatcgccatgaccaggggaggctacgcgagatcgtggctccggcctaaacaatctaggcaagcactagacgctcgacgacgcagactaagttaa

SEQ ID NO: 4034 - protein, 504 aa, Oryza sativa
MRFSVVISSWILNRQLIKSAPKGGGRQQRRAKGMEKVAVGLLPPLRFIAVLAVVSWTSFIYCHFSLLSGGLLLGHGGGDDGADPCRGRYIYVHDLPRRFNDDILRDCRKTRDHWPDMCGFVSNAGLGRPLVDRADGVLTGEAGWYGTHQFALDAIFHNRMKQYECLTNQSAVADAVFVPFYAGFDFVRYHWGYDNATRDAASVDLTQWLMRRPEWRRMGGRDHFLVAGRTGWDFRRDTNINPNWGTNLLVMPGGRDMSVLVLESSLLNGSDYAVPYPTYFHPRSDADVFRWQDRVRGMQRRWLMAFVGAPRPDDPKNIRAQIIAQCNATSACSQLGCAFGSSQCHSPGNIMRLFQKATFCLQPPGDSYTRRSVFDSMVAGCIPVFFHNATAYLQYAWHLPREHAKYSVFISEHDVRAGNVSIEATLRAIPAATVERMREEVIRLIPSVIYADPRSKLETVRDAFDVAVEGIIDRIAMTRGGYARSWLRPKQSRQALDARRRRLS

SEQ ID NO: 4035 - DNA, 1416 bp, Oryza sativa
  CDS (1)..(1416)
atggagaaggtcgcggttggcttgttgccgccgctgcggttcatcgccgtcctcgccgtcgtgtcgtggacgtcgttcatctactgccatttctccttgctcagcggcgggttgctgctgggccacggcggcggcgacgacggcgccgacccgtgccgggggaggtacatctacgtgcacgacctgccgcgccggttcaacgacgacatcctccgcgactgccggaagacgagagaccactggccggacatgtgcgggttcgtcagcaacgccggcctcggccggccgctcgtcgaccgggccgacggcgtgctgacgggcgaggccgggtggtacggcacgcaccagttcgcgctggacgccatcttccacaaccggatgaagcagtacgagtgcctgaccaaccaatcggcggtggctgacgcggtgttcgtcccgttctacgccggcttcgacttcgtccgctaccactggggttacgacaacgcgacgagggacgccgcgtcggtcgacctcacgcagtggctcatgcggcggccggagtggaggcgcatgggcggccgcgaccacttcctcgtcgccgggaggacggggtgggacttccggagggacaccaacatcaacccaaactggggcaccaacctcctcgtcatgccgggcggccgggacatgtcggtgctcgtgctggagtcctcgctgctcaacggcagcgactacgccgtgccgtacccgacctacttccacccgaggtccgacgccgacgtgttccggtggcaggacagggtgcgcggcatgcagcgtcggtggctcatggcgttcgtcggcgcgccgcggccggacgacccgaagaacatccgcgcccagatcatcgcgcagtgcaacgcgacgagcgcgtgcagccagctcggctgcgcgttcggcagcagccagtgccactccccgggcaacatcatgcggctgttccagaaggccaccttctgcctgcagccgccgggggactcctacacgcggcggtcggtgttcgactcgatggtcgccgggtgcatcccggtgttcttccacaacgcgacggcgtacctgcagtatgcgtggcacctcccccgggagcacgccaagtactcggtgttcatctccgagcacgacgtgcgcgccggcaacgtgagcatcgaggcgacgctccgggcgatccccgccgccaccgtggagcggatgcgggaggaggtgatccggctcatcccgtcggtgatctacgccgacccgaggtcgaagctggagacggtgagggacgccttcgacgtcgccgtcgaggggatcatcgacagaatcgccatgaccaggggaggctacgcgagatcgtggctccggcctaaacaatctaggcaagcactagacgctcgacgacgcagactaagttaa

SEQ ID NO: 4036 - protein, 471 aa, Oryza sativa
MEKVAVGLLPPLRFIAVLAVVSWTSFIYCHFSLLSGGLLLGHGGGDDGADPCRGRYIYVHDLPRRFNDDILRDCRKTRDHWPDMCGFVSNAGLGRPLVDRADGVLTGEAGWYGTHQFALDAIFHNRMKQYECLTNQSAVADAVFVPFYAGFDFVRYHWGYDNATRDAASVDLTQWLMRRPEWRRMGGRDHFLVAGRTGWDFRRDTNINPNWGTNLLVMPGGRDMSVLVLESSLLNGSDYAVPYPTYFHPRSDADVFRWQDRVRGMQRRWLMAFVGAPRPDDPKNIRAQIIAQCNATSACSQLGCAFGSSQCHSPGNIMRLFQKATFCLQPPGDSYTRRSVFDSMVAGCIPVFFHNATAYLQYAWHLPREHAKYSVFISEHDVRAGNVSIEATLRAIPAATVERMREEVIRLIPSVIYADPRSKLETVRDAFDVAVEGIIDRIAMTRGGYARSWLRPKQSRQALDARRRRLS

SEQ ID NO: 4037 - DNA, 1554 bp, Oryza sativa
  CDS (1)..(1554)
atggagaggaccggcgcccacggcggcaaacgcttgctgcctcgcctcctcttcctcgccgccctgtcggtcacgccgtggcttctcatcttctgcctccacttctccgtcttcgatggcgcaccgccggtcagctcgccagcggcgcgccagtcgctcgtcgccgtcgtgtccgagggcggcgaggactcgcagcgttttctcctcgagcaagaggagcagctcaggaggctcccgtccgcacgcgacgtcacgacgacgacggcggcggcggtggctggggacgcgcacgcctgcgaggggcggtacgtgtacatccacgacctgccgccgcggttcaacgacgacatcctccgcaactgccgcgagtggtaccagtggatcaacatgtgcgtgtacctcagcaacggcggcctcggcgagccggtggacaacgcggacggcgcgttcgccgacgaggggtggtacgccacggaccacttcggcctcgacgtcatcttccacagccgcatcaagcagtacgagtgcctcaccgacgactcctcccgcgccgccgccgtcttcgtgccgttctacgccggcttcgacgtcgtgcagcacctgtggggcagcaacgcgtcggtcaaggacgccgcgtcgctggagctcgtcgactggctcacgcgtcgccccgagtggcgctccatgggcggccgcgaccacttcgtgatgtccgggaggacggcgtgggaccaccagcggcagacggacagcgactcggagtggggcaacaagttcctccggctgccggccgtgcagaacatgacggtgctcttcgtcgagaagacgccatggacggagcacgacttcgccgtgccgtacccgacctacttccacccggcgaaggacgccgagatcttccagtggcagcagcggatgcgcggcatgaagcgcgagtggctcttcaccttcgccggcggcacgcgccccggtgaccccaactccatccggcaccacctcatccggcaatgcggcgcgtccagcctctgcaacctgatccagtgccggaagggcgagaagaagtgcctcatcccgagcacgttcatgcgcgtgttccagggcacgcgcttctgcctgcagccgccgggcgacacgtacacgcggcggtcggcgttcgacgccatgctcgccggctgcgtgccggtgttcttccacccggcgtccgcgtacacgcagtacaagtggcacctccccgacgtgcacgaaacctactcggtgttcatcgccgaggaggacatccgcagcggcaacgtgagcgtagaggagacgctccggaggatcccgccggacgtcgcggagaagatgacggagacggtgatcagcctcgtgccgaggctgctctacgcggaccctaggtcgaagctggagacggtcaaggacgccgtggatttgacggtggaggcggtcatcgagagggtcaagaagctgaggaaggagatgcacggcgccggcgcgtcgtcgcgactctcaacggcattaggtgcaaacaccaatggaggtttccaatcgagttag

SEQ ID NO: 4038 - protein, 517 aa, Oryza sativa
MERTGAHGGKRLLPRLLFLAALSVTPWLLIFCLHFSVFDGAPPVSSPAARQSLVAVVSEGGEDSQRFLLEQEEQLRRLPSARDVTTTTAAAVAGDAHACEGRYVYIHDLPPRFNDDILRNCREWYQWINMCVYLSNGGLGEPVDNADGAFADEGWYATDHFGLDVIFHSRIKQYECLTDDSSRAAAVFVPFYAGFDVVQHLWGSNASVKDAASLELVDWLTRRPEWRSMGGRDHFVMSGRTAWDHQRQTDSDSEWGNKFLRLPAVQNMTVLFVEKTPWTEHDFAVPYPTYFHPAKDAEIFQWQQRMRGMKREWLFTFAGGTRPGDPNSIRHHLIRQCGASSLCNLIQCRKGEKKCLIPSTFMRVFQGTRFCLQPPGDTYTRRSAFDAMLAGCVPVFFHPASAYTQYKWHLPDVHETYSVFIAEEDIRSGNVSVEETLRRIPPDVAEKMTETVISLVPRLLYADPRSKLETVKDAVDLTVEAVIERVKKLRKEMHGAGASSRLSTALGANTNGGFQSS

SEQ ID NO: 4039 - DNA, 1815 bp, Oryza sativa
  CDS (1)..(1815)
atgtctgctatgaggcggcggccggtgctgccgactcaccaggacgacatggagaaggtgggcgggaagccgccgcagtcgcgcctctgcttcctcgccacgctctgcgccatgttctgggtcctcatcttctacttccacttcttcgtcatcgccaacgagcctggctccgcgggggcggacaccgccgccggcgccgcggcgagcattgcccgcgcagaacttccgctccccgaacccgagcgcgtctccgatcccgcggttcccctccctccgcctgccctcgtctcggagccgccacctaccaccgctactgtcgccaaagtggaagatgaggagaagcccacggccgtcgcccaccaggaggcggcgcccagggattacgcgttccagcgagcgctcaagaccgcggagaacaagagcgacccgtgcggcggccggtacatctacgtgcacgagctgccgccgcggttcaacgacgacatgctccgggagtgcgagaggctcagcctctggaccaatatgtgcaagttcatgagcaacgaagggcttggtccgccgttgggcaacgaggaaggggtgttctccaacaccggctggtacgcgacgaaccagtttatggtggatgtcatcttcaggaaccggatgaagcagtacgagtgcctgaccaaggactcgtccatcgctgccgcggtgtttgtgccgttctacgccgggtttgatgtggcgaggtatctttgggggcacaacatttcgacgagggatgccgcgtcgctggatttgatagattggctgaggaagaggcctgaatggaatgtgatgggcgggcgtgaccatttcttagttggcggcaggattgcgtgggatttcaggcgcttgacggacgaagagtcggattggggcaacaagctgcttttcatgccggctgcgaagaatatgtcgatgttggtggtggagtcaagcccatggaatgccaatgattttgcgataccatatcctacttacttccaccctgccaaggatgctgatgttttgctttggcaggatagaatgaggagcctggaacgaccatggttgttctcgtttgctggggctcctcgtcctgatgatcccaagtctatcagaagtcagcttattgatcaatgcaggacatcaagtgtctgtaaattgctggagtgtgatcttggggagagcaagtgccattcccctagcgcaatcatgaatatgttccagaactctttgttctgcttgcagccccaaggtgattcgtatacgagaagatctgccttcgactcgatgctggctggttgcattcctgttttctttcatcctggttcagcgtatgtccaatatacgtggcatcttccgaagaactatacacggtactctgtcttcatccctgaagatggcgtccgtaagggaaatgtcagcattgaggacaggcttaaaagtatccatccagatatggtcaagaagatgagggaagaggtcattagtctcatcccaagggtgatatatgctgatccaaggtcaaagctggagaccctgaaggatgcattcgatgtttctgtagaggcaataattaacaaggtgacacagttgagaagagatatcatcgaagatcatgaagataaagattttgttgaagagaatagctggaagtatgatctgttggaagaagggcagaggacaattgggcctcatgaatgggacccgttcttctctaagcccaaggacaagggtggagattctactaatccatctactaatgctgccaagaactcctggaaaaacgaacaaagaggtcagaactaa

SEQ ID NO: 4040 - protein, 604 aa, Oryza sativa
MSAMRRRPVLPTHQDDMEKVGGKPPQSRLCFLATLCAMFWVLIFYFHFFVIANEPGSAGADTAAGAAASIARAELPLPEPERVSDPAVPLPPPALVSEPPPTTATVAKVEDEEKPTAVAHQEAAPRDYAFQRALKTAENKSDPCGGRYIYVHELPPRFNDDMLRECERLSLWTNMCKFMSNEGLGPPLGNEEGVFSNTGWYATNQFMVDVIFRNRMKQYECLTKDSSIAAAVFVPFYAGFDVARYLWGHNISTRDAASLDLIDWLRKRPEWNVMGGRDHFLVGGRIAWDFRRLTDEESDWGNKLLFMPAAKNMSMLVVESSPWNANDFAIPYPTYFHPAKDADVLLWQDRMRSLERPWLFSFAGAPRPDDPKSIRSQLIDQCRTSSVCKLLECDLGESKCHSPSAIMNMFQNSLFCLQPQGDSYTRRSAFDSMLAGCIPVFFHPGSAYVQYTWHLPKNYTRYSVFIPEDGVRKGNVSIEDRLKSIHPDMVKKMREEVISLIPRVIYADPRSKLETLKDAFDVSVEAIINKVTQLRRDIIEDHEDKDFVEENSWKYDLLEEGQRTIGPHEWDPFFSKPKDKGGDSTNPSTNAAKNSWKNEQRGQN

SEQ ID NO: 4041 - DNA, 1425 bp, Oryza sativa
  CDS (1)..(1425)
atggccgcgatgtatcgtcccgatccggcgaaccccgccgcccgccgcccgcgcctcgtcgtgctcctcctcgttgccttcttcgccctccagctgctcgtcttcctcgccttccgcggcgcgccctccccgagctcccccgatgccgccgttgaccgcgtgccggtgtcggcgcgccgtgacggcgaggactccggctgcgtgggcgggctagtgtacgtctacgacctcccgccggtcttcaacgaggatctgctcgccctgtgcgaggtgctcgcgccgatgtactcgctgtgcccgtacctcgccaacgacgggctcgggttcccggcgaaggggggcaaccagtcggagttcccgccggccgagctggttgggtcgtggtactcctccgaccagttcgcgctcgagcacatcgtccaccgccgcctgctctcgcaccggtgccgcaccaccgatccggcccgcgccacggcgttcttcgtgccattctacgcggggctggccgtcgggcgccacctgtgggcgaccaacgccaccgacgccgaccgcgacagggactgcctcgcgctgctgtcgtggctccacgcgcagccgtactacaagcggtctaatggctgggaccacttcatcgcgctcggccgcatcacctgggacttccgccgctcgccggacggcgggtggggcggaagcttcctcctcatgcccgggctggccaacaccacccgcctggtcatcgagcgcgatccctgggacgccatggacgtcggcatcccttacccgaccagcttccacccgcgcaccgccgccgacgtgcgcgcgtggcagcagtacgcctcgtcccgctctcgccccaagctcttcgccttcgccggcgccccgcgatcggcaatcaagggggatttccgcgggctgctgctcgaggagtgccaggcggccggggacgcgtgcggcgcgctggactgcggcgagggcaggtgcatcaagcaaaacgagctcgtcatggagctgttcctgggcgcgcgcttctgcctgcagccgcgcggggacagcttcacccggcggtcgctgttcgactgcatggtgggcggcgccgtgccggtgctcttctggcggcggagcgcgtaccggcagtacgggtggtacgtgccggtgggcaacagtcaggaggaagaatggtccgtgttcatcgaccgcgacgagctgcgcgccggcaatgtcaccgttcgtggcgttcttgcggccatcccggaagcgaaggtgcgggagatgaggaatcgcgtggtggagatgatacccaagctggtgtactccgctgcagacaaggaggggctcggcgacggcatgaaggacgccgtggacgtcatgatcgacggcatgctgcggcgagcggctgagcagcgccggagttggaggaaagtgtaa

SEQ ID NO: 4042 - protein, 474 aa, Oryza sativa
MAAMYRPDPANPAARRPRLVVLLLVAFFALQLLVFLAFRGAPSPSSPDAAVDRVPVSARRDGEDSGCVGGLVYVYDLPPVFNEDLLALCEVLAPMYSLCPYLANDGLGFPAKGGNQSEFPPAELVGSWYSSDQFALEHIVHRRLLSHRCRTTDPARATAFFVPFYAGLAVGRHLWATNATDADRDRDCLALLSWLHAQPYYKRSNGWDHFIALGRITWDFRRSPDGGWGGSFLLMPGLANTTRLVIERDPWDAMDVGIPYPTSFHPRTAADVRAWQQYASSRSRPKLFAFAGAPRSAIKGDFRGLLLEECQAAGDACGALDCGEGRCIKQNELVMELFLGARFCLQPRGDSFTRRSLFDCMVGGAVPVLFWRRSAYRQYGWYVPVGNSQEEEWSVFIDRDELRAGNVTVRGVLAAIPEAKVREMRNRVVEMIPKLVYSAADKEGLGDGMKDAVDVMIDGMLRRAAEQRRSWRKV

SEQ ID NO: 4043 - DNA, 1674 bp, Oryza sativa
  CDS (1)..(1674)
atgccggagtcaccgacatcgccacccacctcgccgctgccgggatcgcccaccaataatgccacgccgccgtccccggtgtcggcgtttctgcgagccaccgtgctgttcgccgccttcctagccctccagctcgtgctcttcaagtccctcctcacgttcccgagctcccggttcctgccggcgccgcgccgcagcaacagcacctgggccaacggcgccgtggacgacgccgaggagtgcaaggccgggctcatctacgtctacgacctcccgccggagttcaaccacgacctcgtcgcccactgcgaccgcctgtggccgtggtactccttctgcccctacctctccaatggcggcctcggccggcccgccgccgaggtaccggcgctctccgccgtcgtgccgaacgcgtcgctgcccaactggtacaacaccgaccagttcccgctcgaggtcatcgtccaccgccgccttctgtcccaccggtgccgcaccatcgacgcgtcgctcgccaccgcgttctacgtgccgttctacgcgggcctcgacgtcggcagccacctgtggggcccgaacagcaccgtcgccgaccgcgaccgcgccggcgcgcggctcctccggtggctcagggggcagccgttcttcgccaagtccggcgggtgggaccacttcatcacgctcgggcgcatcacgtgggacttccgccggtacggcgccgacgggtggggcaccaacctggtgctcatgcccgggatggagaacgtcacccgcctcgtcatcgagggcgaccgcctcgacccgctcgacgtcggcgtcccttacccgacggggttccacccgcggcgcgccgccgacgtccgcgcgtggcaggagcacgtgctgtccctggaccgccgcaacctgttcgggttcgccggcgcgccgcgttccgggttcccggacgacttcagggacgtgctgctggaggagtgcgaggacgccgggagcgaccgctgccgcgccgtggactgccggggcacgcggtgcaacgacgacggcgcggcggtgatgaggctgttcatggggtcccgcttctgcctgcagccgcgcggggacagcttcacgcggcggtccctgttcgactgcatggtggccggcgccgtgccggtgctgttctggcggaggacggcgtacgacgcgtaccggtggttcctgccgcgcggcgaggagggggagtggtcggtgttcatcgaccggcgggcgctgcgggtgggcaacgtgagcgtgcgggacgtgctggaagggtacagcgagcggcgggtgcggcggatgcgggagcgcgtggtggagatgatacccaggctggtgtacggctcgtcgcccgacggcctcggcgacggcatggacgacgcgcttgacgtcgctctcggcggcgtcctcaagcggttccgccaccgccggtggagcattgggcatgaagcagagcgcccgcctgggcgtttggtcgctggggcaccaccacggcgtggcagcagcaaaacgacgacgcctccaacttctaacgggagaaacggatcggtgattgggcagcgtgcgtcgcggcacagatcaacggcggcgtcctcggcgtacataaaaaccgtcctatcggaagcaccggcatcaagaagcaaaagcttgcagcaatcttga

SEQ ID NO: 4044 - protein, 557 aa, Oryza sativa
MPESPTSPPTSPLPGSPTNNATPPSPVSAFLRATVLFAAFLALQLVLFKSLLTFPSSRFLPAPRRSNSTWANGAVDDAEECKAGLIYVYDLPPEFNHDLVAHCDRLWPWYSFCPYLSNGGLGRPAAEVPALSAVVPNASLPNWYNTDQFPLEVIVHRRLLSHRCRTIDASLATAFYVPFYAGLDVGSHLWGPNSTVADRDRAGARLLRWLRGQPFFAKSGGWDHFITLGRITWDFRRYGADGWGTNLVLMPGMENVTRLVIEGDRLDPLDVGVPYPTGFHPRRAADVRAWQEHVLSLDRRNLFGFAGAPRSGFPDDFRDVLLEECEDAGSDRCRAVDCRGTRCNDDGAAVMRLFMGSRFCLQPRGDSFTRRSLFDCMVAGAVPVLFWRRTAYDAYRWFLPRGEEGEWSVFIDRRALRVGNVSVRDVLEGYSERRVRRMRERVVEMIPRLVYGSSPDGLGDGMDDALDVALGGVLKRFRHRRWSIGHEAERPPGRLVAGAPPRRGSSKTTTPPTSNGRNGSVIGQRASRHRSTAASSAYIKTVLSEAPASRSKSLQQS

SEQ ID NO: 4045 - DNA, 1671 bp, Oryza sativa
  CDS (1)..(1671)
atgccggagtcaccgacatcgccacccacctcgccgctgccgggatcgcccaccaataatgccacgccgccgtccccggtgtcggcgtttctgcgagccaccgtgctgttcgccgccttcctagccctccagctcgtgctcttcaagtccctcctcacgttcccgagctcccggttcctgccggcgccgcgccgcagcaacagcacctgggccaacggcgccgtggacgacgccgaggagtgcaaggccgggctcatctacgtctacgacctcccgccggagttcaaccacgacctcgtcgcccactgcgaccgcctgtggccgtggtactccttctgcccctacctctccaatggcggcctcggccggcccgccgccgaggtaccggcgctctccgccgtcgtgccgaacgcgtcgctgcccaactggtacaacaccgaccagttcccgctcgaggtcatcgtccaccgccgccttctgtcccaccggtgccgcaccatcgacgcgtcgctcgccaccgcgttctacgtgccgttctacgcgggcctcgacgtcggcagccacctgtggggcccgaacagcaccgtcgccgaccgcgaccgcgccggcgcgcggctcctccggtggctcagggggcagccgttcttcgccaagtccggcgggtgggaccacttcatcacgctcgggcgcatcacgtgggacttccgccggtacggcgccgacgggtggggcaccaacctggtgctcatgcccgggatggagaacgtcacccgcctcgtcatcgagggcgaccgcctcgacccgctcgacgtcggcgtcccttacccgacggggttccacccgcggcgcgccgccgacgtccgcgcgtggcaggagcacgtgctgtccctggaccgccgcaacctgttcgggttcgccggcgcgccgcgttccgggttcccggacgacttcagggacgtgctgctggaggagtgcgaggacgccgggagcgaccgctgccgcgccgtggactgccggggcacgcggtgcaacgacgacggcgcggcggtgatgaggctgttcatggggtcccgcttctgcctgcagccgcgcggggacagcttcacgcggcggtccctgttcgactgcatggtggccggcgccgtgccggtgctgttctggcggaggacggcgtacgacgcgtaccggtggttcctgccgcgcggcgaggagggggagtggtcggtgttcatcgaccggcgggcgctgcgggtgggcaacgtgagcgtgcgggacgtgctggaagggtacagcgagcggcgggtgcggcggatgcgggagcgcgtggtggagatgatacccaggctggtgtacggctcgtcgcccgacggcctcggcgacggcatggacgacgcgcttgacgtcgctctcggcggcgtcctcaagcggttccgccaccgccggtggagcattgggcatgaagagcgcccgcctgggcgtttggtcgctggggcaccaccacggcgtggcagcagcaaaacgacgacgcctccaacttctaacgggagaaacggatcggtgattgggcagcgtgcgtcgcggcacagatcaacggcggcgtcctcggcgtacataaaaaccgtcctatcggaagcaccggcatcaagaagcaaaagcttgcagcaatcttga

SEQ ID NO: 4046 - protein, 556 aa, Oryza sativa
MPESPTSPPTSPLPGSPTNNATPPSPVSAFLRATVLFAAFLALQLVLFKSLLTFPSSRFLPAPRRSNSTWANGAVDDAEECKAGLIYVYDLPPEFNHDLVAHCDRLWPWYSFCPYLSNGGLGRPAAEVPALSAVVPNASLPNWYNTDQFPLEVIVHRRLLSHRCRTIDASLATAFYVPFYAGLDVGSHLWGPNSTVADRDRAGARLLRWLRGQPFFAKSGGWDHFITLGRITWDFRRYGADGWGTNLVLMPGMENVTRLVIEGDRLDPLDVGVPYPTGFHPRRAADVRAWQEHVLSLDRRNLFGFAGAPRSGFPDDFRDVLLEECEDAGSDRCRAVDCRGTRCNDDGAAVMRLFMGSRFCLQPRGDSFTRRSLFDCMVAGAVPVLFWRRTAYDAYRWFLPRGEEGEWSVFIDRRALRVGNVSVRDVLEGYSERRVRRMRERVVEMIPRLVYGSSPDGLGDGMDDALDVALGGVLKRFRHRRWSIGHEERPPGRLVAGAPPRRGSSKTTTPPTSNGRNGSVIGQRASRHRSTAASSAYIKTVLSEAPASRSKSLQQS

SEQ ID NO: 4047 - DNA, 1521 bp, Oryza sativa
  CDS (1)..(1521)
atggcggcgagtgtcgtgtccgacaagtccagcggcggagcgagcttgctccggccgtcgcgggtcttgttcctcgccgtgctctcgacggcgttctggtcggtgatattctacgcgcaccactccgccgtgcaaggtaacgcgaccatggcgtccgtcttgctccggccgtcgtcgttctcccgcccgctgctgacgtcgttccggctcatcggcggcgggcttgaccggtgcgccggccggcgggtgtacatgtacgagctcccgccgcggttcaacgccgagctcgtccgcgactgcaggctgtactcgaggtccatggacgtgtgcaagctcgtcgtgaacgacgggttcggcccggcgctccccggcggaggcgcgctgccggagcgggacgtgtacgacaccgaccagtacatgctggcgctgatctaccacgcgcggatgcggcggtacgagtgcctcaccggcgacgcggccgccgccgacgcggtgttcgtcccgttctacgccgggttcgacgcggcgatgaacctgatgaagagcgacctcgcggcgcgcgacgcgctgccgcggcagctcgccgagtggctggtgcggcggccggagtggcgcgccatgggcgggcgcgaccacttcatggtcgccgcgcgccccgtctgggacttctaccgcggcggcgacgacgggtggggcaacgcgctgctcacctacccggcgatccgcaacacgacggtgctcaccgtcgaggccaacccgtggaggggcatcgactttggcgtgccgttcccgtcccacttccacccgacctccgacgccgacgtgctccggtggcaggaccggatgcggcggcgcggccgccggtggctctgggcgttcgccggcgcgccgcggcccgggagcaccaagacggtgcgcgcccagatcatcgagcagtgcaccgcgtcgccgtcctgcacccacttcgggagctcgccggggcactacaactcgccggggcggatcatggagctcctcgagtccgccgcgttctgcgtccagccgcgcggcgactcctacacccgcaagtcgacgttcgactccatgctcgccggctgcatcccggtgttcctccacccggcgtcggcgtacacccagtacacgtggcacctgccgagggactaccggagctactcggtgttcgtcccccacaccgacgtcgtcgccggcggccggaacgcgagcatcgaggcggcgctgaggaggatcccggcggcgacggtggcgaggatgcgggaggaggtgatccggctgatcccgaggatcacgtacagggaccccgcggcgacgctggtgacgttccgggacgcgttcgacgtcgccgtcgacgccgtgctcgaccgcgtggcgaggcggcggcgcgccgccgccgaggggagggagtacgtggacgtgttcgacgggcacgacagctggaagcacaacctgctcgacgacggacagacgcagatcggcccgcacgagtttgatccatacctgtag

SEQ ID NO: 4048 - protein, 506 aa, Oryza sativa
MAASVVSDKSSGGASLLRPSRVLFLAVLSTAFWSVIFYAHHSAVQGNATMASVLLRPSSFSRPLLTSFRLIGGGLDRCAGRRVYMYELPPRFNAELVRDCRLYSRSMDVCKLVVNDGFGPALPGGGALPERDVYDTDQYMLALIYHARMRRYECLTGDAAAADAVFVPFYAGFDAAMNLMKSDLAARDALPRQLAEWLVRRPEWRAMGGRDHFMVAARPVWDFYRGGDDGWGNALLTYPAIRNTTVLTVEANPWRGIDFGVPFPSHFHPTSDADVLRWQDRMRRRGRRWLWAFAGAPRPGSTKTVRAQIIEQCTASPSCTHFGSSPGHYNSPGRIMELLESAAFCVQPRGDSYTRKSTFDSMLAGCIPVFLHPASAYTQYTWHLPRDYRSYSVFVPHTDVVAGGRNASIEAALRRIPAATVARMREEVIRLIPRITYRDPAATLVTFRDAFDVAVDAVLDRVARRRRAAAEGREYVDVFDGHDSWKHNLLDDGQTQIGPHEFDPYL

SEQ ID NO: 4049 - DNA, 1407 bp, Oryza sativa
  CDS (1)..(1407)
atggccatcctctccgccgtcttctggttcttggtcttctccctcctctccggcatgccgggcggcggcgacctgtcgtccgtgctgttcaggccgtcgtcgctgtcgctcccgctcctgaacagcttcacgttcgaccagaacccttcgccggagcagcagccgccgccggcgccggcgccggcggaggatcgctgcgccgggaggtacatctacatgtacgacatgccggcgaggttcaacgaggagctcctccgcgactgccgcgcgctccggccgtggacggcggaggggatgtgccggtacgtggcgaacggcgggatgggcgagccgatgggcggcgatggcggcggcatattctccgagcgcggctggttcgacaccgaccagttcgtgctcgacatcatcttccatgggaggatgaagcggtacggctgcctgaccggcgaccccgccgccgccgccgcggtgttcgtcccgttctacggcagctgcgacctcgggaggcacatcttccaccggaacgcgtcggtgaaggacgcgctctccgaggacctcgtcgggtggctcacgcggcggtcggagtggcgcgccatgggcggccgcgaccacttcttcgtcgccggccgcaccacctgggacttccggcgagaacgcgacgagggctgggagtgggggagcaagctgctcaactaccccgccgtccagaacatgacggcgatcctcgtcgaggcgagcccgtggagccggaacaacctcgccgtcccatacccgacctacttccacccggagaccgccgccgacgtcgccgcgtggcagcgccgcgtgcgcgcggcggcgcggccgtggctcttctccttcgccggcgggccgcgcaagggcaacggcaccatccgcgccgacatcatccggcagtgcggcgcgtcgagccgctgcaacctcttccactgccacggcgcggcggcgagcgggtgcaacgcccccggcgccgtcatgcgcgtgttcgagagctcccgcttctgcctcgagccacggggggacaccatgacgcggcgctcgacgttcgacgccatcctcgccggctgcatcccggtgttcttccaccccgggtcggcctacacccagtacacgctgcacctcccgccggaacgcggcgggtggtcggtgctcatcccccacgccgacgtgaccggccggaacgtgagcatcgaggagacgctggcggcgatctcgccggagaaggtgaggagcatgcgggaggaggtgatccggctcatcccgacggtggtgtacgccgacacgaggtcgagccgcgtcgacttcagggacgcgttcgacgtcgccgtcgacgccgtcgtcggccgggtggcgaggcggcggcgcgacgagcccgacgcccggaggtga

SEQ ID NO: 4050 - protein, 468 aa, Oryza sativa
MAILSAVFWFLVFSLLSGMPGGGDLSSVLFRPSSLSLPLLNSFTFDQNPSPEQQPPPAPAPAEDRCAGRYIYMYDMPARFNEELLRDCRALRPWTAEGMCRYVANGGMGEPMGGDGGGIFSERGWFDTDQFVLDIIFHGRMKRYGCLTGDPAAAAAVFVPFYGSCDLGRHIFHRNASVKDALSEDLVGWLTRRSEWRAMGGRDHFFVAGRTTWDFRRERDEGWEWGSKLLNYPAVQNMTAILVEASPWSRNNLAVPYPTYFHPETAADVAAWQRRVRAAARPWLFSFAGGPRKGNGTIRADIIRQCGASSRCNLFHCHGAAASGCNAPGAVMRVFESSRFCLEPRGDTMTRRSTFDAILAGCIPVFFHPGSAYTQYTLHLPPERGGWSVLIPHADVTGRNVSIEETLAAISPEKVRSMREEVIRLIPTVVYADTRSSRVDFRDAFDVAVDAVVGRVARRRRDEPDARR

SEQ ID NO: 4051 - DNA, 1776 bp, Oryza sativa
  CDS (1)..(1776)
atgaagcggcacaacgcggcggaggtgccggtgccggtgagctacggcggcgagcgggatgagaagaccggaagcaaggtggataagatgggtggtggagcggctaggcggtggcggagcggcggctgctgctcccgcctctggctcgtgctcgtcgtgttcgccaccgtcacgatgctgctgcgccaccgctacgactccggcctcggccatggtgccgccgccgtggtgcgcatcgagccggtgcaccggaaggtgaagccagccgatcgcggcggcgccaggccgtcgttctccgattccggcagcgcgaagccggtcaccgtcgaccacaagtcggcgacgaccgattcttctaccggaacggagtctgacggtggaggcgagccatcgtcggcgtcatcttcgctgccggcggcggcgcacccgttctcgcgcgcgctcgcggcggcgggcgacaagggcgaccggtgcggcgggcggtacgtgtacgtgcaggagctgcctccgcggttcaacaccgacatggtcaagaactgcgtggctctgttcccgtggaaagacatgtgcaagttcacggcgaacggcggcttcggcccgccgatgagcggcggcggcggcatgttccaggagaccgggtggtacaactccgacaagtacacggtggacatcatcttccacgagcggatgaggcggtacgagtgcctcaccgacgacccctccctggccgccgccgtgtacgtgccgttcttcgccggcctcgaggtgtggcgccacctctgggggttcaacgccaccgcgcgggacgccatggcgctggaggtggtggacatcatcacgtcgcggcccgagtggcgcgccatgggaggccgcgaccacttcttcaccgccggcctcatcacgtgggacttccggaggctggccgacggcgacgccggctgggggagcaagctgttcagccttccggcgataaagaacatgacggcgctcgtggtggaggcgagcccgtggcacctcaacgacgccgccatcccgttcccgacggcgttccacccggcgagcgacgaggccgtgttcgtctggcaggacaaggtccgccgcctcgagcgcccatggctcttctccttcgccggcgcggcgcgcccgggcagcgccaagtcgatccgttccgagctcatcacgcagtgcagggcgtcgagcgcgtgctcactcatggagtgccgcgacgggccgagcaacaagtgcggctcggcggcgagctacatgagactcttccagagctccaccttctgcctccagccgcagggcgactcgtacacgcgcaagtcggcgttcgacgccatgctcgccggctgcatcccggtgttcttccaccccggcacggcgtacgtccagtacacctggcacctgcccaggaaccacgccgactactccgtctacatctccgaggacgacgtgcgccgcaacgccagcatcgaggagcggctgcggcggatcgcgccggccgccgtggagcggatgagggagacggtcatctcgctcatcccgacggtggtgtacgcgcagccgtcgtcgaggctggacacgatgaaggacgcgttcgacgtggcggtggacgccatcgtcgacaaggtgacgaggctgcggcgcgacatcgtcgacggccgcggcgaggaggagaagctggagatgtacagctggaagtatccattgctgcgagaagggcagaaggtcgaggacccccatgagtgggattcattgttcgcgttcgcctag

SEQ ID NO: 4052 - protein, 591 aa, Oryza sativa
MKRHNAAEVPVPVSYGGERDEKTGSKVDKMGGGAARRWRSGGCCSRLWLVLVVFATVTMLLRHRYDSGLGHGAAAVVRIEPVHRKVKPADRGGARPSFSDSGSAKPVTVDHKSATTDSSTGTESDGGGEPSSASSSLPAAAHPFSRALAAAGDKGDRCGGRYVYVQELPPRFNTDMVKNCVALFPWKDMCKFTANGGFGPPMSGGGGMFQETGWYNSDKYTVDIIFHERMRRYECLTDDPSLAAAVYVPFFAGLEVWRHLWGFNATARDAMALEVVDIITSRPEWRAMGGRDHFFTAGLITWDFRRLADGDAGWGSKLFSLPAIKNMTALVVEASPWHLNDAAIPFPTAFHPASDEAVFVWQDKVRRLERPWLFSFAGAARPGSAKSIRSELITQCRASSACSLMECRDGPSNKCGSAASYMRLFQSSTFCLQPQGDSYTRKSAFDAMLAGCIPVFFHPGTAYVQYTWHLPRNHADYSVYISEDDVRRNASIEERLRRIAPAAVERMRETVISLIPTVVYAQPSSRLDTMKDAFDVAVDAIVDKVTRLRRDIVDGRGEEEKLEMYSWKYPLLREGQKVEDPHEWDSLFAFA

SEQ ID NO: 4053 - DNA, 1863 bp, Oryza sativa
  CDS (1)..(1863)
atgaagcggcacaacacggcggaggtgccggtgccggtgagctacggcggcaaggtggagaagacgatgggtggggctaagcaggggcgcggcggcggcggcggctgctgctcccgcctctggttcatggtcgttctctccgccaccgtgacgctgctggtgcgccactgctacgactccggcgtgatcggccacggcgccgccgccggcggcgtggtgcgcatcgagccggtgcaccgtggtttgtaccacactcggaaggcgagcccggtggatcgcggcggcggcggcggcggcacgtcgttctctggccattcgccgtcgccgcccgacgccggcggcagcgcgaagccggagtctccgcacgacagcggcgtcaaggcgccgtcggagctgaccaccgtcgagcacaccaagcagccgtccgagccagcttctaccggcacggagtcggatgatggaggcaagccatcgtcggcgtcgtcatcctcgctgccggcggcggcgcacccgttcgcgcgcgcgctcgcggcggcgggcgacaagggcgaccggtgcggcgggcggtacgtgtacgtgcaggagctgccaccgcggttcaacaccgacatggtaaagaactgcgcgacgctgttcccgtggacggacatgtgcgcgttcacggcgaacggcggcttcggcccgcagatgagcggcggcgacggcggcgtgttccaggagaccgggtggtacaactccgaccagtacacggtggacatcatcttccacgaccggatcaggcggtacgagtgcctcaccgacgacccctccctcgccgccgccgtgtacgtgccgttcttcgccggcctcgaggtggcgcgccacctctgggggttcaacgtcaccacccgggacgccatggcgctggaggtggtggacatcatcacgtcgcggtccgagtggcgcgccatgggaggccgcgaccacttcttcaccgccggccgcaccacgtgggacttccggaggctgaacgacggcgacgccggctggggcagcaagctgttcagccttccggcgatcaagaacatgacggcgctcgtggtggaggcgagcccgtggcacctcaacgacgccgccatcccgttcccgactgcgttccacccggcgagcgacgaggccgtgttcgtctggcaggacaaggtccgccgcctcgagcgcccatggctcttctccttcgccggcgcggcgcgcccgggcagcgccaagtccatccgttccgagctcatcgcgcagtgcagggcgtcgagcgtgtgctccctgatggagtgcgccgacgggccgagcaacaagtgcggctcgccggcgagctacatgaggctgttccagagctccaccttctgcctccagccgcagggcgactcgtacacgcgcaagtcggcgttcgacgccatgctcgccggctgcatcccggtgttcttccaccccggcacggcgtacgtccagtacacctggcacctgcccaggaaccacgccgactactccgtctacatctccgaggacgacgtgcgccgcaacgccagcatcgaggagcggctgcggcggatcgcgccggccgccgtggagcggatgagggagacggtcatctcgctcatcccgacggtggtgtacgcgcagccgtcgtcgaggctggacacgatgaaggacgcgttcgacgtggcggtggacgccatcgtcgacaaggtgacgaggctgcggcgcgacatcgtcgacggccgcggcgaggaggagaagctggagatgtacagctggaagtatccattgctgcgagaagggcagaaggtcgaggacccccatgagtgggatccattgttcgcgttcggttag

SEQ ID NO: 4054 - protein, 620 aa, Oryza sativa
MKRHNTAEVPVPVSYGGKVEKTMGGAKQGRGGGGGCCSRLWFMVVLSATVTLLVRHCYDSGVIGHGAAAGGVVRIEPVHRGLYHTRKASPVDRGGGGGGTSFSGHSPSPPDAGGSAKPESPHDSGVKAPSELTTVEHTKQPSEPASTGTESDDGGKPSSASSSSLPAAAHPFARALAAAGDKGDRCGGRYVYVQELPPRFNTDMVKNCATLFPWTDMCAFTANGGFGPQMSGGDGGVFQETGWYNSDQYTVDIIFHDRIRRYECLTDDPSLAAAVYVPFFAGLEVARHLWGFNVTTRDAMALEVVDIITSRSEWRAMGGRDHFFTAGRTTWDFRRLNDGDAGWGSKLFSLPAIKNMTALVVEASPWHLNDAAIPFPTAFHPASDEAVFVWQDKVRRLERPWLFSFAGAARPGSAKSIRSELIAQCRASSVCSLMECADGPSNKCGSPASYMRLFQSSTFCLQPQGDSYTRKSAFDAMLAGCIPVFFHPGTAYVQYTWHLPRNHADYSVYISEDDVRRNASIEERLRRIAPAAVERMRETVISLIPTVVYAQPSSRLDTMKDAFDVAVDAIVDKVTRLRRDIVDGRGEEEKLEMYSWKYPLLREGQKVEDPHEWDPLFAFG

SEQ ID NO: 4055 - DNA, 1584 bp, Oryza sativa
  CDS (1)..(1584)
atggaggccaactaccccaagtatgtcctctatgggctcctcatcgtcggctcatggctgctctcctgcctcctccatttccaggtcttccacctctcgctcttcccctacccctcctacctgctgtcgcgccgcgtcgtcctcccgctggcgctcaacgccagattcctccctcctcggcccgatgttgccggcgacgacgatggcggcatcgtgaggaggcgctcgtcgtcgccggcgaaggctgcggcggaggcgtcgtgcgatgggcggtatgtgtatgtgctggaggtgccacggcggtttcagatgctcaccgagtgcgtcgaggggccgaaggtgttcgacgacccgtaccatgtctgtgtcgtcatgtccaactccggcctcggccccgtcatccctcccgccgccgccggcaacgccaccgtcgacggcgacatcattcccaacaccggatggtataacacggaccagtacgcgctggaggtgatcttccacaatcggatgcggcggtacgagtgcctcaccagcgacatggcggcggcgacggcggtgtacgtggcgttctacccggcgctggagctgaaccggcacaagtgcgggtcgagcgccacggagaggaacgagccgcccagggagttcctccggtggctgacgtcgcagccgtcgtgggcggcgctcggcgggcgcgaccacttcatggtcgccgcgcgcaccacgtggatgttccggcggggcggcgccggcgactccctcggctgcggcaacggcttcctctcccggccggagtccggcaacatgacggtgctcacctacgagtccaacatctgggagcgccgcgacttcgccgtgccgtacccgagctacttccacccgtcgtcggcgcgcgaggtgtcggcgtggcaggccacggcgcgcgccgcgcgccgcccatggctgttcgcgttcgccggcgcgcgccgcgccaacggcacgctcgccatccgcgaccacatcatcgacgagtgcaccgcctcgccgccggggcggtgcggcatgctcgactgcagccacggcctcgagggcagcatcacctgccgctcgccgcgccgcctcgtcgcgctcttcgcctccgcccgcttctgcctccagcctcccggcgactccttcatgcgccgctcctccatcgacaccgtcctcgccggctgcatcccggtgttcttccacgaggcctccacgttcaagaagcagtaccaatggcacgagcgcgacgccgacgccgacaacgacaacgccaccgttgatcgccggcgatactccgtagtcatcgaccccgatgatgtcgtcgaaggccgggtgcgcatcgaggaggtgttgaggaggttcagcgacgacgaggtggccgccatgagagaggaggtgatcaggatgatccctaggttcgtgtacaaggaccctagggtgagattcgagggcgacatgagggacgccttcgacatcaccttcgacgagatcatggcgaggatgaggaggatcaagaatggcgagatcttgggatggaagctagatggtgacgacgatgtggttgcaaaagattcatga

SEQ ID NO: 4056 - protein, 527 aa, Oryza sativa
MEANYPKYVLYGLLIVGSWLLSCLLHFQVFHLSLFPYPSYLLSRRVVLPLALNARFLPPRPDVAGDDDGGIVRRRSSSPAKAAAEASCDGRYVYVLEVPRRFQMLTECVEGPKVFDDPYHVCVVMSNSGLGPVIPPAAAGNATVDGDIIPNTGWYNTDQYALEVIFHNRMRRYECLTSDMAAATAVYVAFYPALELNRHKCGSSATERNEPPREFLRWLTSQPSWAALGGRDHFMVAARTTWMFRRGGAGDSLGCGNGFLSRPESGNMTVLTYESNIWERRDFAVPYPSYFHPSSAREVSAWQATARAARRPWLFAFAGARRANGTLAIRDHIIDECTASPPGRCGMLDCSHGLEGSITCRSPRRLVALFASARFCLQPPGDSFMRRSSIDTVLAGCIPVFFHEASTFKKQYQWHERDADADNDNATVDRRRYSVVIDPDDVVEGRVRIEEVLRRFSDDEVAAMREEVIRMIPRFVYKDPRVRFEGDMRDAFDITFDEIMARMRRIKNGEILGWKLDGDDDVVAKDS

SEQ ID NO: 4057 - DNA, 1581 bp, Oryza sativa
  CDS (1)..(1581)
atggatggctcgcatggatcggcggcggcgctccgggcgacggggcggtgcctcgcgccgctgatcatcccggcgtcctgcgtcgtgtgggtgctcttcttcttcccctcgccgtcgccggacgtcgccgtccgccgcgacggcttcctcccggccgtcacattgccggtgcaacgcgccggcgacacgccgccaccgccgccgatcattgacgcgtcacctccaccaccgtcgacgtcgccgccgccgccgccgccgcgtcgagggcgtccggcgaggagggacaggtgcgccgggaggtacgtgtacatgcacgagctgccgagccggttcaactccgacctcctccgcgactgccggacgctgtcggagtggacggacatgtgccgccacgtcgccaacggcgggatcgggccgcggctgccgccggcggcgcgcggcggcgtgctcccggcgaccgggtggtacgacaccaaccagttcaccctcgaggtgatcttccacgcgcggatgaggcggtacggctgcctcaccgccgacgcgtcgcgcgccgccgcggtgtacgtgccctactacccgggcctcgacgtcggccgctacctgtgggggttcagcaacggcgtccgcgacctgctcgccgaggacctcgccgagtggctccgcgggacgccggcgtgggcggcgcacggcgggcgcgaccacttcctcgtcggcggccgcatcgcgtgggacttccgccgcgaggacggcggcggcgaggggagccagtgggggagccgcctcctcctcctcccggaggcgatgaacatgacggcgctcgtcatcgaggcgagcccgtggcaccgccgcaccgacgtcgccgtgccgtacccgacctacttccacccgtggcgcccctccgacgtgtcgtcctggcagcgcgacgcgcgccgcgcgcgccgcccgtggctgttcgcgttcgccggcgccgggcgtggcaacggcgacgaccacgaccgacaccacggcggcggcgtcgtgcgcgaccgcgtcatcgcccagtgcgcgcggtcgcggcggtgcgggctgctccggtgcggggcgcgcgggaggcgcgacgactgctacgacccggggaacgtgatgcggctgttcaagagcgctgccttctgcctccagccgcggggggactcgtacacgcggcggtcggtgttcgacgccatcctcgccggctgcgtgccggtgttcttccacccgggctccgcctacacccagtaccggtggcacctgccgcgggaccacgccgcctactcggtgttcgtcccggaggacggcgtgcgcaacggcacggtgaggctggaggacgtgctccggcgggtgagcgcggcgagggtggcggcgatgagggagcaggtgatcaggatgatacccaccgtcgtgtacagggacccccgggcgccgtcggcccgcgggttcacggacgcaatcgacgtcgccgtcgacggcgtcatcgagagggtcaggaggatcaagcaagggctccctcccggaggcgacgacgacgacgaccaccggtgggatgcctacttcgacacgcagtga

SEQ ID NO: 4058 - protein, 526 aa, Oryza sativa
MDGSHGSAAALRATGRCLAPLIIPASCVVWVLFFFPSPSPDVAVRRDGFLPAVTLPVQRAGDTPPPPPIIDASPPPPSTSPPPPPPRRGRPARRDRCAGRYVYMHELPSRFNSDLLRDCRTLSEWTDMCRHVANGGIGPRLPPAARGGVLPATGWYDTNQFTLEVIFHARMRRYGCLTADASRAAAVYVPYYPGLDVGRYLWGFSNGVRDLLAEDLAEWLRGTPAWAAHGGRDHFLVGGRIAWDFRREDGGGEGSQWGSRLLLLPEAMNMTALVIEASPWHRRTDVAVPYPTYFHPWRPSDVSSWQRDARRARRPWLFAFAGAGRGNGDDHDRHHGGGVVRDRVIAQCARSRRCGLLRCGARGRRDDCYDPGNVMRLFKSAAFCLQPRGDSYTRRSVFDAILAGCVPVFFHPGSAYTQYRWHLPRDHAAYSVFVPEDGVRNGTVRLEDVLRRVSAARVAAMREQVIRMIPTVVYRDPRAPSARGFTDAIDVAVDGVIERVRRIKQGLPPGGDDDDDHRWDAYFDTQ

SEQ ID NO: 4059 - DNA, 2442 bp, Zea mays
  CDS (311)..(2128)
gcgctccgcctccgtcgtccggagcgcccgcgtaaagccaaacaccaaaacctcccttttcccccgttccgttccgttccgtcccgtcccgtcccccactcctcctccaaccccggtctcgcgcgatccgccgatccggtttccccgcgcccggccgcccgtcccgatcccgccgctgtttcggcggcccggttccgccctccgtccgtcgccttgcggcggcctggcgttgatgtggcgtggcacggggcccgtgcttcggttttgagagctacccgtgtcggtgcggagaggcccggggcggtcttcaatgaggcggcggccggtcctgccggcccaccacgacgacgtggacaagggcggcggcaagccggcgtcgtcgcgcctctgcttcctcgccacgctctgcgccatgttctgggtcctcatcttctacttccacttcgccgtcgtctccaacgaccccgccgcctcggcggcgcagggcgccgaggctcgcattgccggcgcccacacccgcattcccgaacgcgacggcgcgtctcgcgtcgacgttcccctcgccttcgcctcggagccgcctccgccgccgcctcctcctcctcctcctcctgccgcgcggcccaaggaggcggaggacgaggttgccgccggagtccgccgggaggaggcgccgcccgaggtcgcggcgccgtacccgttcgagcgggcgctcaggacggcggagaaccagagcgacccctgcggcggccggtacatctacgtgcacgacctgccgccgcggttcaacgaggacatgctccgggactgcgagaagctcagcgtctggaccaacatgtgcaggttcatgagcaacgacgggctcggcccgccgctgggcaacgaggagggcgtgttctccgacaccggctggtatggcaccaaccagttctccgtggatgtcatcttcggcaacaggatgaagcagtacgagtgcctgaccaaggactcgtccgttgccgcggcggtgttcgtgccgttctacgctgggttcgatgtggcaaggtatctctggggctataatatcacgacgagggatgcggcgtcgcttgatttggtggagtggctgatgaacaagcccgagtggagcgtgatgggtgggcgggaccatttcctggttgccgggaggatcacctgggatttcaggaggttgacggaggaggaagcagattggggcagcaagctgcttttcttgccggctgcaaagaacatgtcgatgctcgtggtggagtcgagcccgtggaattcaaatgattttggaataccatatcctacgtacttccacccggccaaggacgctgaggttttcctttggcaggataggatgaggagcttggaacgcccatggctgttctcgtttgcaggcgctccacgtcctggtgatccaatgtccatcagagggcagctcatcgatcaatgcaggagctcaagcctttgtaaattgttggagtgtgaccttggggagagcaagtgccactccccgagcacaatcatgaagatgttccagagttctatgttctgtttgcagccccagggtgactcctacacaagaagatctgcctttgactcgatgttggctggctgcgtgcctgttttcttccatcccggttcagcgtacgtccagtatacatggcatctcccaaagaactatacaacgtactctgtattcatccctgaagatgacatccgttctggaaatgccagcattgaggagaggctaaagagtattcacccagatgtggtcaagcaaatgagagaggaggtcatcaatctgataccaaaggtgatatatgccgatccaagatcgaaactggagacattgaaagatgcatttgatgtttccatagaggcgatcattaacaaagtgacaaagttgagaagagatatcatcgcaggccaagaagacaaagattttatcgaagagaatagctggaagtatagtctgttagacgatggacagcaggcaattggacctcacaaatgggatccattcttctcgaagcctaaagataaaggtggagattctagtggttcatctgcagaagctgccaagaattcttggaaaagtgaacagagaggacaggattgaaccatgagttggtcgtctttgggatgagatcaagggagtagagttagctatactctctgaagatgctctgatgcatataggttgcacatagatcaagatccagtagttatggtgatcatgaacatcattgatgatctatgtcaccctgcagttgtatgaagccattccaccaaaaatgctttgggggaaatttggaagacagcctttgcgtaccccctatgaatactatttttcacactaattttgctgtttctgctcaataatcctttgtaaacccttacagaatttagaggtatatcaaattttgtttatgt

SEQ ID NO: 4060 - protein, 605 aa, Zea mays
MRRRPVLPAHHDDVDKGGGKPASSRLCFLATLCAMFWVLIFYFHFAVVSNDPAASAAQGAEARIAGAHTRIPERDGASRVDVPLAFASEPPPPPPPPPPPPAARPKEAEDEVAAGVRREEAPPEVAAPYPFERALRTAENQSDPCGGRYIYVHDLPPRFNEDMLRDCEKLSVWTNMCRFMSNDGLGPPLGNEEGVFSDTGWYGTNQFSVDVIFGNRMKQYECLTKDSSVAAAVFVPFYAGFDVARYLWGYNITTRDAASLDLVEWLMNKPEWSVMGGRDHFLVAGRITWDFRRLTEEEADWGSKLLFLPAAKNMSMLVVESSPWNSNDFGIPYPTYFHPAKDAEVFLWQDRMRSLERPWLFSFAGAPRPGDPMSIRGQLIDQCRSSSLCKLLECDLGESKCHSPSTIMKMFQSSMFCLQPQGDSYTRRSAFDSMLAGCVPVFFHPGSAYVQYTWHLPKNYTTYSVFIPEDDIRSGNASIEERLKSIHPDVVKQMREEVINLIPKVIYADPRSKLETLKDAFDVSIEAIINKVTKLRRDIIAGQEDKDFIEENSWKYSLLDDGQQAIGPHKWDPFFSKPKDKGGDSSGSSAEAAKNSWKSEQRGQD

SEQ ID NO: 4061 - DNA, 1818 bp, Zea mays
  CDS (1)..(1818)
atgaggcggcggccggtcctgccggcccaccacgacgacgtggacaagggcggcggcaagccggcgtcgtcgcgcctctgcttcctcgccacgctctgcgccatgttctgggtcctcatcttctacttccacttcgccgtcgtctccaacgaccccgccgcctcggcggcgcagggcgccgaggctcgcattgccggcgcccacacccgcattcccgaacgcgacggcgcgtcccgcgtcgacgttcccctcgccttcgcctcggagccgccgccgccgccgccacctcctcctcctcctcctgccgcgcggcccaaggaggcggaggacgaggtcgccgccggagtccgccgggaggaggcgccgcccgaggtcgcggcgccgtacccgttcgagcgggcgctcaggacggcggagaaccagagcgacccctgcggcggccggtacatctacgtgcacgacctgccgccgcggttcaacgaggacatgctccgggactgcgagaagctcagcgtctggaccaacatgtgcaggttcatgagcaacgacgggctcggcccgccgctgggcaacgaggagggcgtgttctccgacaccggctggtatggcaccaaccagttctccgtggatgtcatcttcggcaacaggatgaagcagtacgagtgcctgaccaaggactcgtccgttgccgcggcggtgttcgtgcccttctacgctgggttcgatgtggcaaggtatctctggggctataatatcacgacgagggatgcggcgtcgcttgatttggtggagtggctgatgaacaagcccgagtggagcgtgatgggtgggcgggaccatttcctggttgccgggaggatcacctgggatttcaggaggttgacggaggaggaagcagattggggcagcaagctgcttttcttgccggctgcaaagaacatgtcgatgctcgtggtggagtcgagcccgtggaattcaaatgattttggaataccatatcctacgtacttccacccggccaaggacgctgaggttttcctttggcaggataggatgaggagcttggaacgcccatggctgttctcgtttgcaggcgctccacgtcctggtgatccaatgtccatcagagggcagctcatcgatcaatgcaggagctcaagcctttgtaaattgttggagtgtgaccttggggagagcaagtgccactccccgagcacaatcatgaagatgttccagagttctatgttctgtttgcagccccagggtgactcctacacaagaagatctgcctttgactccatgttggctggctgcgtgcctgttttcttccatcccggttcagcgtacgtccagtatacatggcatctcccaaagaactatacaacgtactctgtattcatccctgaagatgacatccgttctggaaatgccagcattgaggagaggctaaagagtattcacccagatgtggtcaagcaaatgagagaggaggtcatcaatctgataccaaaggtgatatatgccgatccaagatcgaaactggagacattgaaagatgcatttgatgtttccatagaggcgatcattaacaaagtgacaaagttgagaagagatatcatcgcaggccaagaagacaaagattttatcgaagagaatagctggaagtatagtctgttagacgatggacagcagacaattggacctcacaaatgggatccattcttctcgaagcctaaagataaaggtggagattctagtggttcatctgcagaagctgccaagaattcttggaaaagtgaacaaagaggacaggattga

SEQ ID NO: 4062 - protein, 605 aa, Zea mays
MRRRPVLPAHHDDVDKGGGKPASSRLCFLATLCAMFWVLIFYFHFAVVSNDPAASAAQGAEARIAGAHTRIPERDGASRVDVPLAFASEPPPPPPPPPPPPAARPKEAEDEVAAGVRREEAPPEVAAPYPFERALRTAENQSDPCGGRYIYVHDLPPRFNEDMLRDCEKLSVWTNMCRFMSNDGLGPPLGNEEGVFSDTGWYGTNQFSVDVIFGNRMKQYECLTKDSSVAAAVFVPFYAGFDVARYLWGYNITTRDAASLDLVEWLMNKPEWSVMGGRDHFLVAGRITWDFRRLTEEEADWGSKLLFLPAAKNMSMLVVESSPWNSNDFGIPYPTYFHPAKDAEVFLWQDRMRSLERPWLFSFAGAPRPGDPMSIRGQLIDQCRSSSLCKLLECDLGESKCHSPSTIMKMFQSSMFCLQPQGDSYTRRSAFDSMLAGCVPVFFHPGSAYVQYTWHLPKNYTTYSVFIPEDDIRSGNASIEERLKSIHPDVVKQMREEVINLIPKVIYADPRSKLETLKDAFDVSIEAIINKVTKLRRDIIAGQEDKDFIEENSWKYSLLDDGQQTIGPHKWDPFFSKPKDKGGDSSGSSAEAAKNSWKSEQRGQD

SEQ ID NO: 4063 - DNA, 21 bp, Artificial sequence
  primer
atgtttccaagggtttctatg

SEQ ID NO: 4064 - DNA, 21 bp, Artificial sequence
  primer
tcactgtgtcttatctctctg

SEQ ID NO: 4065 - protein, 577 aa, Artificial sequence
  consensus sequence
  Variant (2)..(7): Xaa in position 2 to 7 is any amino acid
  Variant (9)..(32): Xaa in position 9 to 32 is any amino acid
  Variant (33)..(138): Xaa in position 33 to 138 is any or no amino acid
  Variant (140)..(140): Xaa in position 140 is any amino acid
  Variant (142)..(142): Xaa in position 142 is any amino acid
  Variant (146)..(146): Xaa in position 146 is any amino acid
  Variant (149)..(150): Xaa in position 149 to 150 is any amino acid
  Variant (153)..(153): Xaa in position 153 is any amino acid
  Variant (157)..(157): Xaa in position 157 is any amino acid
  Variant (159)..(162): Xaa in position 159 to 162 is any amino acid
  Variant (164)..(167): Xaa in position 164 to 167 is any amino acid
  Variant (168)..(169): Xaa in position 168 to 169 is any or no amino acid
  Variant (171)..(172): Xaa in position 171 to 172 is any amino acid
  Variant (173)..(175): Xaa in position 173 to 175 is any or no amino acid
  Variant (178)..(181): Xaa in position 178 to 181 is any amino acid
  Variant (183)..(183): Xaa in position 183 is any amino acid
  Variant (185)..(185): Xaa in position 185 is any amino acid
  Variant (187)..(192): Xaa in position 187 to 192 is any amino acid
  Variant (193)..(194): Xaa in position 193 to 194 is any or no amino acid
  Variant (196)..(200): Xaa in position 196 to 200 is any amino acid
  Variant (201)..(207): Xaa in position 201 to 207 is any or no amino acid
  Variant (211)..(213): Xaa in position 211 to 213 is any amino acid
  Variant (215)..(219): Xaa in position 215 to 219 is any amino acid
  Variant (222)..(223): Xaa in position 222 to 223 is any amino acid
  Variant (225)..(227): Xaa in position 225 to 227 is any amino acid
  Variant (229)..(229): Xaa in position 229 is any amino acid
  Variant (233)..(233): Xaa in position 233 is any amino acid
  Variant (235)..(237): Xaa in position 235 to 237 is any amino acid
  Variant (239)..(239): Xaa in position 239 is any amino acid
  Variant (241)..(242): Xaa in position 241 to 242 is any amino acid
  Variant (249)..(252): Xaa in position 249 to 252 is any amino acid
  Variant (254)..(254): Xaa in position 254 is any amino acid
  Variant (258)..(258): Xaa in position 258 is any amino acid
  Variant (260)..(262): Xaa in position 260 to 262 is any amino acid
  Variant (263)..(264): Xaa in position 263 to 264 is any or no amino acid
  Variant (268)..(274): Xaa in position 268 to 274 is any amino acid
  Variant (277)..(279): Xaa in position 277 to 279 is any amino acid
  Variant (283)..(284): Xaa in position 283 to 284 is any amino acid
  Variant (286)..(286): Xaa in position 286 is any amino acid
  Variant (288)..(288): Xaa in position 288 is any amino acid
  Variant (292)..(294): Xaa in position 292 to 294 is any amino acid
  Variant (297)..(298): Xaa in position 297 to 298 is any amino acid
  Variant (304)..(308): Xaa in position 304 to 308 is any amino acid
  Variant (309)..(312): Xaa in position 309 to 312 is any or no amino acid
  Variant (315)..(316): Xaa in position 315 to 316 is any amino acid
  Variant (318)..(320): Xaa in position 318 to 320 is any amino acid
  Variant (322)..(324): Xaa in position 322 to 324 is any amino acid
  Variant (327)..(328): Xaa in position 327 to 328 is any amino acid
  Variant (331)..(331): Xaa in position 331 is any amino acid
  Variant (333)..(334): Xaa in position 333 to 334 is any amino acid
  Variant (337)..(339): Xaa in position 337 to 339 is any amino acid
  Variant (340)..(340): Xaa in position 340 is any or no amino acid
  Variant (342)..(344): Xaa in position 342 to 344 is any amino acid
  Variant (346)..(346): Xaa in position 346 is any amino acid
  Variant (349)..(349): Xaa in position 349 is any amino acid
  Variant (353)..(357): Xaa in position 353 to 357 is any amino acid
  Variant (359)..(360): Xaa in position 359 to 360 is any amino acid
  Variant (363)..(365): Xaa in position 363 to 365 is any amino acid
  Variant (367)..(369): Xaa in position 367 to 369 is any amino acid
  Variant (371)..(371): Xaa in position 371 is any amino acid
  Variant (375)..(375): Xaa in position 375 is any amino acid
  Variant (380)..(380): Xaa in position 380 is any amino acid
  Variant (381)..(388): Xaa in position 381 to 388 is any or no amino acid
  Variant (390)..(394): Xaa in position 390 to 394 is any amino acid
  Variant (395)..(395): Xaa in position 395 is any or no amino acid
  Variant (398)..(400): Xaa in position 398 to 400 is any amino acid
  Variant (402)..(402): Xaa in position 402 is any amino acid
  Variant (405)..(406): Xaa in position 405 to 406 is any amino acid
  Variant (408)..(409): Xaa in position 408 to 409 is any amino acid
  Variant (410)..(411): Xaa in position 410 to 411 is any or no amino acid
  Variant (413)..(415): Xaa in position 413 to 415 is any amino acid
  Variant (416)..(416): Xaa in position 416 is any or no amino acid
  Variant (418)..(422): Xaa in position 418 to 422 is any amino acid
  Variant (423)..(426): Xaa in position 423 to 426 is any or no amino acid
  Variant (428)..(429): Xaa in position 428 to 429 is any amino acid
  Variant (431)..(433): Xaa in position 431 to 433 is any amino acid
  Variant (435)..(436): Xaa in position 435 to 436 is any amino acid
  Variant (438)..(441): Xaa in position 438 to 441 is any amino acid
  Variant (447)..(447): Xaa in position 447 is any amino acid
  Variant (454)..(454): Xaa in position 454 is any amino acid
  Variant (456)..(456): Xaa in position 456 is any amino acid
  Variant (459)..(459): Xaa in position 459 is any amino acid
  Variant (465)..(465): Xaa in position 465 is any amino acid
  Variant (471)..(473): Xaa in position 471 to 473 is any amino acid
  Variant (476)..(476): Xaa in position 476 is any amino acid
  Variant (477)..(477): Xaa in position 477 is any or no amino acid
  Variant (480)..(480): Xaa in position 480 is any amino acid
  Variant (485)..(489): Xaa in position 485 to 489 is any amino acid
  Variant (490)..(499): Xaa in position 490 to 499 is any or no amino acid
  Variant (503)..(503): Xaa in position 503 is any amino acid
  Variant (505)..(509): Xaa in position 505 to 509 is any amino acid
  Variant (511)..(511): Xaa in position 511 is any amino acid
  Variant (512)..(514): Xaa in position 512 to 514 is any or no amino acid
  Variant (516)..(516): Xaa in position 516 is any amino acid
  Variant (520)..(521): Xaa in position 520 to 521 is any amino acid
  Variant (523)..(524): Xaa in position 523 to 524 is any amino acid
  Variant (526)..(529): Xaa in position 526 to 529 is any amino acid
  Variant (531)..(532): Xaa in position 531 to 532 is any amino acid
  Variant (536)..(536): Xaa in position 536 is any amino acid
  Variant (539)..(539): Xaa in position 539 is any amino acid
  Variant (543)..(545): Xaa in position 543 to 545 is any amino acid
  Variant (547)..(548): Xaa in position 547 to 548 is any amino acid
  Variant (550)..(557): Xaa in position 550 to 557 is any amino acid
  Variant (558)..(559): Xaa in position 558 to 559 is any or no amino acid
  Variant (565)..(576): Xaa in position 565 to 576 is any amino acid
LXXXXXXLXXXXXXXXXXXXXXXXXXXXXXXXXXXXXXXXXXXXXXXXXXXXXXXXXXXXXXXXXXXXXXXXXXXXXXXXXXXXXXXXXXXXXXXXXXXXXXXXXXXXXXXXXXXXXXXXXXXXXXXXXXXXXXXXXXDXCXGRYXYVXXLPXRFNXDXXXXCXXXXXXWXXXXXMCXXXXNXGXGXXXXXXXXGXXXXXXXXXXXXGWYXXXQXXXXXIFXXRXXXYXCLTXDXXXAXAXXVPFYAGXXXXRXLWGXNXXXXXRDAXXXXXXXWLXXXPEWXXMXGXDHFXXXGRXXWDFRRXXXXXXXXXWGXXLXXXPXXXNMXXLVXEXXPWXXXXDXXXPXPTXFHPXXXXXVXXWQXXXRXXXRXWLFXFAGAXXXXXXXXXRXXXXXXIRXXXIXQCXXSXXXXCXXXXCXXXXXXXXXCXXPXXXMXXFXXXXFCLQPXGDSYTRXSXFDXMLAGCXPVFFHXXXAYXXQYXWHLPXXXXXXXXXXXXXXXYSVXIXXXXXRXXXXNXSIEXXLXXIXXXXVXXMREXVIXLIPXXXYXXPXXXXXXXXXXDAFDVXXXXXXXXXXXXR

SEQ ID NO: 4066 - protein, 46 aa, Artificial sequence
  protein pattern
  Variant (2)..(3): Xaa in position 2 to 3 is any amino acid
  Variant (4)..(4): Xaa in position 4 is any or no amino acid
  Variant (6)..(6): Xaa in position 6 is any amino acid
  Variant (7)..(7): Xaa in position 7 is Leu, Met or Val
  Variant (8)..(8): Xaa in position 8 is Phe or Leu
  Variant (9)..(10): Xaa in position 9 to 10 is any amino acid
  Variant (11)..(11): Xaa in position 11 is Ala, Ser or Thr
  Variant (12)..(12): Xaa in position 12 is any amino acid
  Variant (15)..(15): Xaa in position 15 is Leu or Val
  Variant (16)..(16): Xaa in position 16 is Glu or Gln
  Variant (18)..(18): Xaa in position 18 is any amino acid
  Variant (21)..(21): Xaa in position 21 is Ser or Thr
  Variant (22)..(22): Xaa in position 22 is any amino acid
  Variant (25)..(25): Xaa in position 25 is Lys or Arg
  Variant (27)..(27): Xaa in position 27 is Ala, Thr or Val
  Variant (30)..(30): Xaa in position 30 is Ala or Ser
  Variant (31)..(31): Xaa in position 31 is Ile or Met
  Variant (32)..(32): Xaa in position 32 is Leu or Val
  Variant (36)..(36): Xaa in position 36 is Ile or Val
  Variant (40)..(40): Xaa in position 40 is Phe or Leu
  Variant (42)..(42): Xaa in position 42 is Asn or Pro
  Variant (43)..(43): Xaa in position 43 is Ala or Gly
  Variant (44)..(44): Xaa in position 44 is Ser or Thr
PXXXMXXXXXXXFCXXPXGDXXTRXSXFDXXXAGCXPVFXHXXXAY

SEQ ID NO: 4067 - protein, 57 aa, Artificial sequence
  protein pattern
  Variant (4)..(4): Xaa in position 4 is Ala, Asp, Gly or Asn
  Variant (5)..(5): Xaa in position 5 is Ser or Thr
  Variant (6)..(7): Xaa in position 6 to 7 is any amino acid
  Variant (8)..(8): Xaa in position 8 is Phe or Tyr
  Variant (9)..(9): Xaa in position 9 is any amino acid
  Variant (10)..(10): Xaa in position 10 is Leu or Val
  Variant (11)..(11): Xaa in position 11 is Asp or Glu
  Variant (12)..(12): Xaa in position 12 is Ala, Ile or Val
  Variant (15)..(15): Xaa in position 15 is any amino acid
  Variant (16)..(16): Xaa in position 16 is Ala, Asp, Glu, Asn or Ser
  Variant (18)..(18): Xaa in position 18 is Ile or Met
  Variant (19)..(19): Xaa in position 19 is Lys or Arg
  Variant (20)..(20): Xaa in position 20 is Gln or Arg
  Variant (22)..(22): Xaa in position 22 is any amino acid
  Variant (26)..(26): Xaa in position 26 is any amino acid
  Variant (27)..(27): Xaa in position 27 is Asp or Gln
  Variant (28)..(28): Xaa in position 28 is any amino acid
  Variant (29)..(29): Xaa in position 29 is Ala or Ser
  Variant (30)..(30): Xaa in position 30 is any amino acid
  Variant (32)..(32): Xaa in position 32 is Ala, Asp or Thr
  Variant (34)..(34): Xaa in position 34 is Phe, Ile or Val
  Variant (35)..(35): Xaa in position 35 is Phe or Tyr
  Variant (37)..(37): Xaa in position 37 is Ala or Pro
  Variant (38)..(39): Xaa in position 38 to 39 is Phe or Tyr
  Variant (40)..(40): Xaa in position 40 is Ala or Pro
  Variant (41)..(41): Xaa in position 41 is Ala or Gly
  Variant (42)..(42): Xaa in position 42 is Phe or Leu
  Variant (43)..(43): Xaa in position 43 is Asp or Glu
  Variant (44)..(44): Xaa in position 44 is Phe, Ile, Leu or Val
  Variant (45)..(45): Xaa in position 45 is any amino acid
  Variant (46)..(46): Xaa in position 46 is Gln or Arg
  Variant (47)..(47): Xaa in position 47 is His or Tyr
  Variant (48)..(49): Xaa in position 48 to 49 is any amino acid
  Variant (51)..(51): Xaa in position 51 is any amino acid
  Variant (52)..(52): Xaa in position 52 is Asp, Asn or Ser
  Variant (53)..(53): Xaa in position 53 is any amino acid
  Variant (54)..(54): Xaa in position 54 is Ala, Gly, Ser or Thr
  Variant (55)..(55): Xaa in position 55 is any amino acid
  Variant (56)..(56): Xaa in position 56 is Lys or Arg
  Variant (57)..(57): Xaa in position 57 is Asp or Asn
GWYXXXXXXXXXIFXXRXXXYXCLTXXXXXAXAXXVXXXXXXXXXXXXXGXXXXXXX

SEQ ID NO: 4068 - protein, 42 aa, Artificial sequence
  protein pattern
  Variant (2)..(4): Xaa in position 2 to 4 is any amino acid
  Variant (6)..(6): Xaa in position 6 is Phe or Tyr
  Variant (9)..(9): Xaa in position 9 is any amino acid
  Variant (13)..(14): Xaa in position 13 to 14 is any amino acid
  Variant (15)..(15): Xaa in position 15 is Ala or Asp
  Variant (16)..(16): Xaa in position 16 is Ala, Asp, Glu, Ser or Thr
  Variant (17)..(17): Xaa in position 17 is Ala, Asp or Glu
  Variant (19)..(20): Xaa in position 19 to 20 is any amino acid
  Variant (23)..(23): Xaa in position 23 is Asp, Glu or Gln
  Variant (24)..(28): Xaa in position 24 to 28 is any amino acid
  Variant (29)..(29): Xaa in position 29 is Asp, Glu, Gln or Ser
  Variant (31)..(32): Xaa in position 31 to 32 is any amino acid
  Variant (34)..(34): Xaa in position 34 is Phe or Met
  Variant (35)..(35): Xaa in position 35 is Ala, Gly or Ser
  Variant (37)..(37): Xaa in position 37 is Ala or Val
  Variant (40)..(40): Xaa in position 40 is Ala or Pro
  Variant (42)..(42): Xaa in position 42 is Pro or Ser
DXXXPXPTXFHPXXXXXVXXWQXXXXXXXRXXLXXFXGAXRX

SEQ ID NO: 4069 - protein, 17 aa, Artificial sequence
  protein pattern
  Variant (2)..(2): Xaa in position 2 is any amino acid
  Variant (6)..(6): Xaa in position 6 is Phe, Ile or Leu
  Variant (7)..(7): Xaa in position 7 is Thr or Val
  Variant (8)..(8): Xaa in position 8 is Ala, Gly or Leu
  Variant (11)..(11): Xaa in position 11 is any amino acid
  Variant (12)..(12): Xaa in position 12 is Ala, Gly or Thr
GXDHFXXXGRXXWDFRR

SEQ ID NO: 4070 - protein, 34 aa, Artificial sequence
  protein pattern
  Variant (2)..(2): Xaa in position 2 is Ala, Ile or Val
  Variant (3)..(3): Xaa in position 3 is Ser or Thr
  Variant (4)..(4): Xaa in position 4 is Ile or Val
  Variant (5)..(5): Xaa in position 5 is Glu or Arg
  Variant (6)..(6): Xaa in position 6 is Ala, Asp, Glu or Gly
  Variant (7)..(7): Xaa in position 7 is any amino acid
  Variant (9)..(10): Xaa in position 9 to 10 is any amino acid
  Variant (12)..(12): Xaa in position 12 is any or no amino acid
  Variant (14)..(15): Xaa in position 14 to 15 is any amino acid
  Variant (16)..(16): Xaa in position 16 is any or no amino acid
  Variant (18)..(19): Xaa in position 18 to 19 is any amino acid
  Variant (20)..(20): Xaa in position 20 is any or no amino acid
  Variant (22)..(22): Xaa in position 22 is any amino acid
  Variant (23)..(23): Xaa in position 23 is Glu or Asn
  Variant (24)..(24): Xaa in position 24 is any amino acid
  Variant (26)..(26): Xaa in position 26 is Ile or Val
  Variant (27)..(27): Xaa in position 27 is any amino acid
  Variant (28)..(28): Xaa in position 28 is Leu or Met
  Variant (29)..(29): Xaa in position 29 is Ile or Val
  Variant (31)..(31): Xaa in position 31 is any amino acid
  Variant (32)..(32): Xaa in position 32 is Ile, Leu or Val
  Variant (33)..(33): Xaa in position 33 is any amino acid
NXXXXXXLXXIXPXXXVXXXMXXXVXXXXPXXXY

SEQ ID NO: 4071 - protein, 15 aa, Artificial sequence
  protein pattern
  Variant (2)..(2): Xaa in position 2 is any amino acid
  Variant (3)..(3): Xaa in position 3 is Ala or Gly
  Variant (4)..(5): Xaa in position 4 to 5 is any amino acid
  Variant (6)..(6): Xaa in position 6 is Ile or Val
  Variant (9)..(9): Xaa in position 9 is any amino acid
  Variant (10)..(10): Xaa in position 10 is Asp, Glu or Asn
  Variant (13)..(14): Xaa in position 13 to 14 is any amino acid
CXXXXXYVXXLPXXF

SEQ ID NO: 4072 - protein, 26 aa, Artificial sequence
  protein pattern
  Variant (3)..(3): Xaa in position 3 is Gly, Asn or Ser
  Variant (4)..(4): Xaa in position 4 is any amino acid
  Variant (5)..(6): Xaa in position 5 to 6 is Phe or Leu
  Variant (7)..(8): Xaa in position 7 to 8 is any amino acid
  Variant (10)..(11): Xaa in position 10 to 11 is any or no amino acid
  Variant (13)..(14): Xaa in position 13 to 14 is any or no amino acid
  Variant (16)..(16): Xaa in position 16 is any amino acid
  Variant (17)..(17): Xaa in position 17 is Ser or Thr
  Variant (18)..(18): Xaa in position 18 is any amino acid
  Variant (19)..(19): Xaa in position 19 is Ile or Leu
  Variant (20)..(20): Xaa in position 20 is any amino acid
  Variant (21)..(21): Xaa in position 21 is Ile or Val
  Variant (23)..(23): Xaa in position 23 is any amino acid
  Variant (24)..(24): Xaa in position 24 is Asp, Asn, Ser or Thr
WGXXXXXXPXXAXXNXXXXXXEXXPW

SEQ ID NO: 4073 - protein, 15 aa, Artificial sequence
  protein pattern
  Variant (3)..(3): Xaa in position 3 is any amino acid
  Variant (8)..(9): Xaa in position 8 to 9 is any amino acid
  Variant (10)..(12): Xaa in position 10 to 12 is any or no amino acid
QYXWHLPXXXXXYSV

SEQ ID NO: 4074 - protein, 14 aa, Artificial sequence
  protein pattern
  Variant (2)..(2): Xaa in position 2 is any amino acid
  Variant (3)..(3): Xaa in position 3 is Asp, Asn or Ser
  Variant (4)..(4): Xaa in position 4 is Phe or Met
  Variant (6)..(6): Xaa in position 6 is any amino acid
  Variant (7)..(7): Xaa in position 7 is Phe or Tyr
  Variant (8)..(8): Xaa in position 8 is any amino acid
  Variant (9)..(9): Xaa in position 9 is Ala, Ser or Thr
  Variant (11)..(11): Xaa in position 11 is Ala, Asp, Glu or Gly
  Variant (13)..(13): Xaa in position 13 is Phe or Leu
WXXXCXXXXNXGXG

SEQ ID NO: 4075 - protein, 17 aa, Artificial sequence
  protein pattern
  Variant (2)..(2): Xaa in position 2 is any amino acid
  Variant (5)..(5): Xaa in position 5 is Ala, Ser or Thr
  Variant (6)..(7): Xaa in position 6 to 7 is any amino acid
  Variant (8)..(8): Xaa in position 8 is Ala or Gly
  Variant (9)..(9): Xaa in position 9 is Ile or Val
  Variant (10)..(10): Xaa in position 10 is Ile, Leu or Val
  Variant (11)..(11): Xaa in position 11 is Asp, Glu, Gly or Asn
  Variant (12)..(12): Xaa in position 12 is Lys or Arg
  Variant (13)..(13): Xaa in position 13 is Ile or Val
  Variant (14)..(16): Xaa in position 14 to 16 is any amino acid
  Variant (17)..(17): Xaa in position 17 is Lys or Arg
AXDVXXXXXXXXXXXXX

SEQ ID NO: 4076 - protein, 15 aa, Artificial sequence
  protein pattern
  Variant (3)..(4): Xaa in position 3 to 4 is any amino acid
  Variant (5)..(5): Xaa in position 5 is Ile or Leu
  Variant (7)..(7): Xaa in position 7 is any amino acid
  Variant (8)..(8): Xaa in position 8 is Glu or Gln
  Variant (10)..(11): Xaa in position 10 to 11 is any amino acid
  Variant (12)..(12): Xaa in position 12 is any or no amino acid
  Variant (14)..(14): Xaa in position 14 is any amino acid
  Variant (15)..(15): Xaa in position 15 is Ala, Cys, Pro or Val
IRXXXIXXCXXXSXX

SEQ ID NO: 4077 - DNA, 1824 bp, Arabidopsis thaliana
  CDS (1)..(1824)
atggacaccaaaatcggatcgatcgatgattgcaagccgacgaacggcgacgtctgtagtccaacaaacggcaccgtcgcaacaatccacaactctgttccttcctccgctatcaccatcaactactgcgacgcgactctcggccgtcacttagctcgtcgtctcgtccaagccggcgttacggatgttttctctgttcccggagatttcaacctcactttgcttgatcacctcatggctgagccggacctcaacctaatcggatgttgtaacgagctaaacgccggttacgctgccgacggttacgctagatctcgtggagtcggcgcttgcgttgttaccttcaccgttggtggactcagcgttttaaacgcgatcgctggtgcttacagcgagaatcttcctcttatctgtatcgtcggaggtcctaactctaacgattatggcactaaccggattcttcatcacaccattggattacctgattttagccaagagcttaggtgcttccaaacggtgacttgttatcaggcggtggtgaacaatttagatgatgctcatgaacagattgataaagcaatatcaacagctttgaaagagagcaagcctgtgtatataagtgtaagctgtaacttagcagcgattcctcatcatacatttagccgtgatcctgtccctttttctctagctccaagattgagcaacaagatgggtttagaagctgcggtggaagcaacattggagtttctgaataaggctgtgaagccagttatggttggtggtcctaagttgcgtgtggctaaagcttgtgatgcctttgttgagctagctgatgcttcaggctatgctttggcgatgatgccttctgcgaaaggctttgtaccagagcaccatcctcatttcattggaacttattggggagcagtgagcactcctttttgctctgagattgtggaatctgcggatgcttacatttttgcaggtccaatcttcaacgactatagctctgttggttactcgcttctcctcaagaaagaaaaagccatcgttgtgcaacctgatcgtatcactgtggccaatggtcctacttttggttgcattttgatgagcgatttcttcagggaattgtctaagagggtgaagcgtaacgagactgcatatgagaactaccataggatctttgtccctgaaggtaagccattgaagtgtgaatcaagagagccattgagagttaacacaatgttccagcacattcagaagatgctctctagtgaaaccgctgtgattgctgaaaccggtgattcttggttcaattgccaaaaactaaagctgccaaaaggatgtgggtacgagtttcagatgcagtatggatcgattgggtggtctgttggtgcaactctaggatacgcacaggcatcaccagagaagcgagtgttggcattcatcggtgatgggagtttccaagtcacggttcaggacatatcaacaatgctgcgtaatggacagaagacgatcatcttcttgattaacaatggtggctacaccattgaagtagagattcatgacggtccttataacgtgattaagaactggaactacactggtctcgttgacgccattcataacggtgaaggcaattgctggactgcaaaggtgagatacgaagaggagttagtggaggcgattacgacagcgacgacggagaagaaagattgtctatgtttcatagaagtgattcttcacaaggatgatacgagcaaagagttgcttgagtggggctcacgcgtctctgctgctaacagccgtcctcccaatcctcagtag

SEQ ID NO: 4078 - protein, 607 aa, Arabidopsis thaliana
MDTKIGSIDDCKPTNGDVCSPTNGTVATIHNSVPSSAITINYCDATLGRHLARRLVQAGVTDVFSVPGDFNLTLLDHLMAEPDLNLIGCCNELNAGYAADGYARSRGVGACVVTFTVGGLSVLNAIAGAYSENLPLICIVGGPNSNDYGTNRILHHTIGLPDFSQELRCFQTVTCYQAVVNNLDDAHEQIDKAISTALKESKPVYISVSCNLAAIPHHTFSRDPVPFSLAPRLSNKMGLEAAVEATLEFLNKAVKPVMVGGPKLRVAKACDAFVELADASGYALAMMPSAKGFVPEHHPHFIGTYWGAVSTPFCSEIVESADAYIFAGPIFNDYSSVGYSLLLKKEKAIVVQPDRITVANGPTFGCILMSDFFRELSKRVKRNETAYENYHRIFVPEGKPLKCESREPLRVNTMFQHIQKMLSSETAVIAETGDSWFNCQKLKLPKGCGYEFQMQYGSIGWSVGATLGYAQASPEKRVLAFIGDGSFQVTVQDISTMLRNGQKTIIFLINNGGYTIEVEIHDGPYNVIKNWNYTGLVDAIHNGEGNCWTAKVRYEEELVEAITTATTEKKDCLCFIEVILHKDDTSKELLEWGSRVSAANSRPPNPQ

SEQ ID NO: 4079 - DNA, 2187 bp, Zea mays subsp. mays
  CDS (157)..(1977)
accgaaccaaacaacacacgtcaaagcggaaaacctcagaaaaccacaataaatcatcctcgtccaccactgcccccgctctgctgcaactccactcggcccggccgctctttccacccaccttgatcctctgatccgttggtgcttgaccgatccatggacacccacatcggatccgtgaacggggcggcgtcgaaccagacggttggctgcccggcgtcggcgccggggtgcccgatggcgtccacgccggcgcagcccgcggcgaccctgtcggcgggggaggcgtcgctggggcgccacctcgcgcgtcgcctcgtgcaggtcggcgtcaacgatgtattcgcggttccgggggacttcaacctcacgctgctcgaccacctgatcgccgagcccggcctgcgcctcgtcggctgctgcaacgagctcaacgccgggtacgccgccgacgggtacgcgcgcgcgcgcggcgtcggggcctgcgccgtcacgttcacagtcggggggctcagcgtgctcaacgccatcgcgggcgcctacagcgagaacctgcccgtcatctgcatcgccggcgggcccaactccaacgactacgggaccaaccgcatcctccaccacaccatcggcctccccgacttctcgcaggagctccgctgcttccagaccgtcacctgccatcaggcggtggtgaacaatctggatgacgcgcacgagcagatcgacacggccattgccacggcactgagggagagcaagcccgtgtacctcagcatcagctgcaacctccctgggctgcctcatcctaccttcagccgcgacccagtgcccttcttcctcacccccaggacgagcaacaagatggggctagaggctgcagtggaggcaactgtcgaattcctgaacaaggcggtgaagccagtccttgtcgccggccccaaactgcgtgtggcaaaggcaggaaaggcatttgtcgatatggtagatgccagtggctatgcctatgccgtgatgccatcggccaagggtcttgtgccagagactcacccccacttcatcggcacctactggggcgccgtcagcaccgccttctgtgcggagattgttgagtccgcagatgcctacctctttgcaggccccattttcaatgactacagctctgttggctactcattcctcctcaagaaggaaaaggccatcatcgtccagcctgagcgtgtgatagtggggaatgggccggcattcggatgtgtgatgatgaaagagttcttgtctgaattggctaagagggttaataagaacaccactgcctatgagaattacaagaggatctttgtacctgagggccagccgctggaaagcgagccaaatgagccactgcgagtgaatgtgctcttcaagcacgtccagaagatgttgactggtgatagtgcggtgattgctgagactggtgactcctggttcaactgccagaagcttaagctgccagaaggctgtgggtatgaattccaaatgcagtatggttcgattggatggtcagtgggtgcattgctcggatatgctcagggtgcgaaccacaagcgtgtgattgccttcattggtgatgggagcttccaggttacagcacaggatgtgtcaactatgctgcgatgtgagcagaacagcataatcttcctgatcaacaacggtgggtacacgattgaggtggaaatccatgacgggccatacaacgtcatcaagaactggaactacactggctttgtggacgccatccacaatggcttgggcaagtgctggacctccaaggtgaagagcgaggaggacctgacggctgccattgagacagcgctaggggagaagaaggactgcctgtgcttcatcgaggtgatcgcgcacaaggacgacaccagcaaagagctgctggaatggggctctagggtttctgccgccaactcccgaccaccaaatcctcagtagaagtccgcaggctccaagcctcggagtgtcattagtgatagtaagctgtagcacggtgggggctcaaccgaataacctgaacgcattgccctttctgttacgtgttttattttattgtgtttctgtggtcgtatatctgttttgtgacgtgttccctgcttctcccatgtgaattccagaagaactatgagaaaattcaggttggttgtc

SEQ ID NO: 4080 - protein, 606 aa, Zea mays subsp. mays
MDTHIGSVNGAASNQTVGCPASAPGCPMASTPAQPAATLSAGEASLGRHLARRLVQVGVNDVFAVPGDFNLTLLDHLIAEPGLRLVGCCNELNAGYAADGYARARGVGACAVTFTVGGLSVLNAIAGAYSENLPVICIAGGPNSNDYGTNRILHHTIGLPDFSQELRCFQTVTCHQAVVNNLDDAHEQIDTAIATALRESKPVYLSISCNLPGLPHPTFSRDPVPFFLTPRTSNKMGLEAAVEATVEFLNKAVKPVLVAGPKLRVAKAGKAFVDMVDASGYAYAVMPSAKGLVPETHPHFIGTYWGAVSTAFCAEIVESADAYLFAGPIFNDYSSVGYSFLLKKEKAIIVQPERVIVGNGPAFGCVMMKEFLSELAKRVNKNTTAYENYKRIFVPEGQPLESEPNEPLRVNVLFKHVQKMLTGDSAVIAETGDSWFNCQKLKLPEGCGYEFQMQYGSIGWSVGALLGYAQGANHKRVIAFIGDGSFQVTAQDVSTMLRCEQNSIIFLINNGGYTIEVEIHDGPYNVIKNWNYTGFVDAIHNGLGKCWTSKVKSEEDLTAAIETALGEKKDCLCFIEVIAHKDDTSKELLEWGSRVSAANSRPPNPQ

SEQ ID NO: 4081 - DNA, 2068 bp, Triticum aestivum
  CDS (145)..(1893)
accaaaccagcacacgtcaacggaacagcttagcaaaatccccaccaaggtgtagaatattccccaaaaccccacgtcccctccctctgccgccgctcccactccaccagtgtgccacccggatcgatcgatcgattgacagcgatggacacccacatcggctccgtcgacgggccgtcgccggcggcggtgaacggcgcggtcggctgcccggcgtccgcgccggggtgcccgatcatgtcctcccaccccgtggtcttcgccgtgcccggggacttcaacctcacgctgctcgaccacctcgtcgacgagcccgggctgcgcctcgtcggctgctgcaacgagctcaacgctggctacgcggccgacggctacgcgcgggcccgcggcgtcggcgcctgcgcggtcaccttcaccgtcggcggcctcagcgtgctcaacgccatcgccggcgcctacagcgagaacctgcccgtcatctgcatcgccggcgggcccaactccaacgactacggcaccaaccgcatcctccaccacaccatcggcatcccggacttctcgcaggagctgcgctgcttccagaccgtcacctgccaccaggcggtggtgaccaacctggacgacgcgcacgagcagatcgacacggccatcgccacggcgctcagggagagcaagccggtgtacctcagcatcagctgcaacctccccgggctacctcaccccaccttcacccgtgacccagtccctttcttcctcgcccccaagatgagcaacaagatggggctcgaggctgcagtggaggcaaccgtcgagttcctgaacaaggcggtgaagccagtgcttgtcgccggccccaaactgcgcgtggccaaggcggggaaggccttcgtcgaccttgtggacgccagtggctatgcctatgctataatgccatcggccaagggctttgtgccagagacgcacccccacttcctcggcacctactggggcgccgtcagcacggccttctgcgccgagatcgtcgagtcggccgacgcctacctcttcgcaggccccatcttcaacgactacagctctgttggctactcgttcctgctcaagaaggacaaggccatcatcgtgcagcctgagcgtgtcatcgtcgggaacggcccggcattcggctgcgtcatgatgaaggagtacctgtctgcattggccaagcgggttcagaagaacaccaccgcctacgagaactacaagaggatcttcgtgcctgagggccatccgctgaagggcgaggcgaacgagccgctgcgtgtcaatgtgctcttcaagcacatccaggacatgctgacgggtgatagtgcagtgctcgctgagaccggtgactcctggttcaactgccagaagctcaagctgcccgagggctgcgggtatgaattccaaatgcagtatggctcgattggatggtcagtgggtgcattgctcgggtacgcgcaaggggcgagtgacaagcgtgtcatagcctgcattggtgatgggagcttccaggtgacagcacaggatgtgtcaactatgctgcggtgcgaacagaacagcataatcttcctgatcaacaatggcgggtacacgatcgaggtggagatccacgacgggccttacaatgtcatcaagaactggaactacaccgcccttgtggaggccatccacaacggggagggcaaatgctggactgccaaggtgaagtgcgaggaggagctgacggcggcgatagagacggcgctgggggagaagaaggactctctgtgcttcatcgaggtgatcgcgcacaaggacgacaccagcaaagagcttctggaatggggctccagggtctctgctgccaactccaggccacccaacccccagtagaccaagcacgcctgcatcactagtagtcgcatccagcagcacgttgccatcaaataatgttgaacagtttatctttgctcttctgttatgttcttagttttgtgcctactagttacttgtgagctgtggccatcgcctgtgttctatcctgccaatgctaagaagatcatgagat

SEQ ID NO: 4082 - protein, 582 aa, Triticum aestivum
MDTHIGSVDGPSPAAVNGAVGCPASAPGCPIMSSHPVVFAVPGDFNLTLLDHLVDEPGLRLVGCCNELNAGYAADGYARARGVGACAVTFTVGGLSVLNAIAGAYSENLPVICIAGGPNSNDYGTNRILHHTIGIPDFSQELRCFQTVTCHQAVVTNLDDAHEQIDTAIATALRESKPVYLSISCNLPGLPHPTFTRDPVPFFLAPKMSNKMGLEAAVEATVEFLNKAVKPVLVAGPKLRVAKAGKAFVDLVDASGYAYAIMPSAKGFVPETHPHFLGTYWGAVSTAFCAEIVESADAYLFAGPIFNDYSSVGYSFLLKKDKAIIVQPERVIVGNGPAFGCVMMKEYLSALAKRVQKNTTAYENYKRIFVPEGHPLKGEANEPLRVNVLFKHIQDMLTGDSAVLAETGDSWFNCQKLKLPEGCGYEFQMQYGSIGWSVGALLGYAQGASDKRVIACIGDGSFQVTAQDVSTMLRCEQNSIIFLINNGGYTIEVEIHDGPYNVIKNWNYTALVEAIHNGEGKCWTAKVKCEEELTAAIETALGEKKDSLCFIEVIAHKDDTSKELLEWGSRVSAANSRPPNPQ

SEQ ID NO: 4083 - DNA, 2344 bp, Glycine max
  CDS (243)..(2069)
cgcctcgtgcccaaataccattcaactcttgtcatttttttcactttctctttttcaaaatactcttagtctctctctaaccttcttccagttgtctctaaacctcttgaaatccgggccgacccccccccaaaaaccattcacttttccacaagccttagttcttctcatttattctctttttcaaaatactttcactctctctaaccttccagttctcactaaacctcgtgaagctcgtgatggacaccaagataggttcactagacgcgcccaagcccaacagcaacgacgtcgtatcatgcaacctcaccagcagcgccgccatccagccctgcttgccggcgacggtgatcaacggcgccggctgtagtgactccaccttgggcggccacctggcccgccggctggtggaaatcggcgtcaccgacgtgttctccgttcccggggacttcaacctgacgctgctggaccacctcatcgcggagccggcgctgcacctggtcgggtgctgcaacgagctcaacgccgggtacgccgccgacggctacgcgcgcgccaggggagtcggcgcgtgcgtggtgacgttcaccgtcggcggcctcagcgtgctcaacgccatcgccggagcgtacagcgagaacttgccgctaatttgcatcgtcggtgggcccaactccaacgactacggcaccagtcggatcctccatcacaccatcgggttacccgatttcagccaggagctaaggtgctttcagaccattacttgcttccaggctgtggtgaataacttggaagatgctcatgagttgattgatacagcaatctcaactgcgctgaaagaaagcaaacctgtgtatataagcattagctgtaacttgcctgggattcctcaccccactttcagtcgtgaccctgttcgtttttcattgtctccaagattgagtaataagatggggttggaggccgcagtggaggcagcggcggaattccttaacaaggcagtgaaaccagtgctggtgggtggtcctaaactgagggtggcaacagcatctgatgcctttgtcgaactggctgatgcgtgtggttatgcgcttgctgtgatgccgtcggctaaagggcaggttccagagcaccatccccattttatcggaacttattggggtgctgtgagcactgccttctgtgctgagattgtggagtctgcggatgcatacttgtttgctggtccaatttttaatgactacagctctgtggggtattcacttcttctcaagaaggagaaggcgatcattgtgcagcctgatcgggttgtgatcgcgaatggacctgcttttgggtgtgtgctgatgaaggatttcctcaaggcactcgcaaagcgcctcaagcacaacaatactgcatatgaaaattaccacaggatatttgtccctgatgggcatcctttgaaggctgcacccagagagcctttgagggttaatgttctgttccaacatatacaaaatatgctgtctggtgaaactgctgtaattgctgagacaggggactcctggtttaattgccaaaagctgaaattgccaaaggcatgtgggtatgagttccaaatgcaatatggttcaattggatggtctgttggtgctactctgggttatgctcaagccgttcctgagaagcgagtgattgcctgcattggtgatggaagttttcagctgactgcccaagatgtatcgacaatgttacggtgcgggcaaaaaaccatcatctttctgatcaacaatggtggatacaccatcgaggttgaaattcatgatgggccgtacaatgtgattaagaactggaattacactgggttgattgatgcaatccacaatggtgaagggaaatgctggactgccaaggtgttctgtgaagaggagctagttgaagcaattgccacagccacaggacccaagaaagactccttatgcttcattgaggtgattgttcataaggatgacaccagtaaagaattgcttgaatggggctcaagggtttctgctgccaatagccgtcctcccaatcctcagtaatcttcagaatttatcctatgactaaattgctgcagttgccctttagctctatgaaagtgagaatcatttgagatgatgcccttgtagggaatttacctttgttaatggcttgaaacatttatgctaaactgactccccacttgtttgtgtaaattctttcacttttgttcacctttgtttatcacctttgttcatttcgattattcttaagtaaagcatcgttctttttatccaaaactgtttgctacattttgttaaacaggaaccgatttcat

SEQ ID NO: 4084 - protein, 608 aa, Glycine max
MDTKIGSLDAPKPNSNDVVSCNLTSSAAIQPCLPATVINGAGCSDSTLGGHLARRLVEIGVTDVFSVPGDFNLTLLDHLIAEPALHLVGCCNELNAGYAADGYARARGVGACVVTFTVGGLSVLNAIAGAYSENLPLICIVGGPNSNDYGTSRILHHTIGLPDFSQELRCFQTITCFQAVVNNLEDAHELIDTAISTALKESKPVYISISCNLPGIPHPTFSRDPVRFSLSPRLSNKMGLEAAVEAAAEFLNKAVKPVLVGGPKLRVATASDAFVELADACGYALAVMPSAKGQVPEHHPHFIGTYWGAVSTAFCAEIVESADAYLFAGPIFNDYSSVGYSLLLKKEKAIIVQPDRVVIANGPAFGCVLMKDFLKALAKRLKHNNTAYENYHRIFVPDGHPLKAAPREPLRVNVLFQHIQNMLSGETAVIAETGDSWFNCQKLKLPKACGYEFQMQYGSIGWSVGATLGYAQAVPEKRVIACIGDGSFQLTAQDVSTMLRCGQKTIIFLINNGGYTIEVEIHDGPYNVIKNWNYTGLIDAIHNGEGKCWTAKVFCEEELVEAIATATGPKKDSLCFIEVIVHKDDTSKELLEWGSRVSAANSRPPNPQ

SEQ ID NO: 4085 - DNA, 2267 bp, Zea mays
  CDS (139)..(1968)
gccggccggtcacaacacaattcggcacgagggtcagtcagtcagcagccgcaacctcgtacaatcacgaaagcagcacacgagtccacaacagcaccccgcctctttttcttcacgtgcgttgcgtgccctgcccccatggagaccctcctggctggcaaccccgccaacggcgtggcgaagccgacgtgcaacggcgtcggcgccctgcccgtggccaactcccacgccatcatcgccacgccgccggctgcggcgacgctggccccggctggcgccacgctcggccggcacctggcgcgccgcctcgtgcagatcggcgcctccgacgtcttcgccgtcccgggggacttcaacctcaccctgctcgactacctcatcgccgagccgggcctgaccctcgtcggctgctgcaacgagctcaacgccgggtacgccgccgacgggtacgcgcggtcgcggggcgtcggcgcctgcgccgtcacgttcaccgtcggtgggctcagcgtgctcaacgccatcgccggcgcgtacagcgagaacctccccgtcgtctgcatcgtgggcgggcccaactccaacgactacggcaccaaccgcatcctgcaccacaccatcggcctccctgacttctcccaggagctccgctgcttccagacgatcacctgctaccaggccatcatcaacaacctggacgacgcgcatgagcagatcgacacggccatcgcgacggcgctgagggagagcaagcccgtgtacatcagcgtcagctgcaacctggccggcctctcccacccgaccttcagccgggatccggtgcccatgttcatctcgccgaggctgagcaacaaggccaacctggagtacgccgtggaggcggcggccgacttcctcaacaaggcggtgaagccggtgatggtgggcgggcccaagatccgggtggccaaggccagggaggcgttcgccgccgtcgcggacgccagcgggtaccctttcgccgtcatgccggccgccaagggcctggtgccggagcaccacccgcgcttcatcggcacctactggggcgccgtcagcaccaccttctgcgccgagatcgtggagtccgccgacgcctacctcttcgccgggcccatcttcaacgactacagctccgtcggctactccctcctgctcaagcgggagaaggccgtcatcgtgcagcccgaccgcatggtggtcggcgacggcccggcgttcggctgcatcctcatgcccgagttcctccgcgcgctcgccaagcgcctcaggcgcaacaccacggcgtacgacaactaccgccgcatcttcgtccccgaccgcgagccgcccaacggcaagcccaacgagccgcttagggtcaacgtcctcttcaagcacatcaagggcatgctgtccggcgactccgcggtcgtcgccgagaccggcgactcgtggttcaactgccagaagctcaggctccccgagggctgcggctacgagttccagatgcagtacggctccatcgggtggtcggtcggcgcgacgctcgggtacgcccaggcggccaaggacaagcgtgtcatcgcgtgcatcggcgacggaagcttccaggtgacggcgcaggacgtgtccacgatgctccggtgcgggcagaagagcatcatcttcctcatcaacaacggcggctacaccatcgaggtggagatccacgacggcccgtacaacgtgatcaagaactgggactacacgggcctggtcaacgccatccataactccgagggcaactgctggaccatgaaggttcggacggaggagcagctcaaggaggcgatcgccatggcgacgggcgacaagaaagactgcctctgcttcatcgaggtaatcgtgcacaaggacgacacgagcaaggagctcctcgagtgggggtccagggtctccgccgccaacagcaggccgcccaacccccagtgatgagcccgtcgatcggtctcgagcgttcctgcaatggcgcctgcgtctgcgtctgtctgccctgaaattttttcgggtcgtttactcgttttcagtcagttactcagtttgtccgtcttcgtcgagcagaactacatccctgctgagggaagctgccaatctttatcctacgatgataatgtctgcaatttcacttgcttccaattgagttctgttacaaatttttgcaacattttttcccgcatcaataaaattcgttcgcgacgccggtctcctaaaaaaaaaaaaaaaaagcggcc

SEQ ID NO: 4086 - protein, 609 aa, Zea mays
METLLAGNPANGVAKPTCNGVGALPVANSHAIIATPPAAATLAPAGATLGRHLARRLVQIGASDVFAVPGDFNLTLLDYLIAEPGLTLVGCCNELNAGYAADGYARSRGVGACAVTFTVGGLSVLNAIAGAYSENLPVVCIVGGPNSNDYGTNRILHHTIGLPDFSQELRCFQTITCYQAIINNLDDAHEQIDTAIATALRESKPVYISVSCNLAGLSHPTFSRDPVPMFISPRLSNKANLEYAVEAAADFLNKAVKPVMVGGPKIRVAKAREAFAAVADASGYPFAVMPAAKGLVPEHHPRFIGTYWGAVSTTFCAEIVESADAYLFAGPIFNDYSSVGYSLLLKREKAVIVQPDRMVVGDGPAFGCILMPEFLRALAKRLRRNTTAYDNYRRIFVPDREPPNGKPNEPLRVNVLFKHIKGMLSGDSAVVAETGDSWFNCQKLRLPEGCGYEFQMQYGSIGWSVGATLGYAQAAKDKRVIACIGDGSFQVTAQDVSTMLRCGQKSIIFLINNGGYTIEVEIHDGPYNVIKNWDYTGLVNAIHNSEGNCWTMKVRTEEQLKEAIAMATGDKKDCLCFIEVIVHKDDTSKELLEWGSRVSAANSRPPNPQ

SEQ ID NO: 4087 - DNA, 2362 bp, Zea mays
  CDS (80)..(1861)
atacacgccaagtcgccagccagcatttccccccgaaccatccttccactccctcgccgaccctccccccgcgcccgccatggacacggcgatcggctccgtcccggcagcctccgacgcggcgcgtcacccagcgccgtccgcgtccgccccgcgcgacgcgacgctgggccggcacctggcgcggcgcctggcggaggtgggcgcccgggacgtgttcacggtgccgggggacttcaacctcacgctcctcgacgagctggaggccgagccgggcggcgtccgcctcgtcggctgctgcaacgagctcaacgcggcgtacgcggccgacgggtacgcccgcgcgcgcgccggcggggtcggcgcctgcgccgtcaccttcaccgtcggcggcctcagcgccatcaacggcgtcgccggcgccttcagcgagaacctccccgtcgtgtgcatcgtcggcggacccaacagcaacgactacgggagtaacaggatcctgcaccataccatcggcttgcctgatttcacgcaggagctcaggtgcttccagaacgtcacgtgctatcaggctgtggtgaacaacttggaagatgcgcatgagcagatcgatactgccatctccacggcaatcaaggagagcaagcctgtttacattagcatcagctgcaacctcccttcgatcccacatcccaccttcagccgccatcctgtccctttcttcctctccccaaggctatcgaaccagatgaacctggaggctgcagtggaagccgccgcggctttcttgaacaaagccgtcaagccagtgcttgtaggtgggccaaagatgagggtgtccaaagcatgcgaagccttggcagagctggcagatgcctgcggctatcccgtcgccgtgatgccttctgcgaaggggctagtgccagagcaccactctaggttcattggcacgtactggggtgcggtgagcactccattctgtgctgagatcgtcgagtctgccgatgcctacctatttgctggccccgtattcaacgactacagctcggttgggtactcgctgctcctcaagaaggagaaggccatcattgtccaaccagagcgggtggtggtcgggcatggacccgcgtttgggtgtgttctgatgaaggatttccttcatgcccttgcaacccgtctgaagaagaacactgtcgcgtatgagaactaccgtcgaatttatgtgcctccaggcgaaccactttcatctgaacctggcgagccgttgagagtgaacgtgctcttcaagcatattcaggcaatgctgtccggcgacatggctgtcatcgcagagactggggactcgtggtttaactgccagaagctgaagctaccggaaggatgtggatacgaattccagatgcagtatggatcaattggctggtcagtgggcgcaactctaggatacgcacaggctgccaaggataaacgtgtcattgcctgcattggagacggcagctttcaggtgacggcacaagaagtgtcaacgatgctccggtgggggcacaacagcatcatcttcctgataaacaatggagggtacacaatcgaggtggagattcacgatggcccttataacgttatcaagaactggaactacaccggtctggtggaagcgttccacaatggcgagggcgcgtgctacacagcaaaggttcgaacagaggaggagctgacggaggcgctggaggcagctctaggacctaagaaggactgcttatgcttcatcgaggtcatcgtgcataaggatgacaccagcaaagagcttctcgagtggggatctagggtttctgcggcgaatagccgtccacctaatcctcagtgaatacatcaggtctcccgaattgccctgtaaaccgatccgctttctggtgacgcccataacaagaagtctcggcgatgacatgctgccgatttctgaataaattgtccctgtaattcactgatgttgcaagtccttgttgtaaagatacaaagacgtttggaagaatcactgacaacgtaaactctacgtatcttacgtgaaatagccccgtgatctacatatatataaagcagattttgagagtactagaaaaaaaagcggccctcagtgaaatagccgtacatcaggtcccccgaattgcccggaagaccaacccgttttctggtgaggcccaaaccaaaaagtctcggcaaggacatcctgtcgatttctgaataaattgtccctccaattccctggtgttaaagtccccgttgtaaaggtacaaaaacgtttggaaaaatccctgacagcgtaaactctacgtatcttacgtggaaaaaaaaaaaaaaaaaaccaaaa

SEQ ID NO: 4088 - protein, 593 aa, Zea mays
MDTAIGSVPAASDAARHPAPSASAPRDATLGRHLARRLAEVGARDVFTVPGDFNLTLLDELEAEPGGVRLVGCCNELNAAYAADGYARARAGGVGACAVTFTVGGLSAINGVAGAFSENLPVVCIVGGPNSNDYGSNRILHHTIGLPDFTQELRCFQNVTCYQAVVNNLEDAHEQIDTAISTAIKESKPVYISISCNLPSIPHPTFSRHPVPFFLSPRLSNQMNLEAAVEAAAAFLNKAVKPVLVGGPKMRVSKACEALAELADACGYPVAVMPSAKGLVPEHHSRFIGTYWGAVSTPFCAEIVESADAYLFAGPVFNDYSSVGYSLLLKKEKAIIVQPERVVVGHGPAFGCVLMKDFLHALATRLKKNTVAYENYRRIYVPPGEPLSSEPGEPLRVNVLFKHIQAMLSGDMAVIAETGDSWFNCQKLKLPEGCGYEFQMQYGSIGWSVGATLGYAQAAKDKRVIACIGDGSFQVTAQEVSTMLRWGHNSIIFLINNGGYTIEVEIHDGPYNVIKNWNYTGLVEAFHNGEGACYTAKVRTEEELTEALEAALGPKKDCLCFIEVIVHKDDTSKELLEWGSRVSAANSRPPNPQ

SEQ ID NO: 4089 - DNA, 2096 bp, Oryza sativa
  CDS (121)..(1914)
gaactgtccgacacgccgagaagaaaaaaaaaagaaaaaaaagcaacgaaccaacttttctcccaaggaaacttctccacttctctcctcgcttccgccgcctcctccgccgccgccgacatggacaccacgatcggctcggtgccgacggcctccgatgcggcggcgcctgcccccgcggcgaactccgcgccgagggaggccacgctggggcggcacctcgcgcggcggctggcggaggtcggggcgcgcgacgtgttcacggtgccgggggacttcaacctcacgctgctcgacgagctcgaggcggaggcgggggcggggcacggcggggtgcggctcgtcgggtgctgcaacgagctcaacgcggcgtacgccgccgacgggtacgcccgcgcgcgcggcggcggggtcggggcgtgcgccgtcacgttcaccgtcggtggcctcagcgccatcaacgccgtcgccggcgcgttcagcgagaacctccccgtggtgtgcatcgttgggggccccaacagcaacgactacgggagcaaccgcatcctgcatcacaccatcgggctgcctgatttcacgcaggagctcaggtgcttccagactgtcacttgctatcaggcggtggtgaacaacttggaggatgcacatgagcagattgatgctgccatctccactgcaataaaggagagcaagcctgtttacataagcatcagctgcaacctcccctctatcccacatcccacctttagccgccaccctgttcctttcttcctgtccccaagattatcaaaccagatgaacctggagacagcagtggaaactgctgcagctttcctgaacaaagcagtcaagccagtcctcgttggtggaccaaaaatgagggtggccaaagcatgcaaatccttcgtagagctggctgatgcctgtggttatcctgttgcggtcatgccttctgcaaagggtcttgtgccagagcaccatcctaggtttattggcacgtactggggtgctgtgagcactccattttgtgctgagatcgtcgagtcagctgatgcatatctatttgctggcccaatatttaatgactacagctcggttggatactcactacttctcaagaaggagaaggccatcatcgtccagccagaccgggtggtgataggtcatgggcctgcgtttgggtgtgttctgatgaaggacttcctgcatgcactttcagcacggctgaagaaaaacacggctgcatatgagaactatcgtcggatttatgtgcctccgggtgaacctcctttgtctgagcctggagagccattgagagtgaatgtacttttccagcatattcagaaaatgttgtcagccaactcggctgtcattgctgagactggagactcttggtttaattgccagaagctaaagctaccagagggctgtgggtacgaatttcaaatgcaatatggatcaattggttggtcggtaggtgcaactctgggatatgcaaaggctgctaaggataagcgagtcattgcttgcatcggagatggaagctttcaggtgacggcacaagaagtgtcgacaatgcttcgttgggggcagaaaagcatcatcttcctcataaacaatggagggtacaccatcgaggtggagatccatgacggtccttacaatgtcatcaagaattggaactacaccggtgtggtggaagcgttccataatggcgaggggaagtgctacacggcaaaggtccgaactgaggaggaactgaaggaagcaattgaagaagctcagggacctaagaaggattgcttgtgcttcatagaggtgattgtacacaaggatgacacaagtaaggagcttcttgagtggggctccagagtttctgctgcaaatagccgcccaccaaatcctcagtgagtacgtcagatatccgacttgccatgttttgattaggaaaatgtgaatttcagtggtcttcgaataagttgcgcatgtaattagccgctgttgtaagtgttgtaagtggttagaaatgatttcagactctcatacctgtattattgtcaataaatctgaaatcgatttttggttgcccttcc

SEQ ID NO: 4090 - protein, 597 aa, Oryza sativa
MDTTIGSVPTASDAAAPAPAANSAPREATLGRHLARRLAEVGARDVFTVPGDFNLTLLDELEAEAGAGHGGVRLVGCCNELNAAYAADGYARARGGGVGACAVTFTVGGLSAINAVAGAFSENLPVVCIVGGPNSNDYGSNRILHHTIGLPDFTQELRCFQTVTCYQAVVNNLEDAHEQIDAAISTAIKESKPVYISISCNLPSIPHPTFSRHPVPFFLSPRLSNQMNLETAVETAAAFLNKAVKPVLVGGPKMRVAKACKSFVELADACGYPVAVMPSAKGLVPEHHPRFIGTYWGAVSTPFCAEIVESADAYLFAGPIFNDYSSVGYSLLLKKEKAIIVQPDRVVIGHGPAFGCVLMKDFLHALSARLKKNTAAYENYRRIYVPPGEPPLSEPGEPLRVNVLFQHIQKMLSANSAVIAETGDSWFNCQKLKLPEGCGYEFQMQYGSIGWSVGATLGYAKAAKDKRVIACIGDGSFQVTAQEVSTMLRWGQKSIIFLINNGGYTIEVEIHDGPYNVIKNWNYTGVVEAFHNGEGKCYTAKVRTEEELKEAIEEAQGPKKDCLCFIEVIVHKDDTSKELLEWGSRVSAANSRPPNPQ

SEQ ID NO: 4091 - DNA, 2319 bp, Glycine max
  CDS (192)..(2015)
cggaattcccgggatcgacccacgcgtccgctagttcgtgctactattccactccacacaaataaaccctataaattctcactctccctcttttctctctcacactaataccaaactctctgaaaacaaaacctcatcatcatctaactcattcacatttttctctatcatctcgtttctactgtttcctcatggacactaacattggatctctatccctcgacgcgtgcaagcctgctaacaacgacgtcggttgtcccccgaacggagccgtttcagcaatcaaaccctccgtccccgcaaccacgatgacgtcctcggatgccacgctaggacgccacctagcacggagactcgtgcaggtgggggtgacagacgtcttctccgtgccgggtgactttaacctcaccctcctcgaccacctcatcgcggagccgcagttgaaaaacataggatgttgtaacgaactcaatgccgggtacgctgctgacggctacgcgcggtgcaggggcgtgggcgcgtgtgtcgtcacgtttactgttggaggactgagtgtaatcaacgcgattgcgggcgcgtacagcgagaatcttccgctgatctgtattgtgggtgggcccaatacgaacgattttggtaccaacagaatcttgcatcacaccattggattgtccgatttcagccaggagctcaggtgcttccaaacagttacatgctatcaggctgtggtgaataacatagaagatgctcatgaattgattgatactgcaatctcaacctgcctgaaagaaagcaagcctgtgtacataagcataagttgtaacttgcctggcattcctcaccccacattcagtcgcgagccggttccattttctctgtctccaagattgagtaacaagatggggttggaggctgcagtggaagcagcagcagagttcctaaacaaggcagtgaagcctgtaatggttggaggtcctaaactaagggtggctaatgcatgtgatgcatttgttgagcttgctgatgcatgtggctatccatttgctgtgatgccatcagccaagggactagtcccggagcacaaaccccacttcattggcacattctggggtgctgtgagcaccgcattctgtgctgaaatcgtcgaatctgctgatgcatacttgtttgctggccccattttcaatgactacagctctgttgggtactcactcctcctcaagaaggagaaggccatcatcgtgcagccggagcgcgttgtgatctccaatggacccgcattcgggtgtgtcctcatgaaggacttcctcagggaactcgcaaagcgtctcaagcacaacaacactgcttatgaaaattactcaaggatttttgtccctgagggaaagcctgtgaaagctgaacccagagagcctttgagggttaatgttctgtttaagcatatacaagatatgctgtctggcgaaaccgcggtgattgctgagacaggggactcttggtttaactgccagaagctgaagttgccaaaggggtgtgggtatgagttccaaatgcaatatggttcaattggttggtctgttggtgctacacttggttatgctcaggcggttcctgagaagcgagtgatttcttgcattggtgatggaagctttcaggtgacagctcaggatgtgtccacaatgctgcgaaatgagcagaagaccatcatcttcctgataaacaatggtggatacaccattgaagttgaaattcatgatgggccatacaatgtgattaagaactggaactacactggcttggttgatgcaatccacaatggtgaaggaaaatgctggaccactaaggttacatgtgaagaggagcttgttgaggcaattcagacagcaacaggtgacaagaaagattgcttgtgcttcattgaagtgattgttcacaaggatgacacaagcaaagaattgcttgaatggggctcaagggtttgtgctgctaacggtcgtcctcccaatcctcagtgaatttcaaacacttaattgagccattacaaatttgctggagtttctccctatttcaaacacttactcttgctgatagaaaaaagaaaatagaacaatttaatttcatgttttatttaacaaagacaataactaccatgagatttacttatatttatttttaaataaaattgagttttttaattagctttcgtacgagagaaattttccttttggaaatgctttttcagtttatctaaagtgttcaaatgagtgcactagattttagtaaatttctcatgggacaaaagttatcatcaatttttcc

SEQ ID NO: 4092 - protein, 607 aa, Glycine max
MDTNIGSLSLDACKPANNDVGCPPNGAVSAIKPSVPATTMTSSDATLGRHLARRLVQVGVTDVFSVPGDFNLTLLDHLIAEPQLKNIGCCNELNAGYAADGYARCRGVGACVVTFTVGGLSVINAIAGAYSENLPLICIVGGPNTNDFGTNRILHHTIGLSDFSQELRCFQTVTCYQAVVNNIEDAHELIDTAISTCLKESKPVYISISCNLPGIPHPTFSREPVPFSLSPRLSNKMGLEAAVEAAAEFLNKAVKPVMVGGPKLRVANACDAFVELADACGYPFAVMPSAKGLVPEHKPHFIGTFWGAVSTAFCAEIVESADAYLFAGPIFNDYSSVGYSLLLKKEKAIIVQPERVVISNGPAFGCVLMKDFLRELAKRLKHNNTAYENYSRIFVPEGKPVKAEPREPLRVNVLFKHIQDMLSGETAVIAETGDSWFNCQKLKLPKGCGYEFQMQYGSIGWSVGATLGYAQAVPEKRVISCIGDGSFQVTAQDVSTMLRNEQKTIIFLINNGGYTIEVEIHDGPYNVIKNWNYTGLVDAIHNGEGKCWTTKVTCEEELVEAIQTATGDKKDCLCFIEVIVHKDDTSKELLEWGSRVCAANGRPPNPQ

SEQ ID NO: 4093 - DNA, 2139 bp, Glycine max
  CDS (132)..(1958)
attcaagtcctaaaataccaaaaacccattcacttttccacaagccttagttcttctcatttattctctttttcaaaatactttcactctctctaaccttccagttctcactaaacctcgtgaagctcgtgatggacaccaagataggttcactagacgcgcccaagcccaacagcaacgacgtcgtatcatgcaacctcaccagcagcgccgccatccagccctgcttgccggcgacggtgatcaacggcgccggctgtagtgactccaccttgggcggccacctggcccgccggctggtggaaatcggcgtcaccgacgtgttctccgttcccggggacttcaacctgacgctgctggaccacctcatcgcggagccggcgctgcacctggtcgggtgctgcaacgagctcaacgccgggtacgccgccgacggctacgcgcgcgccaggggagtcggcgcgtgcgtggtgacgttcaccgtcggcggcctcagcgtgctcaacgccatcgccggagcgtacagcgagaacttgccgctaatttgcatcgtcggtgggcccaactccaacgactacggcaccagtcggatcctccatcacaccatcgggttacccgatttcagccaggagctaaggtgctttcagaccattacttgcttccaggctgtggtgaataacttggaagatgctcatgagttgattgatacagcaatctcaactgcgctgaaagaaagcaaacctgtgtatataagcattagctgtaacttgcctgggattcctcaccccactttcagtcgtgaccctgttcgtttttcattgtctccaagattgagtaataagatggggttggaggccgcagtggaggcagcggcggaattccttaacaaggcagtgaaaccagtgctggtaggtggtcctaaactgagggtggcaacagcatctgatgcctttgtcgaactggctgatgcgtgtggttatgcgcttgctgtgatgccgtcggctaaagggcaggttccagagcaccatccccattttatcggaacttattggggtgctgtgagcactgccttctgtgctgagattgtggagtctgcggatgcatacttgtttgctggtccaatttttaatgactacagctctgtggggtattcacttcttctcaagaaggagaaggcgatcattgtgcagcctgatcgggttgtgatcgcgaatggacctgcttttgggtgtgtgctgatgaaggatttcctcaaggcactcgcaaagcgcctcaagcacaacaatactgcatatgaaaattaccacaggatatttgtccctgatgggcatcctttgaaggctgcacccagagagcctttgagggttaatgttctgttccaacatatacaaaatatgctgtctggtgaaactgctgtaattgctgagacaggggactcctggtttaattgccaaaagctgaaattgccaaaggcatgtgggtatgagttccaaatgcaatatggttcaattggatggtctgttggtgctactctgggttatgctcaagccgttcctgagaagcgagtgattgcctgcattggtgatggaagttttcaggtgactgcccaagatgtatcgacaatgttacggtgcgggcaaaaaaccatcatctttctgatcaacaatggtggatacaccatcgaggttgaaattcatgatgggccgtacaatgtgattaagaactggaattacactgggttgattgatgcaatccacaatggtgaagggaaatgctggactgccaaggtgttctgtgaagaggagctagttgaagcaattgccacagccacaggacccaagaaagactccttatgcttcattgaggtgattgttcataaggatgacaccagtaaagaattgcttgaatggggctcaagggtttctgctgccaatagccgtcctcccaatcctcagtaatcttcagaatttatcctatgactaaattgctgcagttgccctttagctctatgaaagtgagaatcatttgagatgatgcccttgtagggaatttacctttgttaatggcttgaaacatttatgctaaactgactccccacttgtttgtgtaaattctttcacttttgttcacctttgtttg

SEQ ID NO: 4094 - protein, 608 aa, Glycine max
MDTKIGSLDAPKPNSNDVVSCNLTSSAAIQPCLPATVINGAGCSDSTLGGHLARRLVEIGVTDVFSVPGDFNLTLLDHLIAEPALHLVGCCNELNAGYAADGYARARGVGACVVTFTVGGLSVLNAIAGAYSENLPLICIVGGPNSNDYGTSRILHHTIGLPDFSQELRCFQTITCFQAVVNNLEDAHELIDTAISTALKESKPVYISISCNLPGIPHPTFSRDPVRFSLSPRLSNKMGLEAAVEAAAEFLNKAVKPVLVGGPKLRVATASDAFVELADACGYALAVMPSAKGQVPEHHPHFIGTYWGAVSTAFCAEIVESADAYLFAGPIFNDYSSVGYSLLLKKEKAIIVQPDRVVIANGPAFGCVLMKDFLKALAKRLKHNNTAYENYHRIFVPDGHPLKAAPREPLRVNVLFQHIQNMLSGETAVIAETGDSWFNCQKLKLPKACGYEFQMQYGSIGWSVGATLGYAQAVPEKRVIACIGDGSFQVTAQDVSTMLRCGQKTIIFLINNGGYTIEVEIHDGPYNVIKNWNYTGLIDAIHNGEGKCWTAKVFCEEELVEAIATATGPKKDSLCFIEVIVHKDDTSKELLEWGSRVSAANSRPPNPQ

SEQ ID NO: 4095 - DNA, 2604 bp, Glycine max
  CDS (1)..(2604)
atgttcagcttcggtgattcacttgcagacactggcaacttgtatctcagttcccacccacccaccgaccactgctttttccctccctacggtcaaaccttctttcaccatgtctctggacgctgctctgatggccgcctcatcatcgatttcatcgctgagtcactgggacttccactggtgaaaccgtattttggtggatggaatgtggaagagggagccaattttgctgttattggagccactgcgttagactacagtttctttcaagacaggggcatttccattccaaccaattattctttaacaattcaattgaactggttcaaggaattgcttactgctctctgcaattcatccacaaattgccatgaaattgttgagaactcattatttcttatgggtgaaatcggaggaaacgatttcaattatcttttctttcaacaaaagagcatagcagagattaaatcatatgtgccatatgtgatcaatgcaatagcttcagctatcaatgaattgattggtctaggcgctcgcacgctcatggttcctgggaatttaccaataggatgtagtgtaatttatttaacgatttatgaaaccatagataaaacccagtatgaccaatttgggtgtttgaagtggttaaacgagtttggtgaatattacaaccataaactacaaagtgaattagataagcttcgagtatttcatcctcgtgctaatatcatttatgcagattattacaatgctgcattgcctttatatcgtgatcccacaaagtttgtcacagtcacagtcacagacacacgtcaaaatatccaatcatttcacatggaaagtgccactcaagtcggtgcggcggctcagcccagctcagcttcagcgtcggtgattccctccgccttcgacggcaccctgggccgtcaccttgctcgccgcctcgccgagaccggtgtcagggacgtcttctccgttcccggcgacttcaacttgacgctcctcgaccacctcatcgccgagccgagtctcaacctcgtcggctgctgcaacgagctcaacgccggctacgccgccgacggctacgcgcgcgccaagggcgtcggcgcctgcgtggtcaccttcaccgtcggcggactcagcgtcctcaacgccatcgccggagcttacagcgagaatttgccagtgatttgcatcgtcggaggacccaattccaacgactacggcaccaaccggatcctccaccacaccatcggtttacccgatttcacccaagagcttcggtgctttcaggccatcacgtgttttcaggcagtggtgaataacttggacgatgcgcatgaacttattgacactgcaatttctactgctttgaaggaaagcaagcctgtttatatcagcataagttgtaaccttcctggaattcctcatccaacttttgctagagaccccgtgccattctttcttgcacctaaggtaagcaatcaagaaggattagaagcagcagtggaagcaacggctgctttactgaacaacgctgtgaagccagtgattgtgggtgggccaaaactaagggtagcaaaggcacaaaaggcctttctggagtttgcagaagcaagtggatatccaatagcagttatgccgtccgggaagggactagtaccagagcatcatccacatttcattgggacatactggggtgctgtcagctctagcttttgtggggaaattgtggagtctgctgatgcatatgtttttgttggccccatcttcaatgactatagctccgttggatactcgttgttgataaagaaggagaaagccataatagtgcagcctaatcgggtaaccattggcaatggtccttccttgggctgggttttcatggctgatttcttaactgcattggctaaaaaagtgaagaccaacaccgcagctgtggagaattaccggcgtatctatgtcccaccaggcattcctctgaggcgagagaaggatgaaccacttagagttaatgttctattcaagcacattcaagaactgctaagcggagatactgctgtaatagctgaaactggagactcatggttcaactgtcagaagctccatctgcctgagaattgcgggtatgaattccagatgcagtatggatccattggttggtcagtaggtgctactcttggatatgcacaggctgcaacagacaagcgtgtaattgcttgcattggtgatggcagttttcaggtaacagcacaggatatttcaacaatgattcgctgtggacaaaagaccatcatctttctcatcaataatggaggttatacaattgaagttgagattcatgatggtccatacaatgtgataaagaattgggactacactcgctttgtggacgctatccataatgggcaaggcaaatgctggactgccaaggtacgtacagaggatgatctgactgaagcaattgcaaaagctactggaccacagaaagattcactatgttttatagaagtttttgtacacaaggatgacaccagcaaagaattgctggaatggggatctcgtgttgctgctgctaacagtcgtcctcctaatcctcaatag

SEQ ID NO: 4096 - protein, 867 aa, Glycine max
MFSFGDSLADTGNLYLSSHPPTDHCFFPPYGQTFFHHVSGRCSDGRLIIDFIAESLGLPLVKPYFGGWNVEEGANFAVIGATALDYSFFQDRGISIPTNYSLTIQLNWFKELLTALCNSSTNCHEIVENSLFLMGEIGGNDFNYLFFQQKSIAEIKSYVPYVINAIASAINELIGLGARTLMVPGNLPIGCSVIYLTIYETIDKTQYDQFGCLKWLNEFGEYYNHKLQSELDKLRVFHPRANIIYADYYNAALPLYRDPTKFVTVTVTDTRQNIQSFHMESATQVGAAAQPSSASASVIPSAFDGTLGRHLARRLAETGVRDVFSVPGDFNLTLLDHLIAEPSLNLVGCCNELNAGYAADGYARAKGVGACVVTFTVGGLSVLNAIAGAYSENLPVICIVGGPNSNDYGTNRILHHTIGLPDFTQELRCFQAITCFQAVVNNLDDAHELIDTAISTALKESKPVYISISCNLPGIPHPTFARDPVPFFLAPKVSNQEGLEAAVEATAALLNNAVKPVIVGGPKLRVAKAQKAFLEFAEASGYPIAVMPSGKGLVPEHHPHFIGTYWGAVSSSFCGEIVESADAYVFVGPIFNDYSSVGYSLLIKKEKAIIVQPNRVTIGNGPSLGWVFMADFLTALAKKVKTNTAAVENYRRIYVPPGIPLRREKDEPLRVNVLFKHIQELLSGDTAVIAETGDSWFNCQKLHLPENCGYEFQMQYGSIGWSVGATLGYAQAATDKRVIACIGDGSFQVTAQDISTMIRCGQKTIIFLINNGGYTIEVEIHDGPYNVIKNWDYTRFVDAIHNGQGKCWTAKVRTEDDLTEAIAKATGPQKDSLCFIEVFVHKDDTSKELLEWGSRVAAANSRPPNPQ

SEQ ID NO: 4097 - DNA, 2138 bp, Glycine max
  CDS (119)..(1942)
attcaaaaccccaaataccattcaactcttgtcatttttttcactttctctttttcaaaatactcttagtctctctctaaccttcttccagttgtctctaaacctcttgaaatccgtgatggataccaggataggttcactcgacgcggccaagcccgcctgcaacgacgtcgtatcgtgcaaccacaccaccagcgccgccatccagccctgcgtgccggcgacggtgatcaacggcgccggcggagactccactttaggcggccacctggcacgccggctggtcgaaatcggcgtcaccgacgtgttctccgttcccggggacttcaacctgacgctgctggaccacctgatcgcagagccggcgctgaacctggtcgggtgctgcaatgagctcaacgccgggtacgccgccgatggctacgcgcgcgccaggggagtcggcgcgtgcgtggtgactttcaccgtcggcgggcttagcgtgctcaacgccatcgctggagcgtacagcgagaatttgccgctgatttgcatcgtcggtgggcccaactccaacgactacggcaccagtcggatcctccaccacaccatcgggttacccgatttcagccaggagttgaggtgcttccagaccattacttgcttccaggctgtggtgaataacttggaagatgctcatgagttgattgatacagcaatctcaactgcactgaaagaaagcaagccggtgtatataagcattagctgtaacttgcctgggattcctcaccccactttcagtcgtgatcctgttcctttttcgttatctccaagattgagtaacaagatggggttggaggctgcagtggaggcagcggcagaattccttaacaaggcagtgaaaccagtgctggtgggtggtcctaaactgagggtggcaacggcatctgatgcctttgttgaactggctgatgcgtgtggttatgcgcttgctgtgatgccatcggctaaagggcaggttccagagcaccatccccatttcatcggaacttattggggtgctgtgagcactgccttctgtgctgagattgtggagtctgcggatgcatacttgtttgctggtcccatttttaatgactacagctctgtggggtattcgctccttctcaagaaggagaaggcgatcattgtgcagcctgatcgggtggtgatcgcaaatggacctgcatttggttgtgtgctgatgaaggatttccttaaggcacttgcaaagcgcctcaagcacaacaatactgcatatgaaaattaccacaggatatttgtccctgaaggacatcctttgaaggctacacccagagagcctttgagggttaatgttcttttccaacatatacagaagatgctgtctggtgaaactgctgtaattgctgagacaggggattcctggtttaactgccaaaagctgaaattgccaaagggatgtgggtatgagttccaaatgcaatatggttcaattggatggtctgttggtgctactcttggttatgctcaggctgttcctgagaagcgagtgattgcctgcattggtgatggaagttttcaggtgactgcccaagatgtatcaacaatgttgcggtgtgggcaaaagaccattatctttctggtcaacaatggcggatacaccattgaggttgaaattcatgatgggccatacaatgtgattaagaactggaactacactgggttgattgatgcaatccacaatggtgaagggaaatgctggactgccaaggtgttctgtgaagaggagctagttgaagcaattgccacagccacaggacacaagagagactccttatgcttcattgaggtgattgttcacaaggatgacaccagcaaagaattgcttgaatggggctcacgagtctctgctgccaatagccgtccccccaatcctcagtaaacttcagatgtcggcctatgattaaattgctgcaattgccctttagctctatgaaattgagaatcatttgagatgttgtccttgtaggaaatttacctttgttaatggcttgaaatatttatgcaaaactgagtccccacttgtttgtgtaaattctttcacttgagataaaaatatatccatcacctttgttcct

SEQ ID NO: 4098 - protein, 607 aa, Glycine max
MDTRIGSLDAAKPACNDVVSCNHTTSAAIQPCVPATVINGAGGDSTLGGHLARRLVEIGVTDVFSVPGDFNLTLLDHLIAEPALNLVGCCNELNAGYAADGYARARGVGACVVTFTVGGLSVLNAIAGAYSENLPLICIVGGPNSNDYGTSRILHHTIGLPDFSQELRCFQTITCFQAVVNNLEDAHELIDTAISTALKESKPVYISISCNLPGIPHPTFSRDPVPFSLSPRLSNKMGLEAAVEAAAEFLNKAVKPVLVGGPKLRVATASDAFVELADACGYALAVMPSAKGQVPEHHPHFIGTYWGAVSTAFCAEIVESADAYLFAGPIFNDYSSVGYSLLLKKEKAIIVQPDRVVIANGPAFGCVLMKDFLKALAKRLKHNNTAYENYHRIFVPEGHPLKATPREPLRVNVLFQHIQKMLSGETAVIAETGDSWFNCQKLKLPKGCGYEFQMQYGSIGWSVGATLGYAQAVPEKRVIACIGDGSFQVTAQDVSTMLRCGQKTIIFLVNNGGYTIEVEIHDGPYNVIKNWNYTGLIDAIHNGEGKCWTAKVFCEEELVEAIATATGHKRDSLCFIEVIVHKDDTSKELLEWGSRVSAANSRPPNPQ

SEQ ID NO: 4099 - DNA, 1812 bp, Glycine max
  CDS (1)..(1812)
atgaacactaacatcctcggcgactgcaagtccggaaacagtgacgtcgggtgtcccccgaatggcaccgtctcggtgatcaagaactccgtccctgccaccgcaatcacctcctcggatgccacgctagggcgtcacctggctcgaagactagtccaggtgggtgtgaaggacgttttctccgtgccaggtgactttaacctcaccctcctcgaccacctcatcgcggagccgcagttgaaaaacgttggatgctgcaacgaacttaatgctggatacgctgcggacggctacgcgcggtgcaggggcgtgggcgcgtgtgctgtcacgtttactgtgggagggttgagtgtgataaacgcgattgcgggcgcgtacagtgagaaccttccgctgatttgtatcgttggtgggcccaacacgaacgactttggtactaacaggatcttgcatcacaccattgggtcgccagatttcagccaagagctcaggtgcttccaaacagttacttgctatcaggctgtggtgaataacatagaagatgcacatgaaatgattgatactgcgatctcaacctgtctgaaagaaagcaagcctgtgtacataagcataagttgtaacttgcctggcattcctcaccccacattcagtcgtgagccagttccattttctctgtctccaaaattgagtaacaagatggggttggaggcagcagtggaagcagcagcagagttcctaaacaaggcagtgaagcctgtaatggttggtggtccaaaattaagggtggctaaggcatgtgatgcatttgttgaacttgctgattcatgtggttatccatttgctgtgatgccatcagccaagggactagtccctgagcaccatccccacttcattggcacattctggggtgctgttagcaccgcattctgcgctgagatcgtcgaatccgctgatgcatacctgtttgctggccccattttcaatgactacagctctgttgggtactcactcctcctcaagaaggagaaggccatccttgtgctgccagaccgtgttgtgatctcgaacggacccacgttcgggtgtgtcctcatgatggatttcctcaaggaactagcaaagaggctcaagcataataacactgcttatgagaactactccaggatttttgtccctgatggaaagccattgaaggctgaacccagagagcctttaagggttaatgttctgtttaagcatgtgcaagatatgctgtctagcgaaactgcggtgattgctgagacaggggactcttggtttaactgccagaagctgaagttgccaaaggggtgtgggtatgagttccaaatgcaatatggttcaattggttggtctgttggtgcaactcttggttatgctcaggctgttcctgagaagagagtgatttcttgcattggtgatggaagctttcaggtgacagctcaggatgtgtccacaatgctgagaaatgagcagaagagcatcatcttcctgataaacaatggtggatacactattgaagttgaaattcatgatgggccatacaacgtgattaaaaactggaactacactggcttggttgatgcaatccacaatggtgaaggaaaatgctggaccactaaggttacatgtgaagaagagcttgttgaggcaattcagacagcaacaggagtcaagaaggattgcttgtgcttcattgaggtaattgttcacaaggatgacacaagcaaagaattgcttgaatggggctctagggtttgtgctgctaacggtcgtcctcccaatcctcagtga

SEQ ID NO: 4100 - protein, 603 aa, Glycine max
MNTNILGDCKSGNSDVGCPPNGTVSVIKNSVPATAITSSDATLGRHLARRLVQVGVKDVFSVPGDFNLTLLDHLIAEPQLKNVGCCNELNAGYAADGYARCRGVGACAVTFTVGGLSVINAIAGAYSENLPLICIVGGPNTNDFGTNRILHHTIGSPDFSQELRCFQTVTCYQAVVNNIEDAHEMIDTAISTCLKESKPVYISISCNLPGIPHPTFSREPVPFSLSPKLSNKMGLEAAVEAAAEFLNKAVKPVMVGGPKLRVAKACDAFVELADSCGYPFAVMPSAKGLVPEHHPHFIGTFWGAVSTAFCAEIVESADAYLFAGPIFNDYSSVGYSLLLKKEKAILVLPDRVVISNGPTFGCVLMMDFLKELAKRLKHNNTAYENYSRIFVPDGKPLKAEPREPLRVNVLFKHVQDMLSSETAVIAETGDSWFNCQKLKLPKGCGYEFQMQYGSIGWSVGATLGYAQAVPEKRVISCIGDGSFQVTAQDVSTMLRNEQKSIIFLINNGGYTIEVEIHDGPYNVIKNWNYTGLVDAIHNGEGKCWTTKVTCEEELVEAIQTATGVKKDCLCFIEVIVHKDDTSKELLEWGSRVCAANGRPPNPQ

SEQ ID NO: 4101 - DNA, 1821 bp, Zea mays
  CDS (1)..(1821)
atggacacccacatcggatccgtgaacggggcggcgtcgaaccagacggttggctgcccggcgtcggcgccggggtgcccgatggcgtccacgccggcgcagcccgcggcgaccctgtcggcgggggaggcgtcgctggggcgccacctcgcgcgtcgcctcgtgcaggtcggcgtcaacgatgtattcgcggttccgggggacttcaacctcacgctgctcgaccacctgatcgccgagcccggcctgcgcctcgtcggctgctgcaacgagctcaacgccgggtacgccgccgacgggtacgcgcgcgcgcgcggcgtcggggcctgcgccgtcacgttcacagtcggggggctcagcgtgctcaacgccatcgcgggcgcctacagcgagaacctgcccgtcatctgcatcgccggcgggcccaactccaacgactacgggaccaaccgcatcctccaccacaccatcggcctccccgacttctcgcaggagctccgctgcttccagaccgtcacctgccatcaggcggtggtgaacaatctggatgacgcgcacgagcagatcgacacggccattgccacggcactgagggagagcaagcccgtgtacctcagcatcagctgcaacctccctgggctgcctcatcctaccttcagccgcgacccagtgcccttcttcctcacccccaggacgagcaacaagatggggctagaggctgcagtggaggcaactgtcgaattcctgaacaaggcggtgaagccagtccttgtcgccggccccaaactgcgtgtggcaaaggcaggaaaggcatttgtcgatatggtagatgccagtggctatgcctatgccgtgatgccatcggccaagggtcttgtgccagagactcacccccacttcatcggcacctactggggcgccgtcagcaccgccttctgtgcggagattgttgagtccgcagatgcctacctctttgcaggccccattttcaatgactacagctctgttggctactcattcctcctcaagaaggaaaaggccatcatcgtccagcctgagcgtgtgatagtggggaatgggccggcattcggatgtgtgatgatgaaagagttcttgtctgaattggctaagagggttaataagaacaccactgcctatgagaattacaagaggatctttgtacctgagggccagccgctggaaagcgagccaaatgagccactgcgagtgaatgtgctcttcaagcacgtccagaagatgttgactggtgatagcgcggtgattgctgagactggtgactcctggttcaactgccagaagcttaagctgccagaaggctgtgggtatgaattccaaatgcagtatggttcgattggatggtcagtgggtgcattgctcggatatgctcagggtgcgaaccacaagcgtgtgattgccttcattggtgatgggagcttccaggttacagcacaggatgtgtcaactatgctgcgatgtgagcagaacagcataatcttcctgatcaacaacggtgggtacacgattgaggtggaaatccatgacgggccatacaacgtcatcaagaactggaactacactggctttgtggacgccatccacaatggcttgggcaagtgctggacctccaaggtgaagagcgaggaggagctgacggctgccattgagacagcgctaggggagaagaaggactgcctgtgcttcatcgaggtgatcgcgcacaaggacgacaccagcaaagagctgctggaatggggctctagggtttctgccgccaactcccggccaccaaatcctcagtag

SEQ ID NO: 4102 - protein, 606 aa, Zea mays
MDTHIGSVNGAASNQTVGCPASAPGCPMASTPAQPAATLSAGEASLGRHLARRLVQVGVNDVFAVPGDFNLTLLDHLIAEPGLRLVGCCNELNAGYAADGYARARGVGACAVTFTVGGLSVLNAIAGAYSENLPVICIAGGPNSNDYGTNRILHHTIGLPDFSQELRCFQTVTCHQAVVNNLDDAHEQIDTAIATALRESKPVYLSISCNLPGLPHPTFSRDPVPFFLTPRTSNKMGLEAAVEATVEFLNKAVKPVLVAGPKLRVAKAGKAFVDMVDASGYAYAVMPSAKGLVPETHPHFIGTYWGAVSTAFCAEIVESADAYLFAGPIFNDYSSVGYSFLLKKEKAIIVQPERVIVGNGPAFGCVMMKEFLSELAKRVNKNTTAYENYKRIFVPEGQPLESEPNEPLRVNVLFKHVQKMLTGDSAVIAETGDSWFNCQKLKLPEGCGYEFQMQYGSIGWSVGALLGYAQGANHKRVIAFIGDGSFQVTAQDVSTMLRCEQNSIIFLINNGGYTIEVEIHDGPYNVIKNWNYTGFVDAIHNGLGKCWTSKVKSEEELTAAIETALGEKKDCLCFIEVIAHKDDTSKELLEWGSRVSAANSRPPNPQ

SEQ ID NO: 4103 - DNA, 1833 bp, Zea mays
  CDS (1)..(1833)
atggagaccctcctggctggcaaccccgccaacggcgtggcgaagccgacgtgcaacggcgtcggcgccctgcccgtggccaactcccacgccatcatcgccacgccggcggcggctgcggcgacgctggccccggctggcgccacgctcggccggcacctggcgcgccgcctcgtgcagatcggcgcctccgacgtcttcgccgtcccgggggacttcaacctcaccctgctcgactacctcatcgccgagccgggcctgaccctcgtcggctgctgcaacgaactcaacgccgggtacgccgccgacgggtacgcgcggtcgcggggcgtcggcgcctgcgccgtcacgttcaccgtcggtgggctcagcgtgctcaacgccatcgccggcgcgtacagcgagaacctccccgtcgtctgcatcgtgggcgggcccaactccaacgactacggcaccaaccgcatcctgcaccacaccatcggcctccctgacttctcccaggagctccgctgcttccagacgatcacctgctaccaggccatcatcaacaacctggacgacgcgcatgagcagatcgacacggccatcgcgacggcgctgagggagagcaagcccgtgtacatcagcgtcagctgcaacctggccggcctctcccacccgaccttcagccgggatccggtgcccatgttcatctcgccgaggctgagcaacaaggccaacctggagtacgccgtggaggcggcggccgacttcctcaacaaggcggtgaagccggtgatggtgggcgggcccaagatccgggtggccaaggccagggaggcgttcgccgccgtcgcggacgccagcgggtaccctttcgccgtcatgccggccgccaagggcctggtgccggagcaccacccgcgcttcatcggcacctactggggcgccgtcagcaccaccttctgcgccgagatcgtggagtccgccgacgcctacctcttcgccgggcccatcttcaacgactacagctccgtcggctactccctcctgctcaagcgggagaaggccgtcatcgtgcagcccgaccgcatggtggtcggcgacggcccggcgttcggctgcatcctcatgcccgagttcctccgcgcgctcgccaagcgcctcaggcgcaacaccacggcgtacgacaactaccgccgcatcttcgtccccgaccgcgagccgcccaacggcaagcccaacgagccgcttagggtcaacgtcctcttcaagcacatcaagggcatgctgtccggcgactccgcggtcgtcgccgagaccggcgactcgtggttcaactgccagaagctcaggctccccgagggctgcggctacgagttccagatgcagtacggctccatcgggtggtcggtcggcgcgacgctcgggtacgcccaggcggccaaggacaagcgtgtcatcgcgtgcatcggcgacggaagcttccaggtgacggcgcaggacgtgtccacgatgctccggtgcgggcagaagagcatcatcttcctcatcaacaacggcggctacaccatcgaggtggagatccacgatggcccgtacaacgtgatcaagaactgggactacacgggcctggtcaacgccatccataactccgagggcaactgctggaccatgaaggttcggacggaggagcagctcaaggaggcgatcgccatggcgacgggcgacaagaaagactgcctctgcttcatcgaggtaatcgtgcacaaggacgacacgagcaaggagctcctcgagtgggggtccagggtctccgccgccaacagcaggccgcccaacccccagtga

SEQ ID NO: 4104 - protein, 610 aa, Zea mays
METLLAGNPANGVAKPTCNGVGALPVANSHAIIATPAAAAATLAPAGATLGRHLARRLVQIGASDVFAVPGDFNLTLLDYLIAEPGLTLVGCCNELNAGYAADGYARSRGVGACAVTFTVGGLSVLNAIAGAYSENLPVVCIVGGPNSNDYGTNRILHHTIGLPDFSQELRCFQTITCYQAIINNLDDAHEQIDTAIATALRESKPVYISVSCNLAGLSHPTFSRDPVPMFISPRLSNKANLEYAVEAAADFLNKAVKPVMVGGPKIRVAKAREAFAAVADASGYPFAVMPAAKGLVPEHHPRFIGTYWGAVSTTFCAEIVESADAYLFAGPIFNDYSSVGYSLLLKREKAVIVQPDRMVVGDGPAFGCILMPEFLRALAKRLRRNTTAYDNYRRIFVPDREPPNGKPNEPLRVNVLFKHIKGMLSGDSAVVAETGDSWFNCQKLRLPEGCGYEFQMQYGSIGWSVGATLGYAQAAKDKRVIACIGDGSFQVTAQDVSTMLRCGQKSIIFLINNGGYTIEVEIHDGPYNVIKNWDYTGLVNAIHNSEGNCWTMKVRTEEQLKEAIAMATGDKKDCLCFIEVIVHKDDTSKELLEWGSRVSAANSRPPNPQ

SEQ ID NO: 4105 - DNA, 1782 bp, Zea mays
  CDS (1)..(1782)
atggacacggcgatcggctccgtcccggcagcctccgacgcggcgcgtcacccagcgccgtccgcgtccgccccgcgcgacgcgacgctgggccggcacctggcgcggcgcctggcggaggtgggcgcccgggacgtgttcacggtgccgggggacttcaacctcacgctcctcgacgagctggaggccgagccgggcggcgtccgcctcgtcggctgctgcaacgagctcaacgcggcgtacgcggccgacgggtacgcccgcgcgcgcgccggcggggtcggcgcctgcgccgtcaccttcaccgtcggcggcctcagcgccatcaacggcgtcgccggcgccttcagcgagaacctccccgtcgtgtgcatcgtcggcggacccaacagcaacgactacgggagtaacaggatcctgcaccataccatcggcttgcctgatttcacgcaggagctcaggtgcttccagaacgtcacgtgctatcaggctgtggtgaacaacttggaagatgcgcatgagcagatcgacactgccatctccacggcaatcaaggagagcaagcctgtttacattagcatcagctgcaacctcccttcgatcccacatcccaccttcagccgccatcccgtccctttcttcctctccccaaggctatcgaaccagatgaacctggaggctgcagtggaagccgccgcggctttcttgaacaaagccgtcaagccagtgcttgtaggtgggccaaagatgagggtgtccaaagcatgggaagccttggcagagctggcagatgcctgcggctatcccgttgccgtgatgccttctgcgaaggggctagtgccagtgcaccactctaggttcattggcacgtactggggtgcggtgagcactccattctgtgctgagatcgtcgagtctgccgatgcctacctatttgctggccccgtattcaacgactacagctcggttgggtactcgctgctcctcaagaaggagaaggccatcattgtccaaccagagcgggtggtggtcgggcatggacccgcgtttgggtgtgttctgatgaaggatttccttcatgcccttgcaacccgtctgaagaagaacactgtcgcgtatgagaactaccgtcgaatttatgtgcctccaggcgaaccactttcatctgaacctggcgagccgttgagagtgaacgtgctcttcaagcatattcaggcaatgctgtccggcgacatggctgtcatcgcagagactggggactcgtggtttaactgccagaagctgaagctaccggaaggatgtgggtacgaattccagatgcagtatggatcaattggctggtcagtgggcgcaactctaggatacgcacaggctgccaaggataaacgtgtcattgcctgcattggagacggcagctttcaggtgacggcacaagaagtgtcaacgatgctccggtgggggcagaacagcatcatcttcctgataaacaatggagggtacacaatcgaggtggagattcacgatggcccttataacgttatcaagaactggaactacaccggtctggtggaagcgttccacaatggcgagggcgcgtgctacacagcaaaggttcgaacagaggaggagctgacggaggcgctggaggcagctctaggacctaagaaggactgcttatgcttcatcgaggtcatcgtgcataaggatgacaccagcaaagcgcttctcgagtggggatctagggtttctgcggcgaatagccgtccacctaatcctcagtga

SEQ ID NO: 4106 - protein, 593 aa, Zea mays
MDTAIGSVPAASDAARHPAPSASAPRDATLGRHLARRLAEVGARDVFTVPGDFNLTLLDELEAEPGGVRLVGCCNELNAAYAADGYARARAGGVGACAVTFTVGGLSAINGVAGAFSENLPVVCIVGGPNSNDYGSNRILHHTIGLPDFTQELRCFQNVTCYQAVVNNLEDAHEQIDTAISTAIKESKPVYISISCNLPSIPHPTFSRHPVPFFLSPRLSNQMNLEAAVEAAAAFLNKAVKPVLVGGPKMRVSKAWEALAELADACGYPVAVMPSAKGLVPVHHSRFIGTYWGAVSTPFCAEIVESADAYLFAGPVFNDYSSVGYSLLLKKEKAIIVQPERVVVGHGPAFGCVLMKDFLHALATRLKKNTVAYENYRRIYVPPGEPLSSEPGEPLRVNVLFKHIQAMLSGDMAVIAETGDSWFNCQKLKLPEGCGYEFQMQYGSIGWSVGATLGYAQAAKDKRVIACIGDGSFQVTAQEVSTMLRWGQNSIIFLINNGGYTIEVEIHDGPYNVIKNWNYTGLVEAFHNGEGACYTAKVRTEEELTEALEAALGPKKDCLCFIEVIVHKDDTSKALLEWGSRVSAANSRPPNPQ

SEQ ID NO: 4107 - DNA, 1665 bp, Clostridium acetobutylicum ATCC 824
  CDS (1)..(1665): transl_table=11
ttgaagagtgaatacacaattggaagatatttgttagaccgtttatcagagttgggtattcggcatatctttggtgtacctggagattacaatctatcctttttagactatataatggagtacaaagggatagattgggttggaaattgcaatgaattgaatgctgggtatgctgctgatggatatgcaagaataaatggaattggagccatacttacaacatttggtgttggagaattaagtgccattaacgcaattgctggggcatacgctgagcaagttccagttgttaaaattacaggtatccccacagcaaaagttagggacaatggattatatgtacaccacacattaggtgacggaaggtttgatcacttttttgaaatgtttagagaagtaacagttgctgaggcattactaagcgaagaaaatgcagcacaagaaattgatcgtgttcttatttcatgctggagacaaaaacgtcctgttcttataaatttaccgattgatgtatatgataaaccaattaacaaaccattaaagccattactcgattatactatttcaagtaacaaagaggctgcatgtgaatttgttacagaaatagtacctataataaatagggcaaaaaagcctgttattcttgcagattatggagtatatcgttaccaagttcaacatgtgcttaaaaacttggccgaaaaaaccggatttcctgtggctacactaagtatgggaaaaggtgttttcaatgaagcacaccctcaatttattggtgtttataatggtgatgtaagttctccttatttaaggcagcgagttgatgaagcagactgcattattagcgttggtgtaaaattgacggattcaaccacagggggattttctcatggattttctaaaaggaatgtaattcacattgatcctttttcaataaaggcaaaaggtaaaaaatatgcacctattacgatgaaagatgctttaacagaattaacaagtaaaattgagcatagaaactttgaggatttagatataaagccttacaaatcagataatcaaaagtattttgcaaaagagaagccaattacacaaaaacgtttttttgagcgtattgctcactttataaaagaaaaagatgtattattagcagaacagggtacatgcttttttggtgcgtcaaccatacaactacccaaagatgcaacttttattggtcaacctttatggggatctattggatacacacttcctgctttattaggttcacaattagctgatcaaaaaaggcgtaatattcttttaattggggatggtgcatttcaaatgacagcacaagaaatttcaacaatgcttcgtttacaaatcaaacctattatttttttaattaataacgatggttatacaattgaacgtgctattcatggtagagaacaagtatataacaatattcaaatgtggcgatatcataatgttccaaaggttttaggtcctaaagaatgcagcttaacctttaaagtacaaagtgaaactgaacttgaaaaggctcttttagtggcagataaggattgtgaacatttgatttttatagaagttgttatggatcgttatgataaacccgagcctttagaacgtctttcgaaacgttttgcaaatcaaaataattag

SEQ ID NO: 4108 - protein, 554 aa, Clostridium acetobutylicum ATCC 824
MKSEYTIGRYLLDRLSELGIRHIFGVPGDYNLSFLDYIMEYKGIDWVGNCNELNAGYAADGYARINGIGAILTTFGVGELSAINAIAGAYAEQVPVVKITGIPTAKVRDNGLYVHHTLGDGRFDHFFEMFREVTVAEALLSEENAAQEIDRVLISCWRQKRPVLINLPIDVYDKPINKPLKPLLDYTISSNKEAACEFVTEIVPIINRAKKPVILADYGVYRYQVQHVLKNLAEKTGFPVATLSMGKGVFNEAHPQFIGVYNGDVSSPYLRQRVDEADCIISVGVKLTDSTTGGFSHGFSKRNVIHIDPFSIKAKGKKYAPITMKDALTELTSKIEHRNFEDLDIKPYKSDNQKYFAKEKPITQKRFFERIAHFIKEKDVLLAEQGTCFFGASTIQLPKDATFIGQPLWGSIGYTLPALLGSQLADQKRRNILLIGDGAFQMTAQEISTMLRLQIKPIIFLINNDGYTIERAIHGREQVYNNIQMWRYHNVPKVLGPKECSLTFKVQSETELEKALLVADKDCEHLIFIEVVMDRYDKPEPLERLSKRFANQNN

SEQ ID NO: 4109 - DNA, 1812 bp, Arabidopsis thaliana (thale cress)
  CDS (1)..(1812)
atggacaccaaaattggagccatcgacacgtgtaagccaacaactggtgacatcggaagtccaccaagcaacgccgtcgcaacaatccaagactccgctcccatcaccacaacctccgaatcgactctaggacgtcacttatcccgccgtcttgtccaagccggagtcaccgatgttttctctgttcccggtgatttcaacctaactcttctcgaccacctcatcgccgagccagagctcaacaacatcggatgctgtaacgagcttaacgccggttacgccgccgatggatacgctcgatctcgtggagtcggtgcttgcgtcgtgactttcaccgttggtggactcagcgttttgaacgctatcgctggtgcgtacagtgagaacctaccagttatatgtatcgttggaggtcctaactccaacgattttggcactaaccggattcttcatcacaccatcggtttacctgactttagccaagagcttaggtgtttccaaactgttacttgctaccaggctgtggtgaacaatttggaggatgctcatgaacagatcgacaaggcgatagcaacagctttgaaagagagcaagcctgtgtacattagcatcagttgcaacttagctgcaactcctcatcctacgtttgctcgtgatcctgtcccttttgacctaactcctaggatgagcaacacgatgggtttagaagctgcggtggaagcaacattggagtttctgaacaaggcagtgaagccagttatggttggtggcccaaagttgcgtgtggctaaagcaagtgaggcctttttggagctagctgatgcttcaggctaccctctcgcagtgatgccttctacaaaaggccttgtaccagagaaccatcctcatttcattggcacttactggggagcagtaagcacacctttctgctctgagattgtcgaatctgcggatgcttacatcttcgcaggtccaatcttcaacgactacagctccgtaggttactctcttctcctcaagaaagaaaaagcaataattgtgcatcctgatcgagtcgttgtggctaatggtccaacgtttggttgcgttctgatgagcgatttcttcagggagttggctaagagggttaagcgtaacgagacagcttatgagaactatgagaggatctttgtacctgaaggtaagccattgaaatgcaaaccaggagagccattgagggtcaacgcaatgttccaacacattcagaagatgctctctagtgaaaccgctgtgattgctgaaactggtgattcttggttcaattgtcagaagctaaagctgcctaaaggatgtgggtacgagtttcagatgcagtatggatccattggttggtctgttggtgcgactctaggatacgcccaagcaaccccggagaagagagtgttgtctttcattggagatgggagtttccaagtgactgctcaggacatatccacgatgattcgtaacggacagaaggcgatcatcttcttgatcaacaacggtggctacaccattgaagttgagattcatgatggtccttacaatgttatcaagaactggaactacactggtcttgtcgatgctattcataacggtgaaggaaaatgctggaccacaaaggtgagatacgaggaggagttagtggaagcgattaagactgcgacaacggagaagaaagatagtctttgtttcattgaagtgattgttcacaaagatgatacaagcaaagagttgcttgagtggggatctcgcgtctcagctgctaatggtcgtcctcccaatcctcagtag

SEQ ID NO: 4110 - protein, 603 aa, Arabidopsis thaliana (thale cress)
MDTKIGAIDTCKPTTGDIGSPPSNAVATIQDSAPITTTSESTLGRHLSRRLVQAGVTDVFSVPGDFNLTLLDHLIAEPELNNIGCCNELNAGYAADGYARSRGVGACVVTFTVGGLSVLNAIAGAYSENLPVICIVGGPNSNDFGTNRILHHTIGLPDFSQELRCFQTVTCYQAVVNNLEDAHEQIDKAIATALKESKPVYISISCNLAATPHPTFARDPVPFDLTPRMSNTMGLEAAVEATLEFLNKAVKPVMVGGPKLRVAKASEAFLELADASGYPLAVMPSTKGLVPENHPHFIGTYWGAVSTPFCSEIVESADAYIFAGPIFNDYSSVGYSLLLKKEKAIIVHPDRVVVANGPTFGCVLMSDFFRELAKRVKRNETAYENYERIFVPEGKPLKCKPGEPLRVNAMFQHIQKMLSSETAVIAETGDSWFNCQKLKLPKGCGYEFQMQYGSIGWSVGATLGYAQATPEKRVLSFIGDGSFQVTAQDISTMIRNGQKAIIFLINNGGYTIEVEIHDGPYNVIKNWNYTGLVDAIHNGEGKCWTTKVRYEEELVEAIKTATTEKKDSLCFIEVIVHKDDTSKELLEWGSRVSAANGRPPNPQ

SEQ ID NO: 4111 - DNA, 1779 bp, Arabidopsis thaliana (thale cress)
  CDS (1)..(1779)
atggacgtccgaagtctaccaagcaacggcgtcgcaacaatccaagactccgctcccaccgccgcaaccatactcggctcctctgcagcgactcttggacgtcacttatcccgccgtcttgtccaagccggagtcaccgacattttcactgttcccggtgatttcaacctatctctgcttgaccagctcatcgccaacccggagctcaacaacatcgggtgctgtaacgagctaaacgccggttacgccgccgatggatacgctcgatctcgtggagtcggtgcttgcgtcgtgactttcaccgttggtggactcagcgttttgaacgctatcgctggtgcgtacagtgagaacctaccagttatatgtatcgttggaggtcctaactccaacgattttggcactaaccggattcttcatcacaccattggtttacctgattttagccaagagcttaggtgtttccaaactgttacttgctatcaggctgtggtgaaccatttagaggatgctcatgaacagatcgacaaggcgatagcaacagctctgagagagagcaagcctgtgtacattagcatcagctgtaacttagctgccattcctcatcctacatttgctagttatcctgtcccttttgacctaactccaaggttgagcaacaaggattgtttagaagctgccgtggaagcaacattggagtttctaaacaaggccgtgaagcccgttatggtcggtggtcccaagttgcgtgtggctaaagctagggatgcctttgtggagctagctgatgcttcaggctaccccgtggcagtgatgccatctgccaaaggctttgtcccagagaaccatcctcatttcattggcacttactggggagcagtgagcactcttttctgctctgagattgtcgagtccgcggatgcttacatcttcgcaggtccaatcttcaacgactacagctccgttggttactcacttctcctcaagaaagaaaaagccatcattgtgcatcctgatagtgtcgttgtggctaatggtcctacctttggttgcgttcggatgagcgaattcttcagggagttggctaagagggtgaaacctaacaagacggcttatgagaactaccatagaatctttgtccctgaaggtaagcctttgaaatgcaaaccaagagagcctttgagaatcaacgcaatgttccaacacattcagaagatgctctctaatgaaaccgctgtgattgctgaaactggtgattcttggttcaattgtcagaaacttaagctgcctaaaggatgtgggtacgagtttcaaatgcagtatggatcaattggttggtctgttggtgcgactctaggatacgctcaagcaacaccggagaagagagtgttgtctttcattggagacggaagtttccaagtgacggctcaggacgtttccacaatgattcgtaacggacagaagaccatcatcttcctgatcaacaacggtggctacaccattgaagttgagattcatgatggtccttacaatgtgatcaagaattggaactacactggtcttgtcgatgctattcataatggtgaaggcaaatgctggaccacaaaggtgagatacgaggaggagttagtggaagcgattaacacggcgacattggagaagaaagatagtctttgtttcattgaagtgattgttcacaaggatgatacgagcaaagagttgcttgagtggggctctcgcgtctcagctgctaatggtcgtcctcccaatcctcagtag

SEQ ID NO: 4112 - protein, 592 aa, Arabidopsis thaliana (thale cress)
MDVRSLPSNGVATIQDSAPTAATILGSSAATLGRHLSRRLVQAGVTDIFTVPGDFNLSLLDQLIANPELNNIGCCNELNAGYAADGYARSRGVGACVVTFTVGGLSVLNAIAGAYSENLPVICIVGGPNSNDFGTNRILHHTIGLPDFSQELRCFQTVTCYQAVVNHLEDAHEQIDKAIATALRESKPVYISISCNLAAIPHPTFASYPVPFDLTPRLSNKDCLEAAVEATLEFLNKAVKPVMVGGPKLRVAKARDAFVELADASGYPVAVMPSAKGFVPENHPHFIGTYWGAVSTLFCSEIVESADAYIFAGPIFNDYSSVGYSLLLKKEKAIIVHPDSVVVANGPTFGCVRMSEFFRELAKRVKPNKTAYENYHRIFVPEGKPLKCKPREPLRINAMFQHIQKMLSNETAVIAETGDSWFNCQKLKLPKGCGYEFQMQYGSIGWSVGATLGYAQATPEKRVLSFIGDGSFQVTAQDVSTMIRNGQKTIIFLINNGGYTIEVEIHDGPYNVIKNWNYTGLVDAIHNGEGKCWTTKVRYEEELVEAINTATLEKKDSLCFIEVIVHKDDTSKELLEWGSRVSAANGRPPNPQ

SEQ ID NO: 4113 - DNA, 1824 bp, Arabidopsis thaliana (thale cress)
  CDS (1)..(1824)
atggacactaagatcggatctatcgacgcgtgtaacccgaccaaccacgatatcggcggtcctccaaacggcggagtctccaccgttcaaaacacaagtccacttcactccaccaccgtcagcccctgcgacgcgactcttggccgttacctagcaagacggttagtcgaaatcggcgtcaccgatgtcttctccgttcctggtgatttcaacctgacgcttctcgatcacctaatcgccgaaccaaacctcaagctgatcggttgctgcaacgagcttaacgccggatacgctgctgacggttacgctagatctcgcggtgttggtgcgtgcgtcgttacgttcaccgtcggtggattgagtgttctgaatgcgatcgccggtgcttacagtgagaatctgcctctgatttgcatcgtcggtggtccaaactccaacgattacggtaccaataggattcttcatcatacaattggtttacctgatttcactcaagagcttaggtgttttcaagctgttacttgttttcaagctgtgattaataacttagaagaggctcatgaacttatcgatactgcgatttcaactgctttgaaagaaagcaaacctgtttatatcagtatcagctgtaatttaccggcgattcctcttccgacgtttagtcgtcatcctgttccgttcatgcttccgatgaaggttagcaatcagattggtttagatgcggcggtggaggcagctgctgagttcttgaacaaagctgtgaagccagttcttgttggtgggccgaaaatgcgggttgcgaaagccgcggatgcttttgttgagcttgctgatgcttctggctatggtcttgctgtgatgccttctgctaaaggacaagtacctgagcatcacaagcattttatagggacgtattggggagctgtgagtacagctttttgtgctgaaatcgttgaatctgcggatgcttatctgtttgcaggtccgattttcaacgattacagttctgttgggtattctctgcttctcaagaaggagaaggcaatcatcgttcagcctgatcgggttactatcggtaacggacctgcgtttggatgtgttcttatgaaggattttctaagcgagttggctaaacgaattaagcacaacaacacttcttatgagaattatcacaggatctatgtcccagaaggaaagcctttgagagataacccgaatgagtctttgagggttaatgtactgttccaacacattcagaatatgctctcttctgagtctgctgtgcttgctgagacaggagattcctggttcaactgtcagaagctgaagctccctgaaggatgcggttacgaattccaaatgcagtacggatcaattggctggtcagtgggtgctactctaggctatgctcaagccatgccaaacaggcgtgtcattgcttgtattggagatggtagtttccaggtaaccgcacaggatgtatctacgatgatacggtgtgggcaaaagaccataatcttcctcatcaacaacggaggctacaccattgaggtggaaattcacgatggtccttacaatgtcataaagaactggaactacacagcttttgttgaggccatacacaatggagaaggaaaatgctggactgccaaggtgagatgcgaggaggagttagtgaaagcaatcaacacggcaaccaatgaggaaaaagagagcttttgtttcattgaagtgatagtgcacaaagacgatacaagcaaggaacttttggagtggggctctagagtctctgctgctaatagtcgtcccccaaatccgcagtag

SEQ ID NO: 4114 - protein, 607 aa, Arabidopsis thaliana (thale cress)
MDTKIGSIDACNPTNHDIGGPPNGGVSTVQNTSPLHSTTVSPCDATLGRYLARRLVEIGVTDVFSVPGDFNLTLLDHLIAEPNLKLIGCCNELNAGYAADGYARSRGVGACVVTFTVGGLSVLNAIAGAYSENLPLICIVGGPNSNDYGTNRILHHTIGLPDFTQELRCFQAVTCFQAVINNLEEAHELIDTAISTALKESKPVYISISCNLPAIPLPTFSRHPVPFMLPMKVSNQIGLDAAVEAAAEFLNKAVKPVLVGGPKMRVAKAADAFVELADASGYGLAVMPSAKGQVPEHHKHFIGTYWGAVSTAFCAEIVESADAYLFAGPIFNDYSSVGYSLLLKKEKAIIVQPDRVTIGNGPAFGCVLMKDFLSELAKRIKHNNTSYENYHRIYVPEGKPLRDNPNESLRVNVLFQHIQNMLSSESAVLAETGDSWFNCQKLKLPEGCGYEFQMQYGSIGWSVGATLGYAQAMPNRRVIACIGDGSFQVTAQDVSTMIRCGQKTIIFLINNGGYTIEVEIHDGPYNVIKNWNYTAFVEAIHNGEGKCWTAKVRCEEELVKAINTATNEEKESFCFIEVIVHKDDTSKELLEWGSRVSAANSRPPNPQ

SEQ ID NO: 4115 - DNA, 1677 bp, Bacillus cereus ATCC 14579
  CDS (1)..(1677): transl_table=11
ttgaaaaaacaatatactgtaagtacatatttattggatagactacatgaattaggaattgaacatatatttggggttcctggtgattataatcttgcctttttagatgatgtggtagcacatgaaaatttaaagtggattggcaattgtaacgaattaaatgctgcatatgcagcagatgggtacgctcgcataaaaggaatcgctgctcttattactactttcggtgtcggagaattaagcgccattaacggtattgctggctcatatgcagaaaacgtgccagttataaaaatcacgggtacgccaccaacaaaagtaatggaaaatggagcaatcgtccatcatacgttaggcgatggaaagttcgatcacttttccaatatgtatcgagaaatcactgtggcacaaacaaatgtaacacctgagcatgcagctgaggaaattgaccgtgtattacgtgcatgttggaatgaaaaacgccctgttcatattaatttgccaattgatgtgtataataaaccaattaataaaccgacagaacctattataaataaacctattttaagtaataaagaagcattaaataaaatgcttctacatgccatttcaaaaataaatagtgccaaaaaacctgttattttagctgattttgaagtagatcgatttcacgctaaagaaaatttacatcaattcgtagaaaaaactgggtttcccatcgcgacgttaagtatgggaaaaggaatattcccagaaaaacaccctcaatttatagggatttatactggtgatgtaagttctccgtacttgcgaaaaagaattgatgaatctgattgtattattagtattggtgtgaagttaactgatactattacaggcggcttcacacaaggttttacaaaagaacaagttatagaaatccatccctacactgtgaaaattatagataaaaaatacggtccagttgtaatgcaggatgttttacaacatttaagtgattcaattgagcatcgtaataaagatacccttgacgttaagccatttattttagaatcctcaccttttactgaagagttcattccaaaagcacaaatggtcacacaaaaacgtttttggcagcaaatgtaccatttcttacaagaaaacgacgtcttaattgtagagcaaggaacacctttctttggtagttctgctatccctctacctaataacactgcatatgtaggacaaccgttatggggatctatcggatatacactgcccgctctacttggtacacagctcgccaatttatcacggcgcaacattttaattattggtgatggttctttccaagtaactgcccaagagttatcaactatattacgtcaaaatttaaaaccaattatatttttaatcaataacaacggatacactgttgaacgtgccattcacggccaaaaccaactttataatgatatacaaatgtgggattataataaactatcaatggtatttggggcagaagaaaaaagtctaacatttaaagtagaaaatgaagcagaattagcagcagtcttaacaaatataacttttaataagaatcaacttatctttattgaagttataatgagccaaagcgatcaacctgaattgttagctaaacttggaaaaagatctggtcagcaaaattcttaa

SEQ ID NO: 4116 - protein, 558 aa, Bacillus cereus ATCC 14579
MKKQYTVSTYLLDRLHELGIEHIFGVPGDYNLAFLDDVVAHENLKWIGNCNELNAAYAADGYARIKGIAALITTFGVGELSAINGIAGSYAENVPVIKITGTPPTKVMENGAIVHHTLGDGKFDHFSNMYREITVAQTNVTPEHAAEEIDRVLRACWNEKRPVHINLPIDVYNKPINKPTEPIINKPILSNKEALNKMLLHAISKINSAKKPVILADFEVDRFHAKENLHQFVEKTGFPIATLSMGKGIFPEKHPQFIGIYTGDVSSPYLRKRIDESDCIISIGVKLTDTITGGFTQGFTKEQVIEIHPYTVKIIDKKYGPVVMQDVLQHLSDSIEHRNKDTLDVKPFILESSPFTEEFIPKAQMVTQKRFWQQMYHFLQENDVLIVEQGTPFFGSSAIPLPNNTAYVGQPLWGSIGYTLPALLGTQLANLSRRNILIIGDGSFQVTAQELSTILRQNLKPIIFLINNNGYTVERAIHGQNQLYNDIQMWDYNKLSMVFGAEEKSLTFKVENEAELAAVLTNITFNKNQLIFIEVIMSQSDQPELLAKLGKRSGQQNS

SEQ ID NO: 4117 - DNA, 1686 bp, Bacillus cereus ATCC 10987
  CDS (1)..(1686): transl_table=11
atgattcatttgaaaacgcaatatactgtaagtacatatttattagacagactaagcgaattagaaattgagcatatttttggtgtccctggtgattataatttggcttttttagatgatgtagtagcacatgaaaagttagagtgggttggcaattgtaatgaattaaatgcagcatatgctgctgatggatatgctcgtataaaaggaatcgctgctcttattaccactttcggtgttggagaattaagcgccattaacggtgttgctggctcatacgcagaaaatgtacctgttataaaaatcacggggacaccacctacaacagtaatggagaatggagcactcgttcatcatacgttaggtgatggaaagttcgatcacttttccaatatgtatcgagaaattactgtagcgcaaacaaatttaacccccgaacatgctgctgaggaaattgatcgtgtgttacgtgcatgttggagtgagaaacgccctgttcatattcaattaccgattgatgtgtataataaaccaattaataaacctacggaatccattttacataaaccagttgtaagtaataaagatgcgctggataaaatgcttttacatgcaacttcgaaaataaacagtgccagaaaacctgttattttagctgattttgaagtggctcgttttcatgctgaagaatatttgcatcaattcgtagaaaaaactggatttcctatcgcgacattaagtatggggaaaggaatattccctgaaaaacacccccaatttataggaatttatactggtgacgttagtccttcatacttacgaaaaagaattgatgaatctgactgtattattagtattggcgtgaaattaactgatactattaccggtggctttacacaaggatttaaaaaagagcaagtaatagaaatccatccctatactgtgaaaattatggataaaaaatatggacccgttgtaatgaaagatgttttaaaacaattaaatgatttaatcgaacatcgcaaagaagacacacttgaaattaagccgtttatttcagaatcactacctataacagaagagttcaatccaaaagcacaaatgattacacaaaaacgattttggcaacaaatataccatttcttacaagaaaacgatgttttaattgcagagcaaggaacccctttcttcggtagtgccactatccctttaccaaataacactacttatgtcgcacaaccattatggggatcaattggttatacattacctgctctactgggcacacagctcgctaatttatcgcggcgtaacattttaattattggtgatggttctttccaattaactgttcaagagttatcaactatacttcggaaaaatttaaaaccaattatatttttaattaataacaatggatacactgttgaacgtgcaattcatggtcaaaatgaaccgtataatgacatacaaatgtgggattacacaaaactagcgaacgtattcggaacagaagaaaaaagtctaacatggaaagtggaaaatgaaacagagttagcagaagtcttaatgaatataactgtaaataacaatcaacttatctttattgaagttgtaatgagccaaggggatcagcctgaactgttagctaatcttgggaaaagattcggcatgcaaaattcttaa

SEQ ID NO: 4118 - protein, 561 aa, Bacillus cereus ATCC 10987
MIHLKTQYTVSTYLLDRLSELEIEHIFGVPGDYNLAFLDDVVAHEKLEWVGNCNELNAAYAADGYARIKGIAALITTFGVGELSAINGVAGSYAENVPVIKITGTPPTTVMENGALVHHTLGDGKFDHFSNMYREITVAQTNLTPEHAAEEIDRVLRACWSEKRPVHIQLPIDVYNKPINKPTESILHKPVVSNKDALDKMLLHATSKINSARKPVILADFEVARFHAEEYLHQFVEKTGFPIATLSMGKGIFPEKHPQFIGIYTGDVSPSYLRKRIDESDCIISIGVKLTDTITGGFTQGFKKEQVIEIHPYTVKIMDKKYGPVVMKDVLKQLNDLIEHRKEDTLEIKPFISESLPITEEFNPKAQMITQKRFWQQIYHFLQENDVLIAEQGTPFFGSATIPLPNNTTYVAQPLWGSIGYTLPALLGTQLANLSRRNILIIGDGSFQLTVQELSTILRKNLKPIIFLINNNGYTVERAIHGQNEPYNDIQMWDYTKLANVFGTEEKSLTWKVENETELAEVLMNITVNNNQLIFIEVVMSQGDQPELLANLGKRFGMQNS

SEQ ID NO: 4119 - DNA, 1713 bp, Chlamydomonas reinhardtii
  CDS (1)..(1713)
atggccaccaccgtgtcgcccgcagacgccaacctcggcctgcacattgccaaccggcttgttgagatcggctgcaccagctgcttcgcggtgcccggcgacttcaacctgctgctgctggaccagctgctcaagcagcccgagctgtccctggtgtggtgctgcaacgagctgaatgcgggctacgcggcggacggctacgcccgcaagcgcggcgtgggctgcctgtgcgtgaccttctgtgtgggaggcttctccgccctgaacgctgtgggcggtgcctacagtgaggacctgccgctcatcgtcatcagcggggggcccaactcgcaggaccacgcctccaaccgcatcctgcaccacaccacgggcgccaacgagtacggccagcagctgcgcgccttcagggaggtgacctgctgccaggtggtcatccagcacatcgaggacgcgcacatgctgctggatacggccatcagtgaggcgatgctgaagcgcaagcccgtgtacatcgaggtggcatgtgagtgtgtcgtgacttggtacttgttaggggggcgggtgatgggggggccgtcgctctgggccgcggtggaggcggcggtggagtggctgggcggtggcgtgaagccgctgctgctggcgggcgtgcgcacgcgcccgcccgccgcgcgcaaggcgatgctggccctggcggaggccagccgctaccccgtggccgtgatgccggacgccaagggcatgttccccgaggaccacgagcagtacatcggcatgtactggggcccggtgtccacgccgtgtgtgtgcgaggtggtggagagcagcgacatcgtgctgtgcgtgggaggagtgtggacggactactccactgccggctactcgctgctgctcaagcccgagaagatgctgcgcgtggacaacaaccgcgtcacattgggcaacggaccgacgtttggctgcatcgtgatgaccgacttcctggaggccctggccaagcgggtggcgcccaacgacaccggccacgtcatctacaagcgcatggctctgccgccctcggagccgccgccgcaggccgagggcgaactgctgcgcaccaacgtgctgttcaaacacatccagcacatgctgactccctccaccagcctcatcagcgaggtgggcgactcctggttcaacacactcaagctcaagctgcccgccggctgcgagtacgagctgcagatgcgctacggctccattggctggagtgtgggcgcggtgctgggctacggcgtggcggagcggcagacggcgcccgaccgccgcgtggtggcgtgcatcggcgacggctccttccagatgaccgcacaggaggtgagcaccatgctgcgctacggcctggaccccatcatcttcctcatcaacaacggcggctacaccatcgaggtggagatccacgacggcccctacaacgtgatcaagaactgggactaccccggtatggtgcgcgcgctgcacaacggccagggcaagctgtggaccgccgaggcccgcaccgagcccgagctgcaggccgccgtggccgaggctgtgcagcggcgcggcgagctgtgcttcatcatggtggtgactcaccgtgacgactgcagcaaggagctgctggagtggggcagccgcgtggcggcggccaacagccgcaagccgcccaccaccggctacggcggccactga

SEQ ID NO: 4120 - protein, 570 aa, Chlamydomonas reinhardtii
MATTVSPADANLGLHIANRLVEIGCTSCFAVPGDFNLLLLDQLLKQPELSLVWCCNELNAGYAADGYARKRGVGCLCVTFCVGGFSALNAVGGAYSEDLPLIVISGGPNSQDHASNRILHHTTGANEYGQQLRAFREVTCCQVVIQHIEDAHMLLDTAISEAMLKRKPVYIEVACECVVTWYLLGGRVMGGPSLWAAVEAAVEWLGGGVKPLLLAGVRTRPPAARKAMLALAEASRYPVAVMPDAKGMFPEDHEQYIGMYWGPVSTPCVCEVVESSDIVLCVGGVWTDYSTAGYSLLLKPEKMLRVDNNRVTLGNGPTFGCIVMTDFLEALAKRVAPNDTGHVIYKRMALPPSEPPPQAEGELLRTNVLFKHIQHMLTPSTSLISEVGDSWFNTLKLKLPAGCEYELQMRYGSIGWSVGAVLGYGVAERQTAPDRRVVACIGDGSFQMTAQEVSTMLRYGLDPIIFLINNGGYTIEVEIHDGPYNVIKNWDYPGMVRALHNGQGKLWTAEARTEPELQAAVAEAVQRRGELCFIMVVTHRDDCSKELLEWGSRVAAANSRKPPTTGYGGH

SEQ ID NO: 4121 - DNA, 1728 bp, Physcomitrella patens subsp. patens
  CDS (1)..(1728)
atgggagggggtgataaagcaaaagaggcacttccagatggttcaaggacacttgggcgctacattgctgcccgattggtcgaagttggtgtacgcgatcttttcactgtgcccggcgacttcaatttggtactgctcgatcacttgatggccgagcctggtcttgagctcattgggtgttgcaatgaattaaacgcgggttatgctgctgatgggtatgcacgtgcaaatggcgtaggggcttgtgccgtaacgtttactgtgggaggtttgagtgtgattaatgctatagccggcgcatatagtgaaaatcttcctgttatatgcattatcggtggtccaaactctaatgattatggaacgaatcgaatcctccaccatacaattggagagatagacttcagtcaggaacaccgatgttttcaacaagtcacttgtgctcaggtagtaatacaatctttggacgacgcacatgagctcgtcgatagagcaatctctactgcgattggacaaagcaagcctgtgtacgtgagcgtcagctgcaatcttgccgctatgccccacccatccttcagaagtgcccctcttccatattccatgacccaaggtcccgaccccagaagtcttgaggcggctgtagatgcagttagttcgctcttagcatcagctgttaagcccgtcctcgtaggtggccctaaacttcgggttgcaaaagcttgtgactctttcgagcagttggctacggcgtgtggatatgctgtggcggtcatgcctgcagcgaagggcttatttccagaaagccaccgtaattttataggcacgtactggggtgctgtaagctcgactttcacagctgagatcgtcgaatctgctgacaaatacctgttcgctgggccagttttcaacgattacagttcggtgggatactctctgctgatcaaaaaggagaacatcatcagcttggaacccgaccgagtgatgatcggaaatgggccatcctttgggtgtgtgctgatgaaggactttctggaagttcttgcaaagaagataaagaaaaacacaacttcgtttgataattattcgcgcatgtatgtacctgttagtgttcctcctaagcaaaagccgggagagcctctcaaagctgttaatctcttcaagcacattcaggcaatgttaacaaaagattctgcagtcatagctgagacgggagatgcatggttcaactgtcagaaacttaaactaccagatggatgctcgtacgaatttcagatgcagtatggatcaatcggctgggcagtgggagctacttttggttatgcacaaggtgccaaacagaggcgcgtaatagcatgcattggcgacggaagttttcaagttacagcacaagaagtctcttcgatgattcgaaatggccagaattctgtcatatttttgttaaataatggcggttacacaattgaagttgaaattcacgatggcccatataacgtcattaagaactggaactacacagcgttggtggaggcctttgccaacggtgaaggtcgcttatggacctgcaaggtgcgaactgaggaggatcttgagaaggctattgccacagtccatgagaaggacagcctttgtttcattgaagtcatacttcacagggatgacactagtaaggaactactcgaatggggctcccgtgttgccactgctaatagtcggccgccgaatcctcagtaa

SEQ ID NO: 4122 - protein, 575 aa, Physcomitrella patens subsp. patens
MGGGDKAKEALPDGSRTLGRYIAARLVEVGVRDLFTVPGDFNLVLLDHLMAEPGLELIGCCNELNAGYAADGYARANGVGACAVTFTVGGLSVINAIAGAYSENLPVICIIGGPNSNDYGTNRILHHTIGEIDFSQEHRCFQQVTCAQVVIQSLDDAHELVDRAISTAIGQSKPVYVSVSCNLAAMPHPSFRSAPLPYSMTQGPDPRSLEAAVDAVSSLLASAVKPVLVGGPKLRVAKACDSFEQLATACGYAVAVMPAAKGLFPESHRNFIGTYWGAVSSTFTAEIVESADKYLFAGPVFNDYSSVGYSLLIKKENIISLEPDRVMIGNGPSFGCVLMKDFLEVLAKKIKKNTTSFDNYSRMYVPVSVPPKQKPGEPLKAVNLFKHIQAMLTKDSAVIAETGDAWFNCQKLKLPDGCSYEFQMQYGSIGWAVGATFGYAQGAKQRRVIACIGDGSFQVTAQEVSSMIRNGQNSVIFLLNNGGYTIEVEIHDGPYNVIKNWNYTALVEAFANGEGRLWTCKVRTEEDLEKAIATVHEKDSLCFIEVILHRDDTSKELLEWGSRVATANSRPPNPQ

SEQ ID NO: 4123 - DNA, 1731 bp, Physcomitrella patens subsp. patens
  CDS (1)..(1731)
atgaaggtaattgaagacgttgtgtcggagacggaagggacattagggtactacatcgctcgccgactcgttgagatcggcgtccgtgacgtgtttaccgtgcccggcgacttcaacttggttctacttgaccacttaatcgctgaacccaaactgaggctcgtgggatgttgcaatgaattaaacgcgggatacgctgctgatgggtacgcgcgagctcatggggtcggtgcatgcgtggtaacatttactgtgggaggattaagcgtcatcaacgccatagccggtgcttacagcgagaatttacccatcatctgcattgtcggtgggccaaactcaaatgacttcgggacgaaccgaataatccaccacacgatcggagagccggactttggtcaagagcatcgatgctttcagcaaatcacatgcgcacagattgtaatacagaatttggacgatgcacacgagcttctggacagagccatatccacagccttgaataagagcaagcccgtctatgtgagcgtcagctgcaatctgccctcgcttccacacccgtcttttaagatttcgcccatcccttactcaatcactcagggtaccgagaccaactcactgtgcctcgaaagtgctttggatacggttgctgagatcttaaatacagcggtcaagcctgtcctcattgccggcccaaatcttcgaattgcaaaagccattgacgcttttgaagcattggcgactgcaagtgggtatgctgtggccgtcatgccatcagggaagggccacttccgagagacacatccgcatttcgtaggcacctactggggtgcggtcagcacttcatatgtgtcggagattgtggaatctgccgacatctacgtctttgttgggccaatcttcaacgactacagttccgtagggtactcgcttttgtgtaaaaaagagaagatgatcatcgtgcaacctgagagagtcactattggaaacgggtcgtcgttcgggtgtgtgctgatgaaggacttcctactggcactagcaaagaaagtgaagcgaaacacgacttcattcgacaactacttgcgcatgtatgtccctcctggcgtgccattgaagcagaagcctaatgagtctctcaagactgtcaacctttacaagcacattcaggggatgctatcacgtcacactgcagtcatagccgaaacaggcgactcgtggttcaactgccagaaactgaagctacccgatggctgcggctacgagtttcagatgcaatacgggtccatagggtggtctgtgggcgccactttgggttacgcacaaggagcgccgaacaagcgagtgatcgcatgtattggtgacgggagctttcaagtaacggcgcaagatgtgtcgacgatgatacgatgtgggcagagaagcatcatcttcctgatcaacaatggtggttacaccattgaggtcgagatccatgatggaccatacaacatcatcaagaactggaactacactggagtggtggaagccttccacaacggcgaaggcaaactttggacctgcaaggtgcgaactgaggatgatctcatcgatgcgattgctaccgcacaaggagagaagaaagaccacctgtgtttcatcgagatcatggtgcacagggatgataccagcaaagagcttctagagtggggttcgcgcgtggccgctgcgaatagccggcctcccaatcctcagtag

SEQ ID NO: 4124 - protein, 576 aa, Physcomitrella patens subsp. patens
MKVIEDVVSETEGTLGYYIARRLVEIGVRDVFTVPGDFNLVLLDHLIAEPKLRLVGCCNELNAGYAADGYARAHGVGACVVTFTVGGLSVINAIAGAYSENLPIICIVGGPNSNDFGTNRIIHHTIGEPDFGQEHRCFQQITCAQIVIQNLDDAHELLDRAISTALNKSKPVYVSVSCNLPSLPHPSFKISPIPYSITQGTETNSLCLESALDTVAEILNTAVKPVLIAGPNLRIAKAIDAFEALATASGYAVAVMPSGKGHFRETHPHFVGTYWGAVSTSYVSEIVESADIYVFVGPIFNDYSSVGYSLLCKKEKMIIVQPERVTIGNGSSFGCVLMKDFLLALAKKVKRNTTSFDNYLRMYVPPGVPLKQKPNESLKTVNLYKHIQGMLSRHTAVIAETGDSWFNCQKLKLPDGCGYEFQMQYGSIGWSVGATLGYAQGAPNKRVIACIGDGSFQVTAQDVSTMIRCGQRSIIFLINNGGYTIEVEIHDGPYNIIKNWNYTGVVEAFHNGEGKLWTCKVRTEDDLIDAIATAQGEKKDHLCFIEIMVHRDDTSKELLEWGSRVAAANSRPPNPQ

SEQ ID NO: 4125 - DNA, 1740 bp, Physcomitrella patens subsp. patens
  CDS (1)..(1740)
atgtcaagcccgcctcccatttaccctgttattgaatccactgcctgcttggcccgccatttggcacgcaggcttgtggaaattgggtgcaatgatatattcactgtgccgggcgacttcaacctcatcttgctggatcacctgctgaacgagccaggcatcaataatattggatgctgcaatgagatcaacgcaggctacgccgccgagggttatgctcgctggaaaggtgttggttgtgtggttgttactttcactgttggaggccttagtgtcattaacagcatcgctggcgcttacagtgaaaatctccctgtcatttgcatcgttgggggtcccaataccaacgattacggtaccaatcgaatcttgcatcataccattggtattcctgatttcagtcaggagtttcgatgcttccagaccgtgacctgtttccaggccgtcatcaaccatttggatgacgcgcatgagttagtggatcgcgcaatttctaaagcccttcacaagaacaagccggtttacattagcgtgagctgtaacattacaaataccgtgcacccttcattcacgggcagcacgattccctacacaatcaaacaacaagtgagcaacaaagtctctctggacgctgcagttgagagtaccgtgaagtttctgaatacatgcgcaaaacctgttctcattggagggcctaagatgcggttggggaaagcaaaagaagcatttgccaaattagtgacagcatgtgggtatgcgtatgctgtgatgccttctgccaaaggtcaagtttcagagcagcacccacgttttatggggacgtattggggagcagtcagcacaccctactgccttgagatagtggagtctgcagatgcttacatatttgttggacccatctttaacgattacagctcagtagggtactcgttgctgctgaaaaagcaacacatgataatcgtgaatcctgatcgagttaaggtatgtggaaaagcggagtttggatgtgttctcatgaaggacttcgtggaggcgttggcagagaagatagtgaaaaactcgaattcatatgacaattataagcgcatcttcgttcctgaaggcacggttccatcatcagtaccaggcgagccactccgcgttaattctctgttcaagcacatccagggcatgctctctggcgacacagccgttctagctgagacaggagattcttggtttaactgccagaaactgaggctgccagaggactgtgggtacgagttcgaaatgcaatatggttcaataggatggtcagtgggagccacgcttggttattcccaagctctgaaaggaatcaaacgtgtcattgcttgcattggtgatggaagtttccaggtgacttgtcaagatatttctaccatgatccgccaggagcaaaatagtatcatatttcttatcaacaatggaggttatacgatcgaagttgagatccacgatggaccttacaacgtgatcaagaattggagctatacaggattcgtcgacgctattcacaacggtgaaggaaaagtctggaccaccaaggtcacaacagaagatgaattgataccagcaatctcgactgccctcggcgcccagagagattgtctctgcttcatagaatgtgtagttcacaaggatgatactagtagggagcttctggagtggggctcacgagtgtcagcagcaaacagcaggcctcccacatcctacacttga

SEQ ID NO: 4126 - protein, 579 aa, Physcomitrella patens subsp. patens
MSSPPPIYPVIESTACLARHLARRLVEIGCNDIFTVPGDFNLILLDHLLNEPGINNIGCCNEINAGYAAEGYARWKGVGCVVVTFTVGGLSVINSIAGAYSENLPVICIVGGPNTNDYGTNRILHHTIGIPDFSQEFRCFQTVTCFQAVINHLDDAHELVDRAISKALHKNKPVYISVSCNITNTVHPSFTGSTIPYTIKQQVSNKVSLDAAVESTVKFLNTCAKPVLIGGPKMRLGKAKEAFAKLVTACGYAYAVMPSAKGQVSEQHPRFMGTYWGAVSTPYCLEIVESADAYIFVGPIFNDYSSVGYSLLLKKQHMIIVNPDRVKVCGKAEFGCVLMKDFVEALAEKIVKNSNSYDNYKRIFVPEGTVPSSVPGEPLRVNSLFKHIQGMLSGDTAVLAETGDSWFNCQKLRLPEDCGYEFEMQYGSIGWSVGATLGYSQALKGIKRVIACIGDGSFQVTCQDISTMIRQEQNSIIFLINNGGYTIEVEIHDGPYNVIKNWSYTGFVDAIHNGEGKVWTTKVTTEDELIPAISTALGAQRDCLCFIECVVHKDDTSRELLEWGSRVSAANSRPPTSYT

SEQ ID NO: 4127 - DNA, 1740 bp, Physcomitrella patens subsp. patens
  CDS (1)..(1740)
atgtcgcgaccagagccagtgtatcccgttaccgaatccactgcctgcctgggccggcacctggctcgcagactggtggagatcggatgcaatgatatattcacggtgccgggggacttcaacctggtgttgctggatcacctgatcagtgaacccgggatcaacaacatcgggtgctgcaacgagatcaatgcagggtatgcggcggatgggtacgcgcgatggaagggcgtaggctgtgtcgtggtcacgttcaccgttggcgggctcagcgtcatcaactccatcgctggcgcatacagcgagaacctcccggtgatctgcatcgtcggagggcccaattccaacgatttcggtactaaccgcatcctgcatcacaccattggcgtttccgatttcagccaggaggctcgatgcttccaggctgtgacatgttttcaggcggtcataaactgcttggatgatgcgcaccagcttgtggatcgcgccatatcgacctgcctgctggagagcaagcccgtgtacatcagcgtgagctgcaacttggccggcatcgagcacccgtccttcacccacagcaccattccttacgcaatcaaagagcagaggagcaacaaaacctcgctcgaagcagcactggacgccgcagtcaagttcctgaaccacactgtaaagccagtcctcgtcggaggaccgaaactgcgtctcggcaaggccaaggaagcattccaggaactggtggaagcgagtggatatgcctacgccaccatgccgtcagcgaaaggccaacctctagaatcgcacccgcacttcatcggcacatactggggcgccgtgagctcacccttttgtctagaaattgtggaatccgccgacgcgtacatcttcgtggggccgatcttcaacgattacagctcagtggggtactcgttgtttctgaagaaggaccacatgattgtggtgaacccggaccgcgtgcagatatgcggtaaagccgagttcggatgcgtgctgatgaaggatttttgcatggagctctcgaaacggatcacacgaaactccacatctttcgagaattacaagaggattcatgtccccgagggcaccatcccctcttccggtgctcaggatccactgcgtgttaatgtgctcttcaagcacattcagggtatgctgtcacatgatactgctgtacttgctgaaacaggggactcatggttcaactgccagaaattaaaattgcctgctggttgtggatatgagtttcaaatgcagtatggctctattgggtggtctgtaggtgctttactaggttattcccaggccttgaagggaataaaacgtgtgattgcctgtattggtgatggtagttttcaagtcacatgtcaagatgtctcaactatgatgcggcaaaatcaaaatagtattgtgttccttataaacaatggaggctatacaattgaagtagagatccatgatggaccctataatgtgatcaaaaattggaattatgtagccatgatccaagctattcacaatggagaaggaaatgtgtgggcaaccaaggttacaaatgaaccacagttgatcgcagccattgcaacagccacaactgataagaaagatgcattttgttttattgaagtaatatgtcacaaagatgatactagcaaagagcttttagaatggggctcacgagtgtctgccgcaaatgggagacccccttcaattcaaatttga

SEQ ID NO: 4128 - protein, 579 aa, Physcomitrella patens subsp. patens
MSRPEPVYPVTESTACLGRHLARRLVEIGCNDIFTVPGDFNLVLLDHLISEPGINNIGCCNEINAGYAADGYARWKGVGCVVVTFTVGGLSVINSIAGAYSENLPVICIVGGPNSNDFGTNRILHHTIGVSDFSQEARCFQAVTCFQAVINCLDDAHQLVDRAISTCLLESKPVYISVSCNLAGIEHPSFTHSTIPYAIKEQRSNKTSLEAALDAAVKFLNHTVKPVLVGGPKLRLGKAKEAFQELVEASGYAYATMPSAKGQPLESHPHFIGTYWGAVSSPFCLEIVESADAYIFVGPIFNDYSSVGYSLFLKKDHMIVVNPDRVQICGKAEFGCVLMKDFCMELSKRITRNSTSFENYKRIHVPEGTIPSSGAQDPLRVNVLFKHIQGMLSHDTAVLAETGDSWFNCQKLKLPAGCGYEFQMQYGSIGWSVGALLGYSQALKGIKRVIACIGDGSFQVTCQDVSTMMRQNQNSIVFLINNGGYTIEVEIHDGPYNVIKNWNYVAMIQAIHNGEGNVWATKVTNEPQLIAAIATATTDKKDAFCFIEVICHKDDTSKELLEWGSRVSAANGRPPSIQI

SEQ ID NO: 4129 - DNA, 1713 bp, Gibberella zeae PH-1 (Fusarium graminearum)
  CDS (1)..(1713)
atgagcaacagtagcctccaaaagccaattgacgtggctgagtacctcttcaagcgactctacgaggtcggcgttcgatctattcacggcgttccaggcgattacaacctcgtcgctctcgactatcttccacaatgcaacctcaggtgggtcggcagtgttaacgagctcaatgctgcctatgctgccgatggctacgcccgtgttaccaagatggctgctctcatcaccaccttcggtgttggagagctctctgccatcaacggtgttgctggatcttactctgagcacatccccgttgtccatattgttggatgcccctctaccatctcgcagcgtgatcaaatgctacttcaccacactctcggcaacggtgactttgacgtctttgccaacatgagctctcaaatctcgtgcaacgtcgccaagctcaacaagccttctgagattgccgaacagatcgacactgctctccgcacctgctggctccgctctcgtcctgtctacatcatggttcctaccgacatggtccaagaaaaggttgagggcgctcgcctcgacacccctattgacctgtctgagccaaagaacgatcctggcaacgaggactttgttgttgacgagatcctcaaggccatgtacgccgccaagcgccctgtgatcttggtcgactcctgcgccatccgccaccgtgttgtcgaagaggttcaccagcttgttgacaagctcgacctccctgtatttgttacccccatgggtaagggtgcagtaaacgaggaccaccccaactatggcggtgtctttgccggtgacggctctcatcctcctcgtgcccagaccattgtcgaggaatctgatctccttctcaccattggtgccctgaagagtgacttcaataccactggtttctcctaccgcacatctcaaattaactcagttgatttccacagcactcactgcaaggtccgatactccacataccctggcgttgccatgcgcggagtcctccgcaagatcatcgacaaggtcgaccccaagtctatgcctgctccttccattcccgaagtaaggaacgaggttgagaagaacaacgacgactccgagaccatcacacaagcctggttctggcctcgcgttggtgaatacctcatccccaatgacattgttgtcactgagactggtaccgcgaactttggcatctgggacactcgattccctcgtaatgtcaccgccctcagtcaagtcctctggggcagcataggctggtctgttggtgcctgccagggtgctgctctcgctgctaaggatgccggcaaggacggccgaacaatcctctttgtcggtgatggatctttccaactgactgctcaggagctgagcaccatgatccgacatggcctcaagcccacaattttcgtcatctgcaacgatggtttcaccattgaacgattcattcacggcatggatgctgtctacaacgacatcaacaactggaagtacaaggacctcgtcagcgttttcggtggcgagaagacttgcaagaccttccagatcaagaccaagaacgaactcaacgagctccttaccaacaaggagttcaatgctgctgagtgcttgcaatttgtcgagctctatatgcccagggaagacgctcctcgcgctctggttctgaccgctgaggctagtgccaggaacaacgccaagaagcactag

SEQ ID NO: 4130 - protein, 570 aa, Gibberella zeae PH-1 (Fusarium graminearum)
MSNSSLQKPIDVAEYLFKRLYEVGVRSIHGVPGDYNLVALDYLPQCNLRWVGSVNELNAAYAADGYARVTKMAALITTFGVGELSAINGVAGSYSEHIPVVHIVGCPSTISQRDQMLLHHTLGNGDFDVFANMSSQISCNVAKLNKPSEIAEQIDTALRTCWLRSRPVYIMVPTDMVQEKVEGARLDTPIDLSEPKNDPGNEDFVVDEILKAMYAAKRPVILVDSCAIRHRVVEEVHQLVDKLDLPVFVTPMGKGAVNEDHPNYGGVFAGDGSHPPRAQTIVEESDLLLTIGALKSDFNTTGFSYRTSQINSVDFHSTHCKVRYSTYPGVAMRGVLRKIIDKVDPKSMPAPSIPEVRNEVEKNNDDSETITQAWFWPRVGEYLIPNDIVVTETGTANFGIWDTRFPRNVTALSQVLWGSIGWSVGACQGAALAAKDAGKDGRTILFVGDGSFQLTAQELSTMIRHGLKPTIFVICNDGFTIERFIHGMDAVYNDINNWKYKDLVSVFGGEKTCKTFQIKTKNELNELLTNKEFNAAECLQFVELYMPREDAPRALVLTAEASARNNAKKH

SEQ ID NO: 4131 - DNA, 1878 bp, Gibberella zeae PH-1 (Fusarium graminearum)
  CDS (1)..(1878)
atgttgagtcatcccgaaaatactgacctcattgtgccatatctttatcagctggatatggtagccggcctccttgccgtcggtaatcagatcatggcgctgcttgcttggcaacaccaatgggatcatcaaaatggtgtcagcaatacactccggcgattatcccacacaccatttgccatgtcgcctttcactgtgggcgattacctcgcagagaggatcgctcaaatcgatatccgtcatcattttattgttccaggagactacaaccttatcctccttgacaaacttggagggcatccatcattgactgagatcgggtgcacaaatgagctcaactgctccctcgccgccgagggctatgcccgtgggcatggagttagtgtttgtatcgttacctacagtgtcggtgctttctcagccttcaacggcataggcagtgcatatgctgagaatctccctgtcatactcatcagtggatctcccaataccaacgatgtgagccagcatatactgcatcacactctggggatttatgacacgacatatcagcttgagatggctaaaaagatcacttgctgtgctgtgcgcattcgtcaagctgctcatgctcctgagctcattgaccgtgctattcgggctgctctcacccaacggaagccagtctacattgaggtaccgaccaacttggctggcgaaacgtgtccccgtcctgggcccatcagttctgtaatctcagcagtaccaagtgatcggcactcccttgatgttgctgtcaccaagacagccgagtatatcggctccaaacaaaagtgtgttgttcttgtggggcccaaagtccgaagggccatggcacaagatgccctgcgccaatttgtagaggcgattggctctgctgtcgttctccagccagctgcaaaaggtacctttcccgaggatcacgctcaattttgtggtatcttttggggtcaggtcagcacgcttgctgctgataccatcgtcaactgggcagacctgatcatatgtatcggtgccatctttaccgactacagcaccgttggatggacagccctacccagtgttccccaactgtttgtggacctggaaagtgtgactgtggcgtcaaaaatctactgcagccgtgttcagatgagtgagttcctgtccaggcttgcagaaacggtgtgttggaacgacaatactatggtcgagtacaatcgactccgccccgatccaaccttgggagagccttcttgcggtcctgaacgattgacgagaaaggagattactcgacagacacaggctttgataagcctcaaccctcaaacagtcatatttgctgacactggggattcgtggttcaatggcctaaagctcaaccttccatttggggctgactttgaaattgaaatgcagtggggtcatattggatggtctatcccggcctcgttcggctacgcccttgcaaagcctcacaagaggatcgtcgtcatggtaggcgacggtgcgtttcagatgacagctcaggaggtatctcaaatggtacgcttccgggtgcccatcatcatactccttatgaataacaaaggctacactattgaggtagagattcacgatggatcttacaactgcgtccagaattgggactatgctcgtttggtccaggcatttagcactgagaatggaaatggacatgcgcttggtctagaggctcgtaccgctgaggagctttccaatagtctcgaacgggctatagtgcacacaaatgggccgacgctcattgactgcagccttcatcgggatgactgcagtagagagctgattacctggggacattttgtggcggctgccaatgcgcgaatgccgaagaaggaatga

SEQ ID NO: 4132 - protein, 625 aa, Gibberella zeae PH-1 (Fusarium graminearum)
MLSHPENTDLIVPYLYQLDMVAGLLAVGNQIMALLAWQHQWDHQNGVSNTLRRLSHTPFAMSPFTVGDYLAERIAQIDIRHHFIVPGDYNLILLDKLGGHPSLTEIGCTNELNCSLAAEGYARGHGVSVCIVTYSVGAFSAFNGIGSAYAENLPVILISGSPNTNDVSQHILHHTLGIYDTTYQLEMAKKITCCAVRIRQAAHAPELIDRAIRAALTQRKPVYIEVPTNLAGETCPRPGPISSVISAVPSDRHSLDVAVTKTAEYIGSKQKCVVLVGPKVRRAMAQDALRQFVEAIGSAVVLQPAAKGTFPEDHAQFCGIFWGQVSTLAADTIVNWADLIICIGAIFTDYSTVGWTALPSVPQLFVDLESVTVASKIYCSRVQMSEFLSRLAETVCWNDNTMVEYNRLRPDPTLGEPSCGPERLTRKEITRQTQALISLNPQTVIFADTGDSWFNGLKLNLPFGADFEIEMQWGHIGWSIPASFGYALAKPHKRIVVMVGDGAFQMTAQEVSQMVRFRVPIIILLMNNKGYTIEVEIHDGSYNCVQNWDYARLVQAFSTENGNGHALGLEARTAEELSNSLERAIVHTNGPTLIDCSLHRDDCSRELITWGHFVAAANARMPKKE

SEQ ID NO: 4133 - DNA, 1695 bp, Candida glabrata CBS 138
  CDS (1)..(1695)
atgacagaaattacattaggccgctacttgttcgaaagactgcaccagatccacattgacaccattttcggtttgccaggtgatttcaacttgactttgttggacaagatctacgaagttgaaggcttgagatgggccggtaacgccaatgagttgaacgctgcctatgccgctgacggttacgcccgtttgaagggcatggcttgtctactgaccacattcggtgttggtgaactttcagccttgaatggtattgcgggctcctacgctgaacacgtcggtgtcttacatgtggttggtgttccatccactgtctctagagccaagcaactattgctgcaccatactttgggtaacggtgactttgacgcattccacaggatgtcatctgttatctctgagacaacattcattgtgtctgatcctcagactgctccagctgagattgacagatgtatcagagtgtgttacttgacccagagacctgtgtacttgggtatcccagccaacatgtttgactccaaggtgtcttccaagctgctagatacgccaatcgacctagcgctaagacctaatctgccagatgccgagcgtgaggtgctagatgagatcatcactatgatcaaggcctctaagcgcccaattatcttagctgatgcctgcacctcgagacacgacgtgaagaaggagaccaagagattgatcgaggtgacccagttcccatctttcactacgccaatgggaaagggctccattgatgaggacacaccaagattcggtggtgtctacgttggtaacttgagcgaccccgaggtgaagacatttgtcgaggagtccgacctggtgctctcagttggtgcgctgctatccgacttcaacactggttcgttctcgtactccctgaacactagaaacgtcatcgagttccactctgaccacatgaagatcagaaacgccaccttccctggcgtgcagatgaagtttgtcctggagaagttgcttgaggagcttccagctgtggtgaagggcagaaccgataacagggttgttccaaggcaaaaggagccatcgaccacgctgaacggcaaggacgccatcaagcaagagtggatgtggaagcatgtcggcaagttcctgcaagagggcgatgttgtggtcaccgagacaggtacttctggtttcggtattgtagagtctaagttccctagaaacaccgttggtatctctcaggtgctatggggttcgatcggctatgcactgggctccactgtgggtgctgcgttcgccgcccaggagatcgaccccaagaagagagtcatcctgttcatcggtgacggttcgttgcaattgaccgtgcaggaactgtccaccgctgccagatggggcctaacaccatacatcttcgtgttgaacaacaacggctacaccatcgagagactgatccacggtgagacgcagggctacaacgacatccagtcctgggaccactccctgatcctcccagcgttcggcgccaagaactacgagaacaagcgcgttgctacgtacggtgaatggaacgacatggtcaacgacaagcagttcaacaagaacgacaagctgagaatgatcgaagtgatgctaccaaccatggacggccctgagaacttgaagaaacaggccaagttgacagcatccatcaatgccaaaaactaa

SEQ ID NO: 4134 - protein, 564 aa, Candida glabrata CBS 138
MTEITLGRYLFERLHQIHIDTIFGLPGDFNLTLLDKIYEVEGLRWAGNANELNAAYAADGYARLKGMACLLTTFGVGELSALNGIAGSYAEHVGVLHVVGVPSTVSRAKQLLLHHTLGNGDFDAFHRMSSVISETTFIVSDPQTAPAEIDRCIRVCYLTQRPVYLGIPANMFDSKVSSKLLDTPIDLALRPNLPDAEREVLDEIITMIKASKRPIILADACTSRHDVKKETKRLIEVTQFPSFTTPMGKGSIDEDTPRFGGVYVGNLSDPEVKTFVEESDLVLSVGALLSDFNTGSFSYSLNTRNVIEFHSDHMKIRNATFPGVQMKFVLEKLLEELPAVVKGRTDNRVVPRQKEPSTTLNGKDAIKQEWMWKHVGKFLQEGDVVVTETGTSGFGIVESKFPRNTVGISQVLWGSIGYALGSTVGAAFAAQEIDPKKRVILFIGDGSLQLTVQELSTAARWGLTPYIFVLNNNGYTIERLIHGETQGYNDIQSWDHSLILPAFGAKNYENKRVATYGEWNDMVNDKQFNKNDKLRMIEVMLPTMDGPENLKKQAKLTASINAKN

SEQ ID NO: 4135 - DNA, 1704 bp, Debaryomyces hansenii CBS767
  CDS (1)..(1704): transl_table=12
atgtccgaagtcagtttgggaagatatatatttgaacgactcaggcagttgctggttcagacggtatttgggctccctggggactttaacttgtcacttttagataagatttacgaggtagatgggcttcgatgggcaggtaatgccaatgaattgaatgcagcatatgcagcagatggatatagtagggtgaaagggcttgcatgcttgattacaactttcggggttggagagttgagtgctcttaatgggatcggaggagcttttgcagaacatgtaggattggtgcatatagttggggtcccgtcgatctcgtcacaagcaaagcagcttctattgcatcacacattgggcaatggagactttacagtatttcatcggatgtcaaacaacatttcacaaacaacagcatttatatctgatatcaagtcggcacccaaggaaattgacaggtgcatacgagaagcctatattttccaaagaccagtatacattggattaccagccaatctagtggacatcaacgttccggcagtgttattaaatattccgatagatctttcgcttcgtgagaatgatcctgaggcacaggaagaggttatagacaatatcttgcagttaatctctgaagcctctaatccggtaatattggtcgatgcatgtacttcgagacacaattgtaacggagaagtggaagcattggttaataagacccagtttccggtattgacaacccctatgggtaaatctagttttaacgaatcgcatcccagatttgctggggtgtacgtaggcactatgtcgcatgtggaagttaaaaacctagtggatggagccgacttgattttggccgttggagcgttgttatcagacttcaatacaggatctttctcctactcttacaagaccaagaatgtgattgagtttcatgcggattgcatcaaaatcaaacaagggacgtatcctggggtacaaatgaaagaagttctcaatgttttgattgataaaatagacccagcagttaagcattataatcctattgccattccctctccaacttttttgaccaattctgtcaccaactcggacgtgctgtcggcgttacttacccaggagtggttatggagtaaggtcagtgcttggtttagagaaggtgatataatcattaccgaaactggtacatcagcatttgggattgtccaaacgaaatttcctaataataccattggtatttcgcaggtgctatggggttccgttgggtttacagtgggagctacattaggagcagtcatggccgcagaggaaatcgaccccaataaaagagtcatattatttgtgggggatgggtctcttcaattgacggtgcaagaaatttcaaccatggttaagtgggagaccagaccatacttattcgttctcaataatgatggttacacgatcgacagattaatacacgggatgagtgcaacatataacgatatacagccgtggaataatcttgcattgctacctttattcaacgcaaaatactacgatgcaatccaggtttccactactgatgaactagaaaagttgttttgcgatgaagaatttgcaatcaattcgaaaatcagaatgatagaagttatgctaccaagaatggacgcaccaataaatttaataaagcagatggaattcatatcaaaaatgaatgcagatacctag

SEQ ID NO: 4136 - protein, 567 aa, Debaryomyces hansenii CBS767
MSEVSLGRYIFERLRQLLVQTVFGLPGDFNLSLLDKIYEVDGLRWAGNANELNAAYAADGYSRVKGLACLITTFGVGELSALNGIGGAFAEHVGLVHIVGVPSISSQAKQLLLHHTLGNGDFTVFHRMSNNISQTTAFISDIKSAPKEIDRCIREAYIFQRPVYIGLPANLVDINVPAVLLNIPIDLSLRENDPEAQEEVIDNILQLISEASNPVILVDACTSRHNCNGEVEALVNKTQFPVLTTPMGKSSFNESHPRFAGVYVGTMSHVEVKNLVDGADLILAVGALLSDFNTGSFSYSYKTKNVIEFHADCIKIKQGTYPGVQMKEVLNVLIDKIDPAVKHYNPIAIPSPTFLTNSVTNSDVLSALLTQEWLWSKVSAWFREGDIIITETGTSAFGIVQTKFPNNTIGISQVLWGSVGFTVGATLGAVMAAEEIDPNKRVILFVGDGSLQLTVQEISTMVKWETRPYLFVLNNDGYTIDRLIHGMSATYNDIQPWNNLALLPLFNAKYYDAIQVSTTDELEKLFCDEEFAINSKIRMIEVMLPRMDAPINLIKQMEFISKMNADT

SEQ ID NO: 4137 - DNA, 1737 bp, Debaryomyces hansenii CBS767
  CDS (1)..(1737): transl_table=12
atgctgcaaaataaggaggaaacaattagtttaggtacatatttatttgaaagaatccatcaattgaaagttcaatcaatttttggtgttccaggagactttaatcttacattgttagataaaattgatgaagtgaagaatttgacatggagaggtaatgcaaacgaattgaatgccgcatatgctgcagatgggtatagtagagttagaagtactgaatcttcggcaaatggatttgcatgtcttgtgacaacttttggggttggtgaattatctgctttgaatggtattgccggatcgtatgctgaacatgtgggattgttacacgttgttggtatcccagcaacctctgctcaagacaagcaattgttactacaccatacattgggtaatggtgacttcactgttttcagacgtatgtcttcctccattacgcaaactaccggaatggtagcggatgcggctagtggtccgcaagaaatagaccgtgttatcagggaagcttatattaatcaaagaccatcatatttagctttcccaaccaacatggttgaattagaggttccaaagtcagctttggacacacctattgatttgtcaattcctgataatgaccctgaaacggaaaacgaagtgcttgacagagtcacggaattaatttctaattctaagaatcctattattttggtcgatgcttgctgtgcaagacacggtgctactggtgaggcaaggaagttaattgatctcactaaatttaagtttgcagtaacgccaatggctaaaggagctaagtatattgatgaagatcatgatagattcgctggtgtttacgtaggtacgttatcttatccttctgttaaagagcaagttgaatcttccgatttaattttatccttaggtgctatgcttagtgacttcaatactggttctttctcatactcttatcaaacaaagaatgttgttgaatttcattcagattatactaagattagatctgcgaattatccaaatgtgagaatgaagcatgtattgcagaaacttttagaatcaaataaattgaaagaagcagcaagcaaatatgagcctgttaaagttgagaaggacccatttcctgaagagaagagggatgaactgtctaaaattactcaacaatggttatggagtaaattgtctggttggttaagagaaaatgatatagttattaccgaaactggtacttcatcgtttggtattatccaaacgcaatttccaaaaaataccttgggtatttctcaaatattatggggctcaattggatacactgtcggagcaacatgtggtgctgttatggcagctgaagagattgaccctaatagaagagtcatattatttgtcggtgatggttcgttgcaattgactgttcaagagatttcatcaatgattaagaataaaaccaagccatacattttcgttttaaataataatggttacactatcgaaaaattaattcatggtgaaactgctgattataatagtattcaaccctgggaccatttgaaactcttggaaaccttcaaagctgaggactacgaatctataagagtctccactgttaaagaacttctggaccttttcagtgaccataaatttgcgaagaatgacaagataagattgatagaacttatgtttgatacaatggattctcctcaaaacttaattgagcaagctagaattacagctcaaaccaactcaaattga

SEQ ID NO: 4138 - protein, 578 aa, Debaryomyces hansenii CBS767
MLQNKEETISLGTYLFERIHQLKVQSIFGVPGDFNLTLLDKIDEVKNLTWRGNANELNAAYAADGYSRVRSTESSANGFACLVTTFGVGELSALNGIAGSYAEHVGLLHVVGIPATSAQDKQLLLHHTLGNGDFTVFRRMSSSITQTTGMVADAASGPQEIDRVIREAYINQRPSYLAFPTNMVELEVPKSALDTPIDLSIPDNDPETENEVLDRVTELISNSKNPIILVDACCARHGATGEARKLIDLTKFKFAVTPMAKGAKYIDEDHDRFAGVYVGTLSYPSVKEQVESSDLILSLGAMLSDFNTGSFSYSYQTKNVVEFHSDYTKIRSANYPNVRMKHVLQKLLESNKLKEAASKYEPVKVEKDPFPEEKRDELSKITQQWLWSKLSGWLRENDIVITETGTSSFGIIQTQFPKNTLGISQILWGSIGYTVGATCGAVMAAEEIDPNRRVILFVGDGSLQLTVQEISSMIKNKTKPYIFVLNNNGYTIEKLIHGETADYNSIQPWDHLKLLETFKAEDYESIRVSTVKELLDLFSDHKFAKNDKIRLIELMFDTMDSPQNLIEQARITAQTNSN

SEQ ID NO: 4139 - DNA, 1770 bp, Debaryomyces hansenii CBS767
  CDS (1)..(1770): transl_table=12
atgagcgatattactttaggaaaatatctttttgaaagactcaagcaagtagaggtatcaactattttcgggttgcctggagactttaatttgaccttattagataaaatctatgaagtggaaggtatgagatgggcaggtaatgctaacgaattgaatgccgcatatgctgctgatggatactctagaatcaagggccttgcttgtcttgtcactacttttggtgtcggtgaattgagtgccgtaaatggtgttgcaggtgcctacgcagaacacgtcgggttattacatgttgttggtgttccatctatttcatctcaagctaaccaattgttgcttcatcatactttgggtaatggtgactttactgtcttccacagaatgtcgaagaatatcagtcataccactgcgttcttatcagattctgaaactgcaccggctgaaattgacagatgtataagagatgcttatgtttatcaaagaccggtatatcttggtataccagctaatttagttgatgtgactgtgtcctcttccttattagaaaagccacttgatttatcattgaagccaaacaatgctgaagcagaagaagaggcggttgaacttactttaaaattgatcgaagaaagtaagaatccaatcattttggttgatgcttgtgcctcaagacataattgtaagcaagaaaccaaggaattggtcgaaatcactcaatttcctgtctttactacgccaatgggaaaaggtacaattgacgaaggaggtgttggtggtttattagaggacgacccatcctcaattgaaaaggttaagaagaagttagactacggtaattctgtctcgtccagatttggaggtgtttacgttggtaacttatctcaccctgaagttaaagaagccgtagaaaatgcagatttgattttatcgatcggttctttattatctgatttcaatactggatccttttcatacagttataagacaaaaaatatagttgagtttcattccgattacaccaaaattagacaggcaactttcccaggtgttcaaatgaaagaggctttgcaacatttattgaagaaagttggacaagctgctttaaaatataagccacaaccggttccaaaagtcaaattgattaatactccagcttcaagagactccaagttgactcaagaatggttgtggactagagtgtcatcttggtttaaagaaggtgatattattataactgaaactggtacatctgcgttcggtatcgtgcagtctagatttcctaataataccaccggtatttcgcaagtattatggggttcgattggttttacagttggtgcaactttaggagccgttatggcggcggaagaaattgaccccgccaaaagagtcattttattcataggtgatggttctttacaattgacagctcaggaaatctcaaccatgataaagtggaacacgaagccatacttgtttgttttaaataacgacggctacactattgaaagattaattcatggtgaaaatgccacctataatgacgttcaaccttggaaaaacttggatttattaccgttatttagtgctgaggattacgatgctattagaatttctaccataggtgaagctgaagatatttttagagacaaagagttcgaagaaaatactaagatccgtatggttgaagtcatgttaccacgtatggatgccagtactaatttgatcaagcaagctgaatatctggcaaagacaaatgctgcaaattaa

SEQ ID NO: 4140 - protein, 589 aa, Debaryomyces hansenii CBS767
MSDITLGKYLFERLKQVEVSTIFGLPGDFNLTLLDKIYEVEGMRWAGNANELNAAYAADGYSRIKGLACLVTTFGVGELSAVNGVAGAYAEHVGLLHVVGVPSISSQANQLLLHHTLGNGDFTVFHRMSKNISHTTAFLSDSETAPAEIDRCIRDAYVYQRPVYLGIPANLVDVTVSSSLLEKPLDLSLKPNNAEAEEEAVELTLKLIEESKNPIILVDACASRHNCKQETKELVEITQFPVFTTPMGKGTIDEGGVGGLLEDDPSSIEKVKKKLDYGNSVSSRFGGVYVGNLSHPEVKEAVENADLILSIGSLLSDFNTGSFSYSYKTKNIVEFHSDYTKIRQATFPGVQMKEALQHLLKKVGQAALKYKPQPVPKVKLINTPASRDSKLTQEWLWTRVSSWFKEGDIIITETGTSAFGIVQSRFPNNTTGISQVLWGSIGFTVGATLGAVMAAEEIDPAKRVILFIGDGSLQLTAQEISTMIKWNTKPYLFVLNNDGYTIERLIHGENATYNDVQPWKNLDLLPLFSAEDYDAIRISTIGEAEDIFRDKEFEENTKIRMVEVMLPRMDASTNLIKQAEYLAKTNAAN

SEQ ID NO: 4141 - DNA, 1716 bp, Yarrowia lipolytica CLIB122
  CDS (1)..(1716)
atgagcgactccgaaccccaaatggtcgacctgggcgactatctctttgcccgattcaagcagctaggcgtggactccgtctttggagtgcccggcgacttcaacctcaccctgttggaccacgtgtacaatgtcgacatgcggtgggttgggaacacaaacgagctgaatgccggctactcggccgacggctactcccgggtcaagcggctggcatgtcttgtcaccacctttggcgtgggagagctgtctgccgtggctgctgtggcaggctcgtacgccgagcatgtgggcgtggtgcatgttgtgggcgttcccagcacctctgctgagaacaagcatctgctgctgcaccacacactcggtaacggcgacttccgggtctttgcccagatgtccaaactcatctccgagtacacccaccatattgaggaccccagcgaggctgccgacgtaatcgacaccgccatccgaatcgcctacacccaccagcggcccgtttacattgctgtgccctccaacttctccgaggtcgatattgccgaccaggctagactggatacccccctggacctttcgctgcagcccaacgaccccgagagccagtacgaggtgattgaggagatttgctcgcgtatcaaggccgccaagaagcccgtgattctcgtcgacgcctgcgcttcgcgatacagatgtgtggacgagaccaaggagctggccaagatcaccaactttgcctactttgtcactcccatgggtaagggttctgtggacgaggatactgaccggtacggaggaacatacgtcggatcgctgactgctcctgctactgccgaggtggttgagacagctgatctcatcatctccgtaggagctcttctgtcggacttcaacaccggttccttctcgtactcctactccaccaaaaacgtggtggaattgcattcggaccacgtcaaaatcaagtccgccacctacaacaacgtcggcatgaaaatgctgttcccgcccctgctcgaagccgtcaagaaactggttgccgagacccctgactttgcatccaaggctctggctgttcccgacaccactcccaagatccccgaggtacccgatgatcacattacgacccaggcatggctgtggcagcgtctcagttactttctgaggcccaccgacatcgtggtcaccgagaccggaacctcgtcctttggaatcatccagaccaagttcccccacaacgtccgaggtatctcgcaggtgctgtggggctctattggatactcggtgggagcagcctgtggagcctccattgctgcacaggagattgacccccagcagcgagtgattctgtttgtgggcgacggctctcttcagctgacggtgaccgagatctcgtgcatgatccgcaacaacgtcaagccgtacatttttgtgctcaacaacgacggctacaccatcgagaggctcattcacggcgaaaacgcctcgtacaacgatgtgcacatgtggaagtactccaagattctcgacacgttcaacgccaaggcccacgagtcgattgtggtcaacaccaagggcgagatggacgctctgttcgacaacgaagagtttgccaagcccgacaagatccggctcattgaggtcatgtgcgacaagatggacgcgcctgcctcgttgatcaagcaggctgagctctctgccaagaccaacgtttag

SEQ ID NO: 4142 - protein, 571 aa, Yarrowia lipolytica CLIB122
MSDSEPQMVDLGDYLFARFKQLGVDSVFGVPGDFNLTLLDHVYNVDMRWVGNTNELNAGYSADGYSRVKRLACLVTTFGVGELSAVAAVAGSYAEHVGVVHVVGVPSTSAENKHLLLHHTLGNGDFRVFAQMSKLISEYTHHIEDPSEAADVIDTAIRIAYTHQRPVYIAVPSNFSEVDIADQARLDTPLDLSLQPNDPESQYEVIEEICSRIKAAKKPVILVDACASRYRCVDETKELAKITNFAYFVTPMGKGSVDEDTDRYGGTYVGSLTAPATAEVVETADLIISVGALLSDFNTGSFSYSYSTKNVVELHSDHVKIKSATYNNVGMKMLFPPLLEAVKKLVAETPDFASKALAVPDTTPKIPEVPDDHITTQAWLWQRLSYFLRPTDIVVTETGTSSFGIIQTKFPHNVRGISQVLWGSIGYSVGAACGASIAAQEIDPQQRVILFVGDGSLQLTVTEISCMIRNNVKPYIFVLNNDGYTIERLIHGENASYNDVHMWKYSKILDTFNAKAHESIVVNTKGEMDALFDNEEFAKPDKIRLIEVMCDKMDAPASLIKQAELSAKTNV

SEQ ID NO: 4143 - DNA, 1704 bp, Candida albicans SC5314
  CDS (1)..(1704): transl_table=12
atgtccgaaattactttagggagattcttctttgaaagattacatcaattgaaagttgacaccgttttcggtttaccaggggatttcaacttggctttattagataaaatttatgaagttgaaggtatgagatgggctggtaatgccaatgaattgaatgccggttacgctgccgacggttacgccagagtcaatccaaatggtttatctgctttagtcagtactttcggtgtcggtgaattgagtttgactaatgccattgctggttcttattctgaacacgttggtgtcattaacttggttggtgttccatcatcttctgctcaagctaaacaattgttgttgcaccacactttaggtaatggtgatttcactgttttccacagaatgttcaagaacatttctcaaaccagtgcctttattgctgatattaactctgctccagctgaaattgacagatgtatcagagatgcttatgtttaccaacgtccagtttacattggtttaccatccaacttggtcgatatgaaagttccaaaatcattattagacaaaaagattgacttatcattacatccaaacgacccagaatctcaaactgaagttattgaaaccgttgaaaaattgatttctgaagcttctaacccagttatcttggttgatgcttgtgccatcagacacaactgtaaaccagaagttgccaaattgattgaagaaactcaattcccagtcttcactactccaatgggtaaatcaagtgtcgatgaatccaacccaagattcggtggtgtttacgttggtagtttgtccaaaccagaagttaaggaatctgttgaaagtgctgacttgatcttatctattggtgctttattatctgatttcaacactggttcattctcatacggttacaaaactagaaacattgttgaattccattctgattacaccaagattagacaagctactttcccaggtgttcaaatgaaagaagctttgcaaaaattattgacaaccgtcaagaaatcaatcaatccaaactacactccagttccagttccagaaaccaaattaatcaacaccccagctgccccatcaactccattgactcaagaatacttgtggactaaagtttcatcttggttcagagaaggtgatatcatcatcactgaaaccggtacttctgcattcggtatcgttcaatcacgtttcccaaagaactctattggtatttctcaagtcttgtggggttccattggttacactgttggtgctacttgtggtgctgccatggctgctcaagaattagacccaaagagaagagtcatcttattcgttggtgacggttccttacaattaaccgttcaagaaatctccaccatgtgtaaatgggaatgtaacaacacctatcttttcgttttgaacaatgatggttacaccattgaaagattgattcacggtgaaaaagctcaatacaatgacattcaaccatggaacaacttgcaattattgccattattcaatgctaaagattacgaaactaagagaatttctactgttggtgaattgaatgatttgtttgccgacaaagcttttgctgttccagataagattagaatggttgaagtcatgcttccaactatggatgctccagctaacttggttgctcaagctaaattatctgaaaagaccaatgctgaacaataa

SEQ ID NO: 4144 - protein, 567 aa, Candida albicans SC5314
MSEITLGRFFFERLHQLKVDTVFGLPGDFNLALLDKIYEVEGMRWAGNANELNAGYAADGYARVNPNGLSALVSTFGVGELSLTNAIAGSYSEHVGVINLVGVPSSSAQAKQLLLHHTLGNGDFTVFHRMFKNISQTSAFIADINSAPAEIDRCIRDAYVYQRPVYIGLPSNLVDMKVPKSLLDKKIDLSLHPNDPESQTEVIETVEKLISEASNPVILVDACAIRHNCKPEVAKLIEETQFPVFTTPMGKSSVDESNPRFGGVYVGSLSKPEVKESVESADLILSIGALLSDFNTGSFSYGYKTRNIVEFHSDYTKIRQATFPGVQMKEALQKLLTTVKKSINPNYTPVPVPETKLINTPAAPSTPLTQEYLWTKVSSWFREGDIIITETGTSAFGIVQSRFPKNSIGISQVLWGSIGYTVGATCGAAMAAQELDPKRRVILFVGDGSLQLTVQEISTMCKWECNNTYLFVLNNDGYTIERLIHGEKAQYNDIQPWNNLQLLPLFNAKDYETKRISTVGELNDLFADKAFAVPDKIRMVEVMLPTMDAPANLVAQAKLSEKTNAEQ

SEQ ID NO: 4145 - DNA, 1758 bp, Ustilago maydis 521
  CDS (1)..(1758)
atgtcgaacgaaagcaaccagatcaagatcggtgcatacctgctcgagcgcctcgtgcagcttggctcgcaaagcgtgcagggagtgccgggcgatttcaacatgggattcctcgaccttatcgaagagcatccgaagctcaaatggatcggcaactcgaacgagctgaatgcggcttacgctgcggatgggtatgcgcgtgtcaagcgcaccattgctgctgtggtcaccacatttggtgtgggcgagttgagcgcgcttaacgggattgcaggtagcttctccgagagattgcccgtgattcatgtggtgggggtgccttcgaccggtgcacagggctcgcactcgttgctccatcacacgctgggagatggtcgcttttcggcgttcgagaacatgagcaaggagatctcggcggacagtgcgatcctcaagtccaaacagggcgcaggtgaatccatcgaccgaatcctcatcacggccatgaagagcgcccgtcctgtctaccttgcacttcccaccgatctggttcatgctaccatccctgccgaagctctcaagacgccactcgactacagcattgacgataacgacgccaaggccgaagagtatgtgctccaagtcgcacagaaacatattgccgacgccaaatccgccgtgatcctcgtcgatgcctgcgctgcacgccacggttgcatccaagagacgcacgagctaattgaaaaatcgggtcttcctgtattcgccactcccatgggcaaaaccatcgtcgacgaagaccacgctcagtacggtggcatttatgtcggcagcctcaccagcgaaaaggtgaaaaacgtagtcgagcaagctgacgtcctcatcactgtcggcagtttgaagtcggatttcaactcgggtaacttttcctatcgaacgcccaagtcgagcaccatcgagctgcattccgactacaccactattggctactcgcactaccctggcattggcatgaagaagctgcttcccaagctcagtgctctgttggaaacgaacggtgacgcacgtagggaggaaaccaaaaagattgtgcccaagtttgaaaacgccttgccgcacgactcgtcgtcgacaatcacacaggagtggttgtggccgaggatgggacagttcttccaagagcaagatcaagtgattgtggaaacgggaacgtcgagcttcggaatgctggaggccaagctgcctgccaagacacgttgggtctcgcaagtgctatgggggtctatcggctggtctgtcggtgctaccctcggcgtcgcgctcgcggcgcgagagaatgcgctaggacgcacccacctgtttgtcggcgacggttcgctccaactcacggtccaagagatcggcaccatgatcaaacacggtctctgcccgtacctcttcatcctcaacaacgatggctacgaaattgagcgccagatccacggcccccaacgcagttacaatgatattccgccctacgaccatagtctgttgctcgactttttcggcaacgaaaagttccactccgacgcaaagagccacgaaaacgatcctcaccaaagcaagaagcagtattacagggtgcaaaccaagcagcagttggacgagctcttgaaggaccaatcgtttgccaatcccgatcgcatcagattgatcgaggtcgtcatgcaaagaggcgatgctcctgaggcgttgaagagacaagctgaggctacgggtcaggcgaataagtatgagtag

SEQ ID NO: 4146 - protein, 585 aa, Ustilago maydis 521
MSNESNQIKIGAYLLERLVQLGSQSVQGVPGDFNMGFLDLIEEHPKLKWIGNSNELNAAYAADGYARVKRTIAAVVTTFGVGELSALNGIAGSFSERLPVIHVVGVPSTGAQGSHSLLHHTLGDGRFSAFENMSKEISADSAILKSKQGAGESIDRILITAMKSARPVYLALPTDLVHATIPAEALKTPLDYSIDDNDAKAEEYVLQVAQKHIADAKSAVILVDACAARHGCIQETHELIEKSGLPVFATPMGKTIVDEDHAQYGGIYVGSLTSEKVKNVVEQADVLITVGSLKSDFNSGNFSYRTPKSSTIELHSDYTTIGYSHYPGIGMKKLLPKLSALLETNGDARREETKKIVPKFENALPHDSSSTITQEWLWPRMGQFFQEQDQVIVETGTSSFGMLEAKLPAKTRWVSQVLWGSIGWSVGATLGVALAARENALGRTHLFVGDGSLQLTVQEIGTMIKHGLCPYLFILNNDGYEIERQIHGPQRSYNDIPPYDHSLLLDFFGNEKFHSDAKSHENDPHQSKKQYYRVQTKQQLDELLKDQSFANPDRIRLIEVVMQRGDAPEALKRQAEATGQANKYE

SEQ ID NO: 4147 - DNA, 1872 bp, Cryptococcus neoformans var. neoformans B-3501A
  CDS (1)..(1872)
atgtccgataacgaacaagtagccttcttcacttacatccttgagcgtctcaagcagtgcggcgtcaagcagatctttggtgttcccggtgacttcaacttgactgcccttgactatatcgagaaggacccggaactccaatgggtcggcaacgccaacgagctcaacgctgcctatgcttctgacggttatgcccgagtgaagggcactttggccgtcgtaatcaccacttttggtgtcggtgagctctctgctctctgtggtatcgctggttgtctctccgagcgagtccccgtccttcacattgttggtgcccccagcacttctttacaggccaagcagtctcttttgcaccacactcttaaccttcccgaatcgttcagcaccttctcctcaatgagcgcgcctctctcatgttctcaggccctaattaataacattgagcccaagactcctacttcttggactgaagcattcgataagactctcaaggctgtccttgagcagtgtcgacctggttatgtcgaagttcctacagacgctgttcacgccaaggtttcggccgagggtcttaagcagcccctacctccaccccactctgctccccctcccgagtctatgggtacttccctctctaacaccagcgcctcagccgcctcccgaggcgcggcgcaagtttcgcttagcactgcacccaccaatgttcccagtgctccctcctctgacgatgtgacagcccacgttgttgaggatattactaagcgattcggtgaggctaagaagcctatcatccttgtagatgcttgtgccggcaggttcggtatggctattgaggttagaaagctggtcgatgcctgtggtatccgattctttgagacgccaatgggtaagagtttgatggacgagcgtcacccactctacggaggttgttacgccggtgccaactctcttcctaccgtccaaaaggaagttgagtctgccgactttgtcctttacgtcggtgccctcaagtccgacttcaactctggatcattctccgtcaacattgaccccaaggttatcgtcgaacttcactctttcaccaccactatcgggtacgcttcctatcctaccaccgatatcaggaccattttgcctcttctcaggcctgcctttgagaagctcggtcggggtaagcaatccgagggtcagagtgttgagcaaaaggttgaggataagagcgtcgacagccctgtggtgcccgatcctaagggtgatgaaatcaagcacgaatggttatggcctcgagttggcaagtggttccaggacactgatatcatcatcaccgagactggtacttcctcctttggcctcaccaacgtcgtcctcccttcaaattctacttacattgcccaaatcctttggggtgccatcggttggtccgtcggtgcttgtctcggtgccgccatggcagccaaggagaacggtaacaaccgaaggaccgtcttgtttgtcggtgacggttctttgcagttgacacttcaggagattggtaccatgctccgccgaggcgtccatccttacattttcgtcctcaacaacgatggctacgaaattgagcgacagatccacggctggaccgccgagtacaacgacattcagctctacgaccaccaactcctcctccccttccttgctggtaagaagactaagaccccttatcagtcttacgcagtccacactcctcaagagtttagcaaacttctcgatgatgaagagttcaacaagcccgacaggttgaggttgatcgaagtgtttatgcctaggggtgatgctcctgctggtcttatcaggcaggccaaattgaccgccgaggccaatgacaggatctaa

SEQ ID NO: 4148 - protein, 623 aa, Cryptococcus neoformans var. neoformans B-3501A
MSDNEQVAFFTYILERLKQCGVKQIFGVPGDFNLTALDYIEKDPELQWVGNANELNAAYASDGYARVKGTLAVVITTFGVGELSALCGIAGCLSERVPVLHIVGAPSTSLQAKQSLLHHTLNLPESFSTFSSMSAPLSCSQALINNIEPKTPTSWTEAFDKTLKAVLEQCRPGYVEVPTDAVHAKVSAEGLKQPLPPPHSAPPPESMGTSLSNTSASAASRGAAQVSLSTAPTNVPSAPSSDDVTAHVVEDITKRFGEAKKPIILVDACAGRFGMAIEVRKLVDACGIRFFETPMGKSLMDERHPLYGGCYAGANSLPTVQKEVESADFVLYVGALKSDFNSGSFSVNIDPKVIVELHSFTTTIGYASYPTTDIRTILPLLRPAFEKLGRGKQSEGQSVEQKVEDKSVDSPVVPDPKGDEIKHEWLWPRVGKWFQDTDIIITETGTSSFGLTNVVLPSNSTYIAQILWGAIGWSVGACLGAAMAAKENGNNRRTVLFVGDGSLQLTLQEIGTMLRRGVHPYIFVLNNDGYEIERQIHGWTAEYNDIQLYDHQLLLPFLAGKKTKTPYQSYAVHTPQEFSKLLDDEEFNKPDRLRLIEVFMPRGDAPAGLIRQAKLTAEANDRI

SEQ ID NO: 4149 - DNA, 1668 bp, Klebsiella pneumoniae subsp. pneumoniae MGH 78578
  CDS (1)..(1668): transl_table=11
atggatatgcaaccgacctacactattggggattatctgctggatcgccttgtcgactgcggtattgatcgcttgttcggcgtgccgggagattacaacttacagtttctcgatcgcgtcatcgcgcacagcgccttggggtgggtcggctgcgccaacgagctgaatgcggcatatgccgctgacggctatgcgcgcatcaaaggggccggtgcgctgctgaccacttacggcgtcggcgaattgagcgcgctgaacggcattgcgggtagctatgcggaacatattccggtattgcatattgtcggtgcgccctctaccggcgcccagcagcgcggcgaactgctgcaccataccctcggcgatggcgattttcgccatttcgcccgcatgagcgagcagatcacctgtagccaggcgctgctgaccgccggcaacgcctgccatgaaatcgaccgtgtgctgcgcgatatgttgacgcatcatcgccccggctatttgatgctgccagccgatgtcgccagagcggcagcgattgccccagcccagcgcttgctggtggagcccgctccggcggatgaaaaccagcttgccgggttctgcgaacatgccagccgcctgctgcggagcagccgacgcatttccctgctggcggacttcctggcgcaacgttatggcctgcagaagacgctccgggagtgggtggcgaaaacgcctgtcgcccatgcgacgatgctcatgggcaagggattgtttgatgagcagcagagcgggtttgtcggcacctacagcgggattgccagcgcgccgcagacccgggaggcgattgaaaacgccgacaccatcatctgcattggcacgcgcttcaccgacaccatcaccgcaggatttacccaacatctggcgcgggaaaagactattgagatccagcccttcgccgtcagggtgggcgatcactggttcagcggggtgccgatggataaggccctggccgcgctgatgacgctttccgccccgctggcggcggagtgggctacgcctcaggtcgtggcgccggaggctgaggagggcgctgaaggcgagttgacccagaaaaatttctgggcgacggtgcagggcgccctgcgtccgggggatattattctcgccgatcaggggacggccgcctttggtattgcggcgctgaagctgccctctgaagcatcgctgatcgtccagccgctgtggggctcgattggttttactctcccggccgcctatggcgcacaaaccgcggcggcggagcggcgggtggtgctaattgtcggcgatggcgcggcccaactgaccattcaggagatgggctccatgctgcgtgataagcaaaagccgcttattctgctgctgaataacgaagggtataccgtggaacgggcgattcatggtccagagcagcgctacaatgacatcgctctgtgggactggcagcggctgccggaagccttcgcccctgacgttgcttcgcgctgccggcgggtcactcagacgtctgaactgcgggaggcgatgacggagagcatcacctccgataccctcaccctggtagaagtgatgctgccgaaaatggatatccccgatttcctgcgcgcggtgacgcaggcccttgaggagcgaaacagccgcgtttaa

SEQ ID NO: 4150 - protein, 555 aa, Klebsiella pneumoniae subsp. pneumoniae MGH 78578
MDMQPTYTIGDYLLDRLVDCGIDRLFGVPGDYNLQFLDRVIAHSALGWVGCANELNAAYAADGYARIKGAGALLTTYGVGELSALNGIAGSYAEHIPVLHIVGAPSTGAQQRGELLHHTLGDGDFRHFARMSEQITCSQALLTAGNACHEIDRVLRDMLTHHRPGYLMLPADVARAAAIAPAQRLLVEPAPADENQLAGFCEHASRLLRSSRRISLLADFLAQRYGLQKTLREWVAKTPVAHATMLMGKGLFDEQQSGFVGTYSGIASAPQTREAIENADTIICIGTRFTDTITAGFTQHLAREKTIEIQPFAVRVGDHWFSGVPMDKALAALMTLSAPLAAEWATPQVVAPEAEEGAEGELTQKNFWATVQGALRPGDIILADQGTAAFGIAALKLPSEASLIVQPLWGSIGFTLPAAYGAQTAAAERRVVLIVGDGAAQLTIQEMGSMLRDKQKPLILLLNNEGYTVERAIHGPEQRYNDIALWDWQRLPEAFAPDVASRCRRVTQTSELREAMTESITSDTLTLVEVMLPKMDIPDFLRAVTQALEERNSRV

SEQ ID NO: 4151 - DNA, 1653 bp, Salmonella enterica subsp. arizonae serovar 62:z4,z23:--
  CDS (1)..(1653): transl_table=11
atgcaaaccccctacaccgtagccgactatttgctggacagactagcaggatgcggcattggccatctttttggcgtgccgggcgattataatttgcagtttcttgaccacgttattgaccatccgaccctgcgttgggtgggatgcgcgaatgagctgaacgctgcttatgccgccgacggttatgcgcgcatgtcgggcgcgggcgcgctgctgaccacctttggcgtgggagaacttagcgccattaacggtatcgcgggcagctacgcggaatatgtgccggtattgcatatcgtcggcgcgccctgtagtgctgcgcagcagcgtggcgaattgatgcaccacaccctcggtgacggtgattttcatcatttctatcgtatgagccaggcgatatctgccggcagcgcgatattgaatgaacagaatgcctgtttcgagattgatcgtgtattgggggaaatggtcgccgcacgcaggcccggttatatcatgttgcctgccgacgtggcgaaaaaaacggccatcccgcccatagaggcgcttacgttgcccgcacatgaaacacaaaatggcgtggagacggcatttcgttatcgcgcccgccagtgtctgatgaatagtcggcgcattgcgctattggccgattttcttgcccggcgttttggtttacgccctctgttgcagcgctggatggcggaaacctctatcgcccatgcgacgctactgatgggaaaagggctttttgatgaacagcatccgaacttcgttggcacctatagcgccggcgccagtagcaaagcggtgcgtcaggccatagaggacgccgatatggttatctgcgtcggcacccgttttgtcgatacccttaccgccggatttacccagcaactgccggcggaacgcacgctggagattcagccttacgcgtcgcgcatcggcgagacctggttcaacctcccgatggcgcaggcagtatctacgctgcgcgaattgtgtcttgaatgcgcttttgcgccgccgccgacgcgtcccgtctgccagcctgtgcagattgaaaagggagaactgacccaggaaaacttctggcaaaccttacagcagtatctcaaacccggcgatattatccttgtcgaccaggggaccgccgcatttggcgccgccgccctgtcgctcccggacggtgcggaagttgtggttcagccgttgtggggatctattggctattccttgcctgccgcgtttggcgcgcaaacggcttgccccgacaggcgggtgattctgattattggcgatggcgcggcgcagcttacgattcaggagatgggctcgatgctacgcgacggacaggcgccgatcattctgttgctcaacaatgacggctataccgtagaacgcgccattcacggcgcagcccagcggtataatgacatcgcgagctggaactggacgcagataccccaggcgctaaacgcggcgcaacaggcggagtgctggcgggtgacgcaggctatccaactggcagaggtcctcgaacggctggcgcgtccgcaacgtttgtcattcattgaagtgatgttgccaaaagccgatctgccggaattactgcgtaccgtgacccgggcgctggaagcccgcaacgggggataa

SEQ ID NO: 4152 - protein, 550 aa, Salmonella enterica subsp. arizonae serovar 62:z4,z23:--
MQTPYTVADYLLDRLAGCGIGHLFGVPGDYNLQFLDHVIDHPTLRWVGCANELNAAYAADGYARMSGAGALLTTFGVGELSAINGIAGSYAEYVPVLHIVGAPCSAAQQRGELMHHTLGDGDFHHFYRMSQAISAGSAILNEQNACFEIDRVLGEMVAARRPGYIMLPADVAKKTAIPPIEALTLPAHETQNGVETAFRYRARQCLMNSRRIALLADFLARRFGLRPLLQRWMAETSIAHATLLMGKGLFDEQHPNFVGTYSAGASSKAVRQAIEDADMVICVGTRFVDTLTAGFTQQLPAERTLEIQPYASRIGETWFNLPMAQAVSTLRELCLECAFAPPPTRPVCQPVQIEKGELTQENFWQTLQQYLKPGDIILVDQGTAAFGAAALSLPDGAEVVVQPLWGSIGYSLPAAFGAQTACPDRRVILIIGDGAAQLTIQEMGSMLRDGQAPIILLLNNDGYTVERAIHGAAQRYNDIASWNWTQIPQALNAAQQAECWRVTQAIQLAEVLERLARPQRLSFIEVMLPKADLPELLRTVTRALEARNGG

SEQ ID NO: 4153 - DNA, 1653 bp, Salmonella enterica subsp. enterica serovar Paratyphi B str. SPB7
  CDS (1)..(1653): transl_table=11
atgcaaaacccctataccgtggccgactatttgctggacagactggcaggatgcggcattggccatctttttggcgtaccgggcgattataacttgcagtttcttgaccatgtgattgaccacccgaccctgcgttgggtgggatgcgccaatgagctgaacgccgcttatgccgcggacggctatgcgcgcatgtcgggcgctggagcgctactcaccacctttggcgtgggagaacttagcgctattaacggtatcgcgggcagttacgcggaatatgtcccggtcttgcatatcgtcggcgcgccctgtagcgctgcgcagcagcgtggcgaattgatgcaccataccctcggcgacggcgattttcgtcatttttatcgcatgagtcaggcgatatccgctgccagcgcaatattagatgaacagaacgcctgtttcgagattgaccgcgtgttgggtgaaatgcttgccgcacgcaggccaggatacatcatgttgcccgccgatgtggcgaaaaaaacggccatcccacctacgcaggcgctggcgttgcccgtgcatgaagcgcaaagcggcgtggagacggcttttcgttaccacgcccgtcagtgcctgatgaacagtcggcgcattgcgctattggccgactttcttgccgggcgttttggtttacgaccactgttgcaacgctggatggcggaaacgcccatcgctcatgcgacactactgatggggaaggggctttttgatgaacagcacccgaacttcgttggcacctatagcgctggcgccagcagcaaagaagtgcgtcaggccatagaggacgccgatagggttatctgcgtcggcacccgttttgtcgatacccttacggccggatttacccaacaattgccggcggaacgcacgctggagattcagccttacgcgtcgcgcatcggcgaaacctggttcaatctcccgatggcgcaggcggtgtctacgctgcgcgaactgtgcctggaatgcgcttttgcgccgccgccgacgcgttccgccggacagccagtgcggattgataagggagaactgacccaggaaagcttctggcaaaccttacagcagtatctcaaacccggcgatattatccttgtcgaccaggggaccgccgcctttggcgctgccgcgctgtcgcttcctgacggcgcggaagttgtggtacagccgctgtgggggtctatcggctattccttgcccgccgcgtttggcgcgcaaaccgcctgtcccgatcggcgggtgattctgattatcggcgatggcgcggcgcagctcacgattcaggagatgggctcgatgttacgcgacgggcaggcgccggtcatcctgctgctcaacaatgacggctataccgtagagcgcgccattcacggcgcggcccagcggtataacgacatcgcgagctggaactggacgcagataccaccggcgctaaacgcggcgcaacaggcggagtgctggcgggtgacgcaggctatccaactggcagaggtcctcgaacgtctggcgcgcccacaacgtctgtcatttattgaagtgatgttgccaaaagccgatctgccggaattactgcgtaccgtgacccgggcgctggaagcccgcaacgggggataa

SEQ ID NO: 4154 - protein, 550 aa, Salmonella enterica subsp. enterica serovar Paratyphi B str. SPB7
MQNPYTVADYLLDRLAGCGIGHLFGVPGDYNLQFLDHVIDHPTLRWVGCANELNAAYAADGYARMSGAGALLTTFGVGELSAINGIAGSYAEYVPVLHIVGAPCSAAQQRGELMHHTLGDGDFRHFYRMSQAISAASAILDEQNACFEIDRVLGEMLAARRPGYIMLPADVAKKTAIPPTQALALPVHEAQSGVETAFRYHARQCLMNSRRIALLADFLAGRFGLRPLLQRWMAETPIAHATLLMGKGLFDEQHPNFVGTYSAGASSKEVRQAIEDADRVICVGTRFVDTLTAGFTQQLPAERTLEIQPYASRIGETWFNLPMAQAVSTLRELCLECAFAPPPTRSAGQPVRIDKGELTQESFWQTLQQYLKPGDIILVDQGTAAFGAAALSLPDGAEVVVQPLWGSIGYSLPAAFGAQTACPDRRVILIIGDGAAQLTIQEMGSMLRDGQAPVILLLNNDGYTVERAIHGAAQRYNDIASWNWTQIPPALNAAQQAECWRVTQAIQLAEVLERLARPQRLSFIEVMLPKADLPELLRTVTRALEARNGG

SEQ ID NO: 4155 - DNA, 1677 bp, Nostoc punctiforme PCC 73102 (Nostoc punctiforme ATCC 29133)
  CDS (1)..(1677): transl_table=11
atggcaacgtttactgttggcgactatttattgcttcgtctggagcaaattggcatcaagcatatctttggcgttgctggagactacaatatggaatttctcgactatattgttaaccataatggcatcgagttaattcctacttgcaacgaacttaacgcatcctatgctgccgatggttatggtcggctcaatggtattgcggcattaataactacctttggtgttggtgaactcagtgctattaatggtgtcgctggcgcttatgctgaacacgttccggttgtagcgattactggtgctcctgcaactaaaattcaagctcttggttcacttgtccatcatacgcttggtactggtgatttctcaatgtttgcccgaatgtatgaacaggtaacggtggctcaagcatatttaacaaacgaaaatgcaacaacggaaattgacggagttttaggtatctgtttgctgaagaagttacctgtttatatttccatacctatggatgttgctctcacagaggtgtctgcaccgtctgattcctttatacccccagtattccagagtgatggcgctactttagccgaaatagttgatgtctgtgtaaacatactggaaaaagcttcccaacctgtgattcttgctgatattggtgtagctcgttatcacttgcatgaacaattgcgaaaactgctaacagctaccggatacccttatgccacgatgaatatgggaaaaggattgctagaagaaactcacccccaattcatcggtatatataatggtgctgccagtgaggaatctgtcagaaaacgtattgagcaggctgattgtgttttaactatcggtgctttgatgactgatttcaacacaggcaagttttctgccaaacttgaccccagccaaactattgaagtgcatgggcagtatgtaaaagttaaacatgctttatacaacaatgtagctatggcagatgtgctttctgctttaagtcaacggttgcagcgccgcgatcctcaaacgctaaacttcaaatcagcaacagagaatttagatgctggttttataacgccaatcgaaggcggctcttcggcaccaattacgcagcagtatttttggcatagatttgctcattttctccaagaagatgacattatcgttgctgagactggaacttgtttgtttggtgcctctatcgttcctttaccaaaaggagctactttcgttgggcaagtactttggggagcgattggctactctgttgcttcattacttggttgtgcgttggcgaagcccaccgcaggtatcgctgcatcacaacgtcgctctatcctactggttggtgacgggtctttccaaatgactgcacaagaactttcaactatcttacggtataacttaaaaccgattatttttttgatcaacaatgatggatatactatagagcgtgatattcatggtgaacgtatgccgtataacgacattcaaccttggaattatcatcagctccctaaggttttcggtggcaatggctggggaattaaagttagtaccgaatcccagttagataaagcattacaaacagctcaacaaaaccatgaccaacttgcttttattgaggttgtgatggataaaatggacagtccagaggttctgttgaagatgttgcagcaataa

SEQ ID NO: 4156 - protein, 558 aa, Nostoc punctiforme PCC 73102 (Nostoc punctiforme ATCC 29133)
MATFTVGDYLLLRLEQIGIKHIFGVAGDYNMEFLDYIVNHNGIELIPTCNELNASYAADGYGRLNGIAALITTFGVGELSAINGVAGAYAEHVPVVAITGAPATKIQALGSLVHHTLGTGDFSMFARMYEQVTVAQAYLTNENATTEIDGVLGICLLKKLPVYISIPMDVALTEVSAPSDSFIPPVFQSDGATLAEIVDVCVNILEKASQPVILADIGVARYHLHEQLRKLLTATGYPYATMNMGKGLLEETHPQFIGIYNGAASEESVRKRIEQADCVLTIGALMTDFNTGKFSAKLDPSQTIEVHGQYVKVKHALYNNVAMADVLSALSQRLQRRDPQTLNFKSATENLDAGFITPIEGGSSAPITQQYFWHRFAHFLQEDDIIVAETGTCLFGASIVPLPKGATFVGQVLWGAIGYSVASLLGCALAKPTAGIAASQRRSILLVGDGSFQMTAQELSTILRYNLKPIIFLINNDGYTIERDIHGERMPYNDIQPWNYHQLPKVFGGNGWGIKVSTESQLDKALQTAQQNHDQLAFIEVVMDKMDSPEVLLKMLQQ

SEQ ID NO: 4157 - DNA, 1686 bp, Bacillus anthracis str. Sterne
  CDS (1)..(1686): transl_table=11
atgattcacttgaaaactcaatatactgtaagtacatatttattagaccgactaagcgaattaggaattgagcatatttttggtatccctggtgattataatttggcttttttagattatgtactcgcacataaaaatttagagtggattggcaattgtaatgaattaaatgcggcatatgctgcagatggatatgctcgtataaaaggaatagcagctcttattaccacctttggcgttggagaattaagcgccataaatggcattgctggctcatatgcagaaaacgtaccagttataaaaattacaggtacaccaccaacaacagtaatggaaaatggagagctagttcatcatacgttaggtgatggaaagttcaatcatttttccaaaatgtatcgagaaatcactattgcacaaactaatttaaccccagagcatgcagtcgaggaaattgaccgtgtgttacgtgcatgttggaatgaaaaacgtcctgttcatattaatttacctattgatgtgtataataaaccaattaatagacctgcagaaccaattttacataaaccgattttaagtaataaagaaacactggataaaatgcttctacatgccatttcaaaaataaatagcgcaaagaaacctattattttagctgattttgaagtagatcgttttcatgcaaaagaatatttatatcaatttgtagaaaaaacggggtttcctattgcaacgttaagtatgggaaaaggaatatttccagaaaaacaccctcaatttataggggtttatgttggtgatgtaagtcctccatacttgcgtaaaagaattgatgaatctgactgtattattagtattggcgtgaagttaactgatactattacaggtggcttcacacaaggttttacgaaagaacaagttattgaaattcatccctacactgtgaaaattacagataaaaaatacgggccagttgtaatgaaagatgttttacaacagttaagtgatgtaattgagcatcgaaatgaagaaacgcttgatattaagccatttatttcagaatctctatctatgacagaagagttcaatccaaaagcacacatggttacacaaaaacgtttttggcaacaaatataccatttcttacaagaaaacgacgtcttacttgcagagcaaggaatacctttctttggtagtgccgctatccctttaccaaacaacactacatatgtagcgcaaccattatggggatcgatcggctatacgttacctgctctacttggtacacagctcgctaatttatcgcggcgcaacattttaattattggtgatggttcttttcaattaattgtccaagaattatcaactatactacgtcaaaatttaaacccaattatatttttaattaacaacaatggttatactgttgaacgtgcaattcatggtcaaaacgaaccgtataatgacatacaaatgtgggagtacacaaaactagcgaaagtattcggaacagaagaaaaaagccaaacatttaaagtacaaaatgaaacagagttacaagaagtcttaactaaaataagtattgataagaatcaacttacctttgttgaaattgtaatgagccaaggggatcagcctgaattgttagctaagcttgggaagagattcggccagcaaaattcttaa

SEQ ID NO: 4158 - protein, 561 aa, Bacillus anthracis str. Sterne
MIHLKTQYTVSTYLLDRLSELGIEHIFGIPGDYNLAFLDYVLAHKNLEWIGNCNELNAAYAADGYARIKGIAALITTFGVGELSAINGIAGSYAENVPVIKITGTPPTTVMENGELVHHTLGDGKFNHFSKMYREITIAQTNLTPEHAVEEIDRVLRACWNEKRPVHINLPIDVYNKPINRPAEPILHKPILSNKETLDKMLLHAISKINSAKKPIILADFEVDRFHAKEYLYQFVEKTGFPIATLSMGKGIFPEKHPQFIGVYVGDVSPPYLRKRIDESDCIISIGVKLTDTITGGFTQGFTKEQVIEIHPYTVKITDKKYGPVVMKDVLQQLSDVIEHRNEETLDIKPFISESLSMTEEFNPKAHMVTQKRFWQQIYHFLQENDVLLAEQGIPFFGSAAIPLPNNTTYVAQPLWGSIGYTLPALLGTQLANLSRRNILIIGDGSFQLIVQELSTILRQNLNPIIFLINNNGYTVERAIHGQNEPYNDIQMWEYTKLAKVFGTEEKSQTFKVQNETELQEVLTKISIDKNQLTFVEIVMSQGDQPELLAKLGKRFGQQNS

SEQ ID NO: 4159 - DNA, 1686 bp, Bacillus thuringiensis serovar konkukian str. 97-27
  CDS (1)..(1686): transl_table=11
atgattcatttgaaaacgcactatactgtaagtacatatttactagatcgattaagcgaattaggaattgaacatatttttggtatccctggtgattataatcttgcctttttagatgatgtaatagcacatgaaaagttagagtggattggcaattgtaatgaattaaatgcggcatatgctgcagatggatatgctcgtataaaaggaatagcagctcttattaccacctttggcgttggagaattaagcgccataaatggcattgctggttcatatgctgaaaatgtacccgttataaaaataacaggtacgccaacaacaactgtaatggagaatggggagctcgttcatcatacgttaggcgacggaaagtttaatcacttttccaatatgtatcgagaaattactgttgcacaaactaatttaaccccagagcatgcagtcgaggaaattgaccgtgtgttacgtgcatgttggaatgaaaaacgtcctgttcatattaatttacctattgatgtgtataataaaccaattaataaacctgcaggaccaattttacataaaccgattttaagtaataaagaaacactggataaaatgcttctacatgccatttcaaaaataaatagcgcaaagaaacctattattttagcggattttgaagtagatcgttttcatgcaaaagaatatttatatcaatttgtagaaaaaacagggtttcctattgcaacgttaagtatgggaaaaggaatatttccagaaaaacaccctcaatttatagggatttatactggtgatgtaagttctccatacttgcgtaaaagaattgatgaatctgactgtattattagtattggtgtgaagttaactgatactattacaggtggcttcacacaaggttttacgaaagaacaagttattgaaattcatccctacactgtgaaaattacagataaaaaatacgggccagttgtaatgaaagatgttttacaacagttaagtgatgtaattgagcatcgaaatgaagaaacgcttgatattaagccatttatttcagaatcgctatctatgacagaagagttcaatccaaaagcacaaatggttacacaaaaacgtttttggcaacaaatataccatttcttacaagaaaacgacgtcttacttgcagagcaaggaacacctttctttggtagtgccgctatccctttaccaaacgacactacatatgtagcgcaaccattatggggatcgatcggctatacgttacctgctctacttggtacacagctcgctaatttatcgcggcgcaacattttaattattggtgatggttctttccaattaactgtccaagagttatcgaccatgcttcgtcaaaatttaaaaccgattatatttttaattaataacaatggttatactgttgaacgtgcaattcatggtcaaattgaaccatataatgacatacaaatgtgggagtacacaaaactagcgaacgtattcggaacagaagaaaaaagccaaacatttaaagtagaaaatgaaacagagttacaagaagtcttaactaaaataagtattgataaggatcaacttacctttgttgaagttgtaatgagtcaaggagatcagcctgaattgttagctaagcttgggaagagattcggccagcaaaattcttaa

SEQ ID NO: 4160 - protein, 561 aa, Bacillus thuringiensis serovar konkukian str. 97-27
MIHLKTHYTVSTYLLDRLSELGIEHIFGIPGDYNLAFLDDVIAHEKLEWIGNCNELNAAYAADGYARIKGIAALITTFGVGELSAINGIAGSYAENVPVIKITGTPTTTVMENGELVHHTLGDGKFNHFSNMYREITVAQTNLTPEHAVEEIDRVLRACWNEKRPVHINLPIDVYNKPINKPAGPILHKPILSNKETLDKMLLHAISKINSAKKPIILADFEVDRFHAKEYLYQFVEKTGFPIATLSMGKGIFPEKHPQFIGIYTGDVSSPYLRKRIDESDCIISIGVKLTDTITGGFTQGFTKEQVIEIHPYTVKITDKKYGPVVMKDVLQQLSDVIEHRNEETLDIKPFISESLSMTEEFNPKAQMVTQKRFWQQIYHFLQENDVLLAEQGTPFFGSAAIPLPNDTTYVAQPLWGSIGYTLPALLGTQLANLSRRNILIIGDGSFQLTVQELSTMLRQNLKPIIFLINNNGYTVERAIHGQIEPYNDIQMWEYTKLANVFGTEEKSQTFKVENETELQEVLTKISIDKDQLTFVEVVMSQGDQPELLAKLGKRFGQQNS

SEQ ID NO: 4161 - DNA, 1668 bp, Pectobacterium atrosepticum SCRI1043
  CDS (1)..(1668): transl_table=11
atgagcgaaaattatacggtgggcgattatttactggatcgcctgacacagatcggcattcagcatctcttcggcgtaccgggtgattacaacctgcactttctcgatcatgtcatcagaaacccagatattacctgggtgggctgcgcgaacgagttaaacgcagcttacgctgctgatggctatgcacgatgtcgcccggcagcggcgctgctcaccactttcggcgtcggtgaactcagcgcgattaacggcattgcgggcagctacgcggaatgcctacctgtcatccacattgccgcagcgccctgtctcgcttcacaacgcaatggcgaattactccatcacacattaggagacggtgactttagccacttttcccgcatggcggcagaagtcaccgttgcccaagccagcctcaccgtcgaaaacgcaaccgcagagatcgacagagtgattggtgaagccctcgctcagcacaaaccggtctacctgtttctaccagtagacgtggcggcagcacctgtcggtgcacgaccctatccgctggttatccctgaaccattacactctgatgattcgctacgcgcctttaccaccgctgccaccgatatgctgagcaaggcaaaatcagtctcgttgctggcagattttctggctcaacgctttagcctcgcggggaaaatccaacgctggcttgataaaacaccgcttccccacgccactttgctgatgggaaaaggcacgctaaacgaacagcaccgcagctttaccggaacctactcaggcagcggcagtcacgaatcaatccgagcgcacatcgaagatgcggatgccatcatcagcatcggcgtgcgttataccgatacgattaccaccggttttagccatcagattccgatcgaaaaaaatatcgatattcagccaacgctggctcgcgtagggaatcaggttttcccctccgttcccatgtcagacgctatcgcagtgctggaaaaaatcacagaaaaattcgcctcccgctgggatcactgcaccattacgcctccggttttaccgcaatcggaacacagaagcgcactcagtcagcgcgagttttggcaacagatacagcgtttcctccgccctgacgatatcctcgtcaccgatcaaggcacctcctgttttggtgccgctacgctccggttaccagcgggctgtcatttcatcgtccaaccgctgtgggggtcgataggctattctctgccagccgcattcggcgcacagattgccgaacccgaaagacgcgtggttctgttgatcggcgatggctcacttcagctcaccgtacaggagttgggttctatcattcgggatcgcttgaatatggtcattgtggtgctgaataacgaaggctacaccgtcgaacgcgctattcacggctcggaacagcgctataacgatattgcggcctggaactggacacaacttcctaccgcgctgggcgcaaatgaaaacgagatactctgcaagcaggtgcgttcacccatcgcgctcgcgcaggtacttgagcaagtgaacgcggaatctcgcttgtcactcatagaggtggtattgccgagaatggatatcccagcgctcttacacaccatcacgcaatcgcttgagacacgcaacaccgtgcagtaa

SEQ ID NO: 4162 - protein, 555 aa, Pectobacterium atrosepticum SCRI1043
MSENYTVGDYLLDRLTQIGIQHLFGVPGDYNLHFLDHVIRNPDITWVGCANELNAAYAADGYARCRPAAALLTTFGVGELSAINGIAGSYAECLPVIHIAAAPCLASQRNGELLHHTLGDGDFSHFSRMAAEVTVAQASLTVENATAEIDRVIGEALAQHKPVYLFLPVDVAAAPVGARPYPLVIPEPLHSDDSLRAFTTAATDMLSKAKSVSLLADFLAQRFSLAGKIQRWLDKTPLPHATLLMGKGTLNEQHRSFTGTYSGSGSHESIRAHIEDADAIISIGVRYTDTITTGFSHQIPIEKNIDIQPTLARVGNQVFPSVPMSDAIAVLEKITEKFASRWDHCTITPPVLPQSEHRSALSQREFWQQIQRFLRPDDILVTDQGTSCFGAATLRLPAGCHFIVQPLWGSIGYSLPAAFGAQIAEPERRVVLLIGDGSLQLTVQELGSIIRDRLNMVIVVLNNEGYTVERAIHGSEQRYNDIAAWNWTQLPTALGANENEILCKQVRSPIALAQVLEQVNAESRLSLIEVVLPRMDIPALLHTITQSLETRNTVQ

SEQ ID NO: 4163 - DNA, 1686 bp, Bacillus cereus E33L
  CDS (1)..(1686): transl_table=11
atgattcacttgaaaactcaatatactgtaagtacatatttattagaccgactaagcgaattaggaattgagcatatttttggtgtccctggtgattataatttggcttttttagatgatgtactcgcacataaaaatttagagtggattggcaattgtaatgaattaaatgcggcatatgctgcagatggatatgctcgtataaaaggaatcggtgctcttattaccacctttggcgttggagaattaagtgccattaacggaattgctggttcatatgctgaaaatgtacccgttataaaaataacaggtacgccaacaacaactgtaatggaaaatggggagctcgttcatcatacgttaggcgacggaaagtttaatcacttttccaatatgtatcgggaaattactgttgcacaaactaatttaaccccagagcatgcagtcgaagaaattgaccgtgtgttacgtgcatgttggaatgaaaaacgtcctgttcatattaatttacctattgatgtgtataataaaccaattaataaacctgcagaaccaattttacataaaccgattttaagtaataaagaaacaatggataaaatgcttctacatgccatttcaaaaataaatagcgcaaagaaacctattattttagcggattttgaagtagatcgttttcatgcaaaagaatatttatatcaatttgtagaaaaaacagggtttcctattgcaacgttaagtatgggaaaaggaatatttccagaaaaacaccctcaatttatagggatttatactggtgatgtaagttttccatacttgcgtaaaagaattgatgaatctgactgtattattagtattggtgtgaagttaactgatactattacaggtggcttcacacaaggttttacgaaagaacaagttattgaaattcatccctacactgtgaaaattacagataaaaaatacgggccagttgtaatgaaagatgttttacaacagttaagtgatataattaagcatcgaaatgaagaaacgcttgatattaagccatttatttcagaatcgctatctatgacagaagagttcaatccaaaagcacacatggttacacaaaaacgtttttggcaacaaatataccatttcttacaagaaaacgacgtcttacttgcagagcaaggaacacctttctttggtagtgccgctatccctttaccaaacaacactacatatgtagcgcaaccattatggggatcgatcggctatacattacctgctctacttggtacacagctcgctaatttatcgcggcgcaacattttaattattggtgatggttctttccaattaactgtccaagagttatcgaccatgcttcgtcaaaatttaaaaccgattatatttttaattaataacaatggttatactgttgaacgtgcaattcatggtcaaaacgaaccgtataatgacatacaaatgtgggagtacacaaaactagcgaacgtattcggaacagaagaaaaaagccaaacatttaaagtagaaaatgaaacagagttacaagaagtcttaactaaaataagtattgataaggatcaacttacctttgttgaagttgtaatgagccaaggtgatcagcctgaactgctagctaaacttgggaaaagattcggccaacaaaattcttaa

SEQ ID NO: 4164 - protein, 561 aa, Bacillus cereus E33L
MIHLKTQYTVSTYLLDRLSELGIEHIFGVPGDYNLAFLDDVLAHKNLEWIGNCNELNAAYAADGYARIKGIGALITTFGVGELSAINGIAGSYAENVPVIKITGTPTTTVMENGELVHHTLGDGKFNHFSNMYREITVAQTNLTPEHAVEEIDRVLRACWNEKRPVHINLPIDVYNKPINKPAEPILHKPILSNKETMDKMLLHAISKINSAKKPIILADFEVDRFHAKEYLYQFVEKTGFPIATLSMGKGIFPEKHPQFIGIYTGDVSFPYLRKRIDESDCIISIGVKLTDTITGGFTQGFTKEQVIEIHPYTVKITDKKYGPVVMKDVLQQLSDIIKHRNEETLDIKPFISESLSMTEEFNPKAHMVTQKRFWQQIYHFLQENDVLLAEQGTPFFGSAAIPLPNNTTYVAQPLWGSIGYTLPALLGTQLANLSRRNILIIGDGSFQLTVQELSTMLRQNLKPIIFLINNNGYTVERAIHGQNEPYNDIQMWEYTKLANVFGTEEKSQTFKVENETELQEVLTKISIDKDQLTFVEVVMSQGDQPELLAKLGKRFGQQNS

SEQ ID NO: 4165 - DNA, 1680 bp, Legionella pneumophila subsp. pneumophila str. Philadelphia 1
  CDS (1)..(1680): transl_table=11
atgtgctcaattggagagtatttggcaaagcggctggaggaattaaatatttctgaatattttgctataccgggtgattacaatcttattttactcgatgaggtcctgaaaaacgaaaaaataaaaatgattaattgctgtaatgagttgaatgccggatacgctgctgatggctatgcccgtgtaaaaggggtttctgctttattcgttacttatagtgtcggtggacttagtgttgttaatgcagttgcaggagcatatgctgaaaatcttcccattttggttatatcaggtggcccaaataccaactccatacaggatgctgaaattctccatcacacgttggcgactgaagataatttgtatgtaagggacattttttctcgaattactgcccatgtcgtttgtattcgaaagccagagcaggctgccatgcagatagacgaggctatagcaatcgcaatcgctaaaaaaaagccggtctatattgaaatagcgtgtaatattgctaactatcctatctccaagcctactcaacgcgcattcaacacctataaaattagcgacagttcgtctctggctgcagcagtagagcatgctgctgaaaaattaaactccgctctaaagcccagcttgattgtaggtagtaaggttaggcattgtaatgcaatcaattctgtcagcgagttggcaaagtgtactggatatgctatggcggctatgcccgatgcgaaaggatttatctcagaacagcatcctaactttataggtatctattggggaccagtcagctcttctggatgcgccgaaattatcgattccagtgatgcctatctgcttattgggcctaatgagaatgactatactacagttgggtatgtatggggaatcaacccccacaaatcaataaagaccaccaagggaggggttattattggtgaaacagtttataccaatatcttcatgaatgattttctcagagaattaagtaaaaaattaaaatttaatgatgcttcatacaaagcttataaacgaattgctgaagaaactgttgtctatccagagttagatcaacctgacgctccattaagcagccgttatttgtttggccaaattcagaaaatgctttctgacaaaaaagctttgttggctgaaacaggggactcctggtttaattgtatgcgcctgtctttgcctgaaggttgtcctttcgaaattcaaatgcagtatggttctattggttggtcagtgggtgctttgctaggcatgcaagctgctttgcataatcaaaaaagagtgattgcctgcataggagatggctcatttcaaatgactgcccaggaaatatcaaccatgatacgttacgggtataaaccaattatttttttaatgaataatgcttgttacactattgaagtacaaattcatgatggtccttataatgtcattaataattggcgttacgctgaactggttaatgtattccgcggggaacagagtaatgcaaaatcttttgtagttaaaaccaacaaggaactactcactgcaattaaacaggcagaaaaaacagacgcgctttgttttattgaggtgttcctggacaaggatgattgcaataaaaacttgttggaatggggctcaagagtggcaaattataatagccgtcctcctcgtagatag

SEQ ID NO: 4166 - protein, 559 aa, Legionella pneumophila subsp. pneumophila str. Philadelphia 1
MCSIGEYLAKRLEELNISEYFAIPGDYNLILLDEVLKNEKIKMINCCNELNAGYAADGYARVKGVSALFVTYSVGGLSVVNAVAGAYAENLPILVISGGPNTNSIQDAEILHHTLATEDNLYVRDIFSRITAHVVCIRKPEQAAMQIDEAIAIAIAKKKPVYIEIACNIANYPISKPTQRAFNTYKISDSSSLAAAVEHAAEKLNSALKPSLIVGSKVRHCNAINSVSELAKCTGYAMAAMPDAKGFISEQHPNFIGIYWGPVSSSGCAEIIDSSDAYLLIGPNENDYTTVGYVWGINPHKSIKTTKGGVIIGETVYTNIFMNDFLRELSKKLKFNDASYKAYKRIAEETVVYPELDQPDAPLSSRYLFGQIQKMLSDKKALLAETGDSWFNCMRLSLPEGCPFEIQMQYGSIGWSVGALLGMQAALHNQKRVIACIGDGSFQMTAQEISTMIRYGYKPIIFLMNNACYTIEVQIHDGPYNVINNWRYAELVNVFRGEQSNAKSFVVKTNKELLTAIKQAEKTDALCFIEVFLDKDDCNKNLLEWGSRVANYNSRPPRR

SEQ ID NO: 4167 - DNA, 1686 bp, Mycobacterium avium 104
  CDS (1)..(1686): transl_table=11
gtgactgatgctgcgaccgaacccgcatacaccgtcggtgactacctgttggaccgcctcgccgaactcggcgtctcggagatcttcggcgtcccgggtgattacaacctcgagttcctcgaccacatcgtcgcccaccccaggctgcgctgggtcggcaacgccaacgagctcaacgccggctacgccgcagacggatacggccggctgcgcggaatgtcagcgctggtaacgacattcggggtcggcgagctgtctgcggccaacgcggtggcgggcagttacgccgagcaggtgccggtggtgcacatcgtcggcggcccgtcgaaagacgcgcagggcaccaggcgcgcgctgcaccattcgctgggcgacggggacttcgagcacttcttccgggtcagccgcgaaatcacttgcgctcaagcaaatctcatgccagcgaccgcgcgcagagagatcgaccgggtgctgtcggaggtgcgcgagcagaagcgccccggttacatcctgctgtccaccgacgtggcccgcttccccaccgagccacccgaggctgcgctgccccgctacaccggcggcaccagcccccgcgcgctggcgatgttcaccgaggccgccgcggcactcatcggcgagcaccggatcaccgtgctggccgacctgctggtgcaccggctgcaggcgatcaaggagctcgaggcgctgctggcggccgacgtggtgccgcacgccacgctgatgtggggcaagagtctgctcgacgagagctcaccgaacttcctgggcatctacgcgggctcggccagcgcgccggcggtgcgcaccgcgatcgaagaggcgcccgtattggtcaccgccggggtggtgttcaccgacatggtcagcggcttcttcagccagcggatcgacccggcccggaccatcgacgtcgggcagtaccaaagcagtgtggccggagaggtgttcgcgccgttggagatgggcgaagcgcttcaggcgctggccgcgatcctcacacggcgcggggtctcctcgccgccggtggcctcgccgccggccgagccgctgccgccgcccccaccccgcgagcaaccgctgacccagaagatggtgtgggaccgggtgtgcacggccctcacaccgggcaacgtggtgctggccgaccagggcacctccttctacggcatggcagaccaccggttgccgcagggagtcaccttcatcggccaaccgctttggggctcaatcggttacacgctgcccgccgcgctcggcgccgcggtggcgcacccggaccgccggacggtgctgctgatcggggacggcgccgcgcagttgaccgtccaagagctcggcacctttgcccgcgaagggctttcccccgtcatcgtggtggtcaacaacgacggctacaccgtcgagcgggcgatccacggcgagacggcgccctacaacgacatcgtcgggtggaagtggacggaggtccccaactcgttgggcgtcacagatcacctggcgttccgggtgcagacctacggcgaactcgatgacgcgttgaccgccgccgcacggcaccaagaccggatggtgctggtcgaggtggtgctgccgcggctcgagatcccgcggctgctggtcgaactcgtgcgaccgacctcaccggacggcagcccgcgccgctag

SEQ ID NO: 4168 - protein, 561 aa, Mycobacterium avium 104
MTDAATEPAYTVGDYLLDRLAELGVSEIFGVPGDYNLEFLDHIVAHPRLRWVGNANELNAGYAADGYGRLRGMSALVTTFGVGELSAANAVAGSYAEQVPVVHIVGGPSKDAQGTRRALHHSLGDGDFEHFFRVSREITCAQANLMPATARREIDRVLSEVREQKRPGYILLSTDVARFPTEPPEAALPRYTGGTSPRALAMFTEAAAALIGEHRITVLADLLVHRLQAIKELEALLAADVVPHATLMWGKSLLDESSPNFLGIYAGSASAPAVRTAIEEAPVLVTAGVVFTDMVSGFFSQRIDPARTIDVGQYQSSVAGEVFAPLEMGEALQALAAILTRRGVSSPPVASPPAEPLPPPPPREQPLTQKMVWDRVCTALTPGNVVLADQGTSFYGMADHRLPQGVTFIGQPLWGSIGYTLPAALGAAVAHPDRRTVLLIGDGAAQLTVQELGTFAREGLSPVIVVVNNDGYTVERAIHGETAPYNDIVGWKWTEVPNSLGVTDHLAFRVQTYGELDDALTAAARHQDRMVLVEVVLPRLEIPRLLVELVRPTSPDGSPRR

SEQ ID NO: 4169 - DNA, 1686 bp, Bacillus cereus G9241
  CDS (1)..(1686): transl_table=11
atgattcacttgaaaacgcaatatactgttagtacttatttattagaccgactaagcgaattaggaattgaacatatttttggtgtccctggtgattataatttggcttttttagatgatgtaatagcacatgaaaatgtagagtggattggcaattgtaatgaattaaatgcggcatatgctgctgatggatatgctcgtataaaaggaatcgctgctcttattaccactttcggtgttggagaattaagcgccattaacggtattgctggatcatatgcagaaaatgtacctgttataaaaattacggggacaccaccaacaacagtaatggaaaatggagcactcgttcatcatacgttaggtgatggaaagttcgatcatttttccaatatgtatagagaaatcacggtggcacaatcaaaattaacacctgagcatgccgctgaagaaatcgaccatgtgttacgtgcatgttggagtgcgaaacgccctgttcatattcaattaccgattgatgtgtataataaaccaattaataaacctacggaaccgattttacataaaccagttgtaagtaataaagatgcgctggataaaatgcttctacatgccacttcaaaaataaacagtgccaaaaaacctgtaattttagcggattttgaagtagatcgatttcacgctaaagaatatttatatcaattcgtagaaaaaactgggtttcccatcgcaacgttaagtatgggaaaaggaatattcccagaaaaacactctcaatttatagggatttatactggtgatgtaagttctccgtacttgcgaaaaagaattgatgaatctgattgtattattagtattggtgtgaagttaactgatactattacaggtggcttcacacaagattttacaaaagaacaagttatagaaatacacccctacactgtgaaaattatagataaaaaatacgggccagttgtaatgaaagatgttttacaacagttaagtaatgtaattgaacatcgaaatgaggaaacacttgatataaagccatttatttcagaatcactatctattactgaaaagtttaatccaaagccacaaatggttacacaaaaacgattttggcaacaaatataccatttcttacaggaaaacgacgtcttacttgcagagcaaggaacacctttctttggtagtgccgctatccctttaccaaacaacactacatatgtagtgcaaccattatggggatcgatcggctatacattacctgctctacttggtacacagctcgctaatgtatcgcggcgcaacattttaattactggtgatggttcttttcaattaactgtccaagaattatcgactatactacgtcaaaatttaaagccaattatatttttaattaataacaacggatatactgttgaacgtgcaattcatggtcaaaacgaaccatataatgacatacaaatgtgggattacacaaaactcgcaaacgtatttggatcaaaagaaaaaagcctaacatgtaaagtggaaaatgaaatagagttagcagaagtcttaacggatataactttaaataacaaacaacttacctttattgaagttgtaatgagtcaaggggatcagcctgaattgttagctaaacttggtgaaagatttggcaagcaaaattcttaa

SEQ ID NO: 4170 - protein, 561 aa, Bacillus cereus G9241
MIHLKTQYTVSTYLLDRLSELGIEHIFGVPGDYNLAFLDDVIAHENVEWIGNCNELNAAYAADGYARIKGIAALITTFGVGELSAINGIAGSYAENVPVIKITGTPPTTVMENGALVHHTLGDGKFDHFSNMYREITVAQSKLTPEHAAEEIDHVLRACWSAKRPVHIQLPIDVYNKPINKPTEPILHKPVVSNKDALDKMLLHATSKINSAKKPVILADFEVDRFHAKEYLYQFVEKTGFPIATLSMGKGIFPEKHSQFIGIYTGDVSSPYLRKRIDESDCIISIGVKLTDTITGGFTQDFTKEQVIEIHPYTVKIIDKKYGPVVMKDVLQQLSNVIEHRNEETLDIKPFISESLSITEKFNPKPQMVTQKRFWQQIYHFLQENDVLLAEQGTPFFGSAAIPLPNNTTYVVQPLWGSIGYTLPALLGTQLANVSRRNILITGDGSFQLTVQELSTILRQNLKPIIFLINNNGYTVERAIHGQNEPYNDIQMWDYTKLANVFGSKEKSLTCKVENEIELAEVLTDITLNNKQLTFIEVVMSQGDQPELLAKLGERFGKQNS

SEQ ID NO: 4171 - DNA, 1659 bp, Cyanothece sp. PCC 8801
  CDS (1)..(1659): transl_table=11
atgatgaccatcggtgagtatttatttcaacgcttaaaagagctaggggttgatcatgtttttggagtgccgggggactatgttcttgggttaatggatgtgttgattaaaagtcccctagaattaatctgtacctgtaatgaactcaacgccggatatgcggcagatgcctacgcaagaattagaggattaggcgttgtttgtattacctatggagttggggggtttagtttagttaatgccgtcgttggagcctatgcagagagagttcccttagtcgttattagtggtgctcctaatagtgcagtccgaaaaaatcatctccttttgcaccatacaacaggagattataatctccaattatccatcatggaaaaggtgacagttgcttctgttattttaactcaagcgagtcaagcagccaagcaaattgatgaagttttatccgcctgtcttcattataaacgacccgtctacattgaaattcctttagatgttgtgaatcaaccctgcactttttcggagtcttccctcaatgcgattcctcaattaacggaattaaccgataatgacgcattaaaagaagccatcacagaagcctctgaattactcaaaaaagctcaaaatccgattattttagctggcgttgaaattgatcgatttcaactaaaagagcccctaataaaactccttgaaacaacaggttatcctatcgctactactattttaggcaagtcttgtcttcctgaagttcatccgcaatttattggtaattatgtaggcgcacttagccgagattatgttcgtcaaagagtagaaaacgctgattgtattttgtgtttaggtgcaatcatgtctgatatgaatttaggcatctatacggctcaactggatactcaaaaactgattaatgctaattctgaaaaagtcaaaattaaacatcatttttatcagccgatttatttaggagattttattgcaggattaatccctaatcttagctatcaagagtcaaaccctttaaatatccaaccagctatcaaacgattatctaaaacctttgaatttaagactgaagataagttaacatcaggtcgattttatgaagcaattaatcattttttggataatgatttgctggttatttctgacacaggagattcaattatagccagtattgatctattaatgcacaaaggatcagattttattggacaagccttttatttatcaattggatattcaattccggcttgtttaggggcttcttttgctgctcccgataagcgtattattgttttggttggagatggtgcttttcagatgacagcacaggaattatcaacaattattcggcatcaactcaatccgattattttcttaattaacaatgacggttataccattgagagagtaattcacgatggaatttataacgatcttcaagcttggaaatatcatgaattacctcatatttttggagagagttggagttgtgaagtttccacagaaggagaattacaaaaagccttactttacgcaaaaatgaatactcattgtgtttgttttattgaagttcatcttgatcgcttcgattgttctccgggtttaattcgcttaggcaaagccattgaaaaaatgcaaaaattaagtaattaa

SEQ ID NO: 4172 - protein, 552 aa, Cyanothece sp. PCC 8801
MMTIGEYLFQRLKELGVDHVFGVPGDYVLGLMDVLIKSPLELICTCNELNAGYAADAYARIRGLGVVCITYGVGGFSLVNAVVGAYAERVPLVVISGAPNSAVRKNHLLLHHTTGDYNLQLSIMEKVTVASVILTQASQAAKQIDEVLSACLHYKRPVYIEIPLDVVNQPCTFSESSLNAIPQLTELTDNDALKEAITEASELLKKAQNPIILAGVEIDRFQLKEPLIKLLETTGYPIATTILGKSCLPEVHPQFIGNYVGALSRDYVRQRVENADCILCLGAIMSDMNLGIYTAQLDTQKLINANSEKVKIKHHFYQPIYLGDFIAGLIPNLSYQESNPLNIQPAIKRLSKTFEFKTEDKLTSGRFYEAINHFLDNDLLVISDTGDSIIASIDLLMHKGSDFIGQAFYLSIGYSIPACLGASFAAPDKRIIVLVGDGAFQMTAQELSTIIRHQLNPIIFLINNDGYTIERVIHDGIYNDLQAWKYHELPHIFGESWSCEVSTEGELQKALLYAKMNTHCVCFIEVHLDRFDCSPGLIRLGKAIEKMQKLSN

SEQ ID NO: 4173 - DNA, 1641 bp, Cyanothece sp. PCC 7424
  CDS (1)..(1641): transl_table=11
atgaatactgtcggaaaatatctctgtgatcgcttaaaaagtttaggagtcgatcatgtctttggtgtacccggagattatgtcctagacttaatggatgttttaggggaaaactccctagaattagtgggaacttgtaatgaactgaacgccggttatgctgcggatgcttatgctagagtcaaaggattaggggcagtttgtattacctatggggtaggaggatttagtttagttaatgcagtggtcggagcttatgcagaaagagttcctttagtggtgattagtggcgctcctaacagttctgttagaaacagcagaaatcatcttttactgcaccatacgaccggggattataatctacaatattctatcatggaaaaggcaaccgttgcctcggttatcctcaccaatgccactcaagcaccgagtcaaattgataaagcttttgctgcctgtttgcatcataaacgcccggtttatattgaaattccccaagacttagttaatcaaccctgtaaaccttgtgaacctttagaaattcctccccccaattttaccgatactgaagcgttaaaagaagccgtccaagaggccgccgacttattagaagccgcccaacgtccggtcattttagccggggttgaatttcatcgttttggactggaagaaaaattattaaaccttctagaaaccacaggttatccgattgcaactactctgttaggtaagtcttgtatttctgaagcccatcctcaatttattgggacttatgtaggcgcattaagtcgggaaaatgtgactggacgcattgaaactgccgactgtgttctctgtcttggggcgattatgtctgatatgaatttaggaggaaatacggctaaattagatcagaataaattaattaatgccaactcagacaaagttaagatcaaacatcatttttatgatccagtttttttaggggattttattgatgaattaacgagcaagttaactcacaaagagtatgagagcttggatattaaacccgcctattatctgcggattaaagaatttactcctcaacctgagcaaaaaataacgaatctccgcttttatgaacgattaaatcattttatcaatgatggatttatggtcatttctgatacgggagatgccattgttgccacgatagatttattaatgactaaagggacagattttattgggcaagccttttatctatcaattggctattcaattcctgcttgtttaggagcgggtttagcctcaaacagtcgtccgatggtctttgttggtgatggggcttttcaaatgacggctcaagaattatcgacgattatcagacataatcttaatccgatcatttttctgattaataatgatggttataccattgaacgagtcataaaagatgggacttacaatgatttacaaccttggaaatatcaccaattaccccgcatatttggaaaaagttggagttgtgaagtccgcactgaaggagaattagaagaagccttaacccaagccaaagcgaatacagattgtgtttcttttattgaagttcatctcgatcggtttgactgcgcccaagggttaatccgtttaggaagggcactcagaggaaaaagttag

SEQ ID NO: 4174 - protein, 546 aa, Cyanothece sp. PCC 7424
MNTVGKYLCDRLKSLGVDHVFGVPGDYVLDLMDVLGENSLELVGTCNELNAGYAADAYARVKGLGAVCITYGVGGFSLVNAVVGAYAERVPLVVISGAPNSSVRNSRNHLLLHHTTGDYNLQYSIMEKATVASVILTNATQAPSQIDKAFAACLHHKRPVYIEIPQDLVNQPCKPCEPLEIPPPNFTDTEALKEAVQEAADLLEAAQRPVILAGVEFHRFGLEEKLLNLLETTGYPIATTLLGKSCISEAHPQFIGTYVGALSRENVTGRIETADCVLCLGAIMSDMNLGGNTAKLDQNKLINANSDKVKIKHHFYDPVFLGDFIDELTSKLTHKEYESLDIKPAYYLRIKEFTPQPEQKITNLRFYERLNHFINDGFMVISDTGDAIVATIDLLMTKGTDFIGQAFYLSIGYSIPACLGAGLASNSRPMVFVGDGAFQMTAQELSTIIRHNLNPIIFLINNDGYTIERVIKDGTYNDLQPWKYHQLPRIFGKSWSCEVRTEGELEEALTQAKANTDCVSFIEVHLDRFDCAQGLIRLGRALRGKS

SEQ ID NO: 4175 - DNA, 1818 bp, Lycoris aurea
  CDS (1)..(1818)
atggaaacttctatcggatccgtggacgcggcgaaacccgcaccgaacggcatggtggggtccccgccgtcggcaaccgcccacccgataactccatgcttgcccgccgccgccatcccctcggaatgcactctgggcggccacgtggctcggcggctggtccaggtgggggtccgcgacttcttcggcgttcccggcgacttcaacctgaccctcctcgaccacctcatcgccgagcccggcctcaactacgtcggctgctgcaacgagctcaacgccggatatgccgccgacggctacgcccgcgcccacggcgtcggcgcctgcgtcgtcaccttcaccgtcgggggcttgagtgttttgaatgcgatcgcgggggcgtatagtgagaacttgccgttgatttgtatcgcgggggggccgaattcgaatgattttggcacgagtcggatcttgcatcataccattgggttgcccgacttctcgcaggagttgaggtgttttcagaccatcacttgctttcaggctgtggtgaataatttggaggatgcgcatgagttggttgatacagcgatatcaacggctttgaaggagagcaagcctgtgtacatcagcatcagctgtaatttgccggggatccctcatccgacgtttactccggagcctgtgcccttctcgttgtctcctagagtgagcaacaagatgggccttgaagctgcagttgaggccaccgttgcattcctaaacaaagcagtgaagccagtcatggtcggcgggcccaaaatccgcgtggctaaggctggagatgcctttgtcgaactagccaatgcgagcggctatgctgtcgccgtaatgccatcagctaaaggtctcgtacccgaaactcaccctagattcatcggcacctactggggtgcggtcagcaccgctttttgctctgaaattgtcgaatcatctgatgcctacatttttgcgggccccatcttcaatgactacagctctgttgggtactctctccttttgaagaaggagaaggccattattgttgagcccgatcgagttgtagttgccaacggacctgcatttggttgtgtattgatgaaggattttcttagagagcttgccaagaggcttaagaagaatacgactgcctatgagaattatcagaggatctttgtgcctgagggtcaaccgcttgaggcggctccgaaagagcctattagggttaatatcctcttcaagcacattcagaagatgctgtccggtgatactgctgtgatcgctgagactggagattcttggttcaactgtcagaagctgaagttgccagatggttgtggatacgaattccaaatgcagtatgggtcgatcggctggtcagtgggagcaactcttgggtatgctcaggctgcaaaggataagcgtgtgattgcctgcatcggcgatggaagctttcaggtgacggcacaggatgtgtctacaatgataaggtttgggcagaacccgatcatcttcctcatcaacaatggaggttacacgattgaagtagagatccacgacggtccttacaacgtgatcaagaactggaactacacggcgttcgttgaagcgctccacaacggcgaaggtaaatgctggaccgccaaggtcttctgcgaggaggacctcaaagaggcgatcgagaccgcaactggaccgaagaaaggctgcttgtgcttcatcgaggttatcgcgcacaaggatgatacgagcaaagagctgctcgagtggggttccagggttgctgctgctaacagcaggccaccaaatccgcaataa

SEQ ID NO: 4176 - protein, 605 aa, Lycoris aurea
METSIGSVDAAKPAPNGMVGSPPSATAHPITPCLPAAAIPSECTLGGHVARRLVQVGVRDFFGVPGDFNLTLLDHLIAEPGLNYVGCCNELNAGYAADGYARAHGVGACVVTFTVGGLSVLNAIAGAYSENLPLICIAGGPNSNDFGTSRILHHTIGLPDFSQELRCFQTITCFQAVVNNLEDAHELVDTAISTALKESKPVYISISCNLPGIPHPTFTPEPVPFSLSPRVSNKMGLEAAVEATVAFLNKAVKPVMVGGPKIRVAKAGDAFVELANASGYAVAVMPSAKGLVPETHPRFIGTYWGAVSTAFCSEIVESSDAYIFAGPIFNDYSSVGYSLLLKKEKAIIVEPDRVVVANGPAFGCVLMKDFLRELAKRLKKNTTAYENYQRIFVPEGQPLEAAPKEPIRVNILFKHIQKMLSGDTAVIAETGDSWFNCQKLKLPDGCGYEFQMQYGSIGWSVGATLGYAQAAKDKRVIACIGDGSFQVTAQDVSTMIRFGQNPIIFLINNGGYTIEVEIHDGPYNVIKNWNYTAFVEALHNGEGKCWTAKVFCEEDLKEAIETATGPKKGCLCFIEVIAHKDDTSKELLEWGSRVAAANSRPPNPQ

SEQ ID NO: 4177 - DNA, 1818 bp, Lycoris aurea
  CDS (1)..(1818)
atggaaacttctatcggatccgtggacgcggcgaaacccgcaccgaacggcatggtggggtccccgccgtcatcaaccgcccacccgataaccccatgcttgcccgccgccgccatcccctcggaatgcactctgggcggccacgtggctcggcggctggtccaggtgggggtccgcgacttcttcggcgttcccggcgacttcaatctgaccctcctcgaccacctcatcgccgagcccggcctcaactacgtcggctgctgcaacgagctcaacgccggatatgccgccgacggctacgcccgcgcccacggcgtcggcgcctgcgtcgtcaccttcaccgtcgggggcttgagtgttttgaatgcgatcgcgggggcgtatagtgagaacttgccgttgatttgtatcgcgggggggccgaattcgagtgattttgggacgagtcggatcttgcatcataccattgggttgcccgacttctcgcaggagttgaggtgttttcagaccgtcacttgcattcaggctgtggtgaataatttggaggatgcgcatgagttggttgatacagcgatatcaacggctttgaaggagagcaagcctgtgtacatcagcatcagttgtaatttgccggggatccctcatccgacgtttactccggagcctgtgcccttctcgttgtctcctagagtgagcaacaagatgggccttgaagctgcagttgaggccaccgttgcattcctaaacaaagcagtgaagccagtcatggtcggcgggcccaaaatccgcgtggccaaggctggagatgcctttgtcgaactagccaatgcgagcggctatgctgtcgccgtaatgccatcagctaaaggtctcgtacccgaaactcaccctagattcatcggcacctactggggtgcggtcagcaccgctttttgctctgaaattgtcgaatcatctgatgcctacatttttgcgggccccatcttcaatgactacagctctgttgggtactctctccttttgaagaaggagaaggccattattgttgagcccgatcgagttgtagttgccaacggacctgcatttggttgtgtattgatgaaggattttcttagagagcttgccaagaggcttaagaagaatacgactgcctatgagaattatcagaggatctttgtgcctgacggtcaaccacttgaggcggctccgaaagagcctattagggttaatatcctcttcaagcacattcagaagatgctgtccggtgatactgctgtgatcgctgagactggagattcttggttcaactgtcagaagctgaagttgccggatggttgtggatacgaattccaaatgcagtatgggtcgatcggctggtcagtgggagctactcttgggtatgctcaggcagcaaaggataagcgtgtgattgcctgcatcggtgatggaagctttcaggtgacggcacaggatgtgtctacaatgataaggtttgggcagaacccgatcatcttccccatcaacaatggaggttacacgattgaagtagagatccacgacggtccttacaacgtgatcaagaactggaactacacggcgttcgttgaagcgctccacaacggcgaaggtaaatgctggaccgccaaggtcttctgcgaggaggacctcaaagaggcgatcgagaccgcaactggaccgaagaaaggctgcttgtgcttcatcgaggttatcgcgcacaaggatgatacgagcaaagagctgctcgagtggggttccagggttgctgctgctaacagcaggccaccaaatccgcaataa

SEQ ID NO: 4178 - protein, 605 aa, Lycoris aurea
METSIGSVDAAKPAPNGMVGSPPSSTAHPITPCLPAAAIPSECTLGGHVARRLVQVGVRDFFGVPGDFNLTLLDHLIAEPGLNYVGCCNELNAGYAADGYARAHGVGACVVTFTVGGLSVLNAIAGAYSENLPLICIAGGPNSSDFGTSRILHHTIGLPDFSQELRCFQTVTCIQAVVNNLEDAHELVDTAISTALKESKPVYISISCNLPGIPHPTFTPEPVPFSLSPRVSNKMGLEAAVEATVAFLNKAVKPVMVGGPKIRVAKAGDAFVELANASGYAVAVMPSAKGLVPETHPRFIGTYWGAVSTAFCSEIVESSDAYIFAGPIFNDYSSVGYSLLLKKEKAIIVEPDRVVVANGPAFGCVLMKDFLRELAKRLKKNTTAYENYQRIFVPDGQPLEAAPKEPIRVNILFKHIQKMLSGDTAVIAETGDSWFNCQKLKLPDGCGYEFQMQYGSIGWSVGATLGYAQAAKDKRVIACIGDGSFQVTAQDVSTMIRFGQNPIIFPINNGGYTIEVEIHDGPYNVIKNWNYTAFVEALHNGEGKCWTAKVFCEEDLKEAIETATGPKKGCLCFIEVIAHKDDTSKELLEWGSRVAAANSRPPNPQ

SEQ ID NO: 4179 - DNA, 1794 bp, Oryza sativa subsp. indica
  CDS (1)..(1794)
atggacaccacgatcggctcggtgccgacggcctccgacgcggcggcgcccccgccggcgcccgcagctgcgaccgcgccgagggaggccacgctggggcggcacctcgcgcggcggctggcggaggtcggggcgcgcgacgtgttcacggtgccgggggacttcaacctcacgctgctcgacgagctcgaggcggaggcggggcacggcggggtgcggctcgtcgggtgctgcaacgagctcaacgcggcgtacgccgccgacgggtacgcccgcgcgcgcggcggcggggtcggggcgtgcgccgtcacgttcaccgtcggtggcctcagcgccatcaacgccgtcgccggcgcgttcagcgagaacctccccgtggtgtgcatcgttgggggccccaacagcaacgactacgggagcaaccgcatcctgcatcacaccatcgggctgcctgatttcacgcaggagctcaggtgcttccagactgtcacttgctatcaggcggtggtgaacaacttggaggatgcacatgagcagattgatgctgccatctccactgcaataaaggagagcaagcctgtttacataagcatcagctgcaacctcccctctatcccacatcccacctttagccgccaccctgttcctttcttcctgtccccaagattatcaaaccagatgaacctggaggcagcagtggaaactgctgcagctttcctgaacaaagcagtcaagccagtcctcgttggtggaccaaaaatgagggtggccaaagcatgcaaatccttcgtagagctggctgatgcctgtggttatcctgttgcggtcatgccttctgcaaagggtcttgtgccagagcaccatcctaggtttattggcacgtactggggtgctgtgagcactccattttgtgctgagatcgtcgagtcagctgatgcatatctatttgctggcccaatatttaatgactacagctcggttggatactcactacttctcaagaaggagaaggccatcatcgtccagccagaccgggtggtgataggtcatgggcctgcgtttgggtgtgttctgatgaaggacttcctgcatgcactttcagcacggctgaagaaaaacacggctgcatatgagaactatcgtcggatttatgtgcctccgggtgaacctcctttgtctgagcctggagagccattgagagtgaatgtacttttccagcatattcagaaaatgttgtcagccaactcggctgtcattgctgagactggagactcttggtttaattgccagaagctaaagctaccagagggctgtgggtacgaatttcaaatgcaatatggatcaattggttggtcggtaggtgcaactctgggatatgcacaggctgctaaggataagcgagtcattgcttgcatcggagatggaagctttcaggtgacggcacaagaagtgtcgacaatgcttcgttgggggcagaaaagcatcatcttcctcataaacaatggagggtacaccatcgaggtggagatccatgacggtccttacaatgtcatcaagaattggaactacaccggtgtggtggaagcgttccataatggcgaggggaagtgctacacggcaaaggtccgaaccgaggaggaactgaaggaagcaattgaagaagctcagggacctaagaaggattgcttgtgcttcatagaggtgattgtacacaaggatgacacaagtaaggagcttcttgagtggggctccagagtttctgctgcaaatagccgcccaccaaatcctcagtga

SEQ ID NO: 4180 - protein, 597 aa, Oryza sativa subsp. indica
MDTTIGSVPTASDAAAPPPAPAAATAPREATLGRHLARRLAEVGARDVFTVPGDFNLTLLDELEAEAGHGGVRLVGCCNELNAAYAADGYARARGGGVGACAVTFTVGGLSAINAVAGAFSENLPVVCIVGGPNSNDYGSNRILHHTIGLPDFTQELRCFQTVTCYQAVVNNLEDAHEQIDAAISTAIKESKPVYISISCNLPSIPHPTFSRHPVPFFLSPRLSNQMNLEAAVETAAAFLNKAVKPVLVGGPKMRVAKACKSFVELADACGYPVAVMPSAKGLVPEHHPRFIGTYWGAVSTPFCAEIVESADAYLFAGPIFNDYSSVGYSLLLKKEKAIIVQPDRVVIGHGPAFGCVLMKDFLHALSARLKKNTAAYENYRRIYVPPGEPPLSEPGEPLRVNVLFQHIQKMLSANSAVIAETGDSWFNCQKLKLPEGCGYEFQMQYGSIGWSVGATLGYAQAAKDKRVIACIGDGSFQVTAQEVSTMLRWGQKSIIFLINNGGYTIEVEIHDGPYNVIKNWNYTGVVEAFHNGEGKCYTAKVRTEEELKEAIEEAQGPKKDCLCFIEVIVHKDDTSKELLEWGSRVSAANSRPPNPQ

SEQ ID NO: 4181 - DNA, 2053 bp, Oryza sativa subsp. indica
  CDS (94)..(1911)
aatttcagctaagcagaaatcaacacaagtccaagtcaagtcaagcgttctcactaaatcaaaccccctcactgccaccttcgtttgcgcgccatggagcttgccctggttggcgacccttcgaatggcgtggcgaagccgtcgtgcgactccgtcggctctctgcccgccgtcagctccaaggccgtcatccacccgccggtgaccagcgcggcgggcgccacgctcggcaggcacctcgcgaggcgcctcgtgcagatcggcgccaccgacgtgttcgccgtccccggggacttcaacctcaccctgctcgactacctcatcgccgagcccgggctcaagctcatcggctgctgcaacgagctcaacgccgggtacgcggccgacggctacgcccgcgcccgcggcgtcggcgcgtgcgccgtcacgttcaccgtcggtggcctcagcgtgctcaacgccatcgccggcgcctacagcgagaacctccccgtgatctgcatcgtcggcgggcccaactccaacgactacggcaccaaccgcatcctgcaccacaccatcggcctcccggacttctcacaggagctccgctgcttccagaccatcacctgctaccaggccgtcattaacaacctcgacgacgcgcacgagcagatcgacaccgccatagcgacggccctaagggagagcaagccagtgtacatcagcgtgggctgcaacctggcgggcctctctcacccgacgtttagccgcgagccagtgccgttgttcatctcgccaagattgagcaacaaggcgaacttggagcacgccgtcgaagccgcggcggacttcctgaacaaggcggtgaagccggtgatggtcggggggccaaagatccgggtggccaaggcgaagaaggcgttcgccggcatcgcggagtcgagcgggtacccgttcgcggtgatgccgtccgccaagggcctcgtgccggagcaccacccgcggttcatcggcacgtactggggcgccgtgagcaccaccttctgcgccgagatcgtcgagtccgccgacgcctacctcttcgccggcccgatcttcaacgactacagctccgtcggctactccctgctgctgaagcgggagaaggccgtcatcgtgcagcccgaccgcgtggtggtcggcaacggcccggcgttcggctgcatcctcatgactgagttcctcgacgcgctcgccaaacgcctcgaccgcaacacgacggcgtacgacaactaccgccgcatcttcatccccgaccgcgagccgcccaatggccagcccgacgagccactcagggtcaacatcctcttcaagcacatcaaggagttgctgtccggcgacaccgccgtcatcgccgagaccggtgactcgtggttcaactgccagaagctcaggctccccgagggctgcgggtacgagttccagatgcagtacggctcgatcgggtggtccgtcggcgccacgctcggctacgcccaggcggccaaggacaagcgcgtcatctcctgcatcggcgacggtagcttccagatgacggcgcaggacgtgtcgacgatgttgcggtgcgagcagaagagcatcatcttcctcatcaataatggtgggtacaccatcgaggtggagatccacgacgggccgtacaacgtcatcaagaactgggactacaccggcctcatcgacgccatccacaactctgacggcaactgctggacaaagaaggtccggactgaggaggagctgatagaggcgatcgcgacggcaacgggcgccaagaaagactgcctctgcttcatcgagatcatcgtgcacaaggatgacacgagcaaagagcttctcgagtggggatccagggtatcggctgccaacagcaggccgccgaatccccagtgattttgctagctggtcttctcatgacgcacactcgaatgcgctagtctgccaatgtccgagatatgctgcccattatcgtctgtgaattaattgtctaatgcgtctgcatccagttaaattttctcagccgagaggttgaagc

SEQ ID NO: 4182 - protein, 605 aa, Oryza sativa subsp. indica
MELALVGDPSNGVAKPSCDSVGSLPAVSSKAVIHPPVTSAAGATLGRHLARRLVQIGATDVFAVPGDFNLTLLDYLIAEPGLKLIGCCNELNAGYAADGYARARGVGACAVTFTVGGLSVLNAIAGAYSENLPVICIVGGPNSNDYGTNRILHHTIGLPDFSQELRCFQTITCYQAVINNLDDAHEQIDTAIATALRESKPVYISVGCNLAGLSHPTFSREPVPLFISPRLSNKANLEHAVEAAADFLNKAVKPVMVGGPKIRVAKAKKAFAGIAESSGYPFAVMPSAKGLVPEHHPRFIGTYWGAVSTTFCAEIVESADAYLFAGPIFNDYSSVGYSLLLKREKAVIVQPDRVVVGNGPAFGCILMTEFLDALAKRLDRNTTAYDNYRRIFIPDREPPNGQPDEPLRVNILFKHIKELLSGDTAVIAETGDSWFNCQKLRLPEGCGYEFQMQYGSIGWSVGATLGYAQAAKDKRVISCIGDGSFQMTAQDVSTMLRCEQKSIIFLINNGGYTIEVEIHDGPYNVIKNWDYTGLIDAIHNSDGNCWTKKVRTEEELIEAIATATGAKKDCLCFIEIIVHKDDTSKELLEWGSRVSAANSRPPNPQ

SEQ ID NO: 4183 - DNA, 1838 bp, Pichia stipitis
  CDS (61)..(1773): transl_table=12
cttagaatatctacacctatttttaactgtagatcccaataatatactgtccttatagcaatggtatcaacctacccagaatcagaggttactctaggaaggtacctctttgagcgactccaccaattgaaagtggacaccattttcggcttgccgggtgacttcaacctttccttattggacaaagtgtatgaagttccggatatgaggtgggctggaaatgccaacgaattgaatgctgcctatgctgccgatggttactccagaataaagggattgtcttgcttggtcacaacttttggtgttggtgaattgtctgctttaaacggagttggtggtgcctatgctgaacacgtaggacttctacatgtcgttggagttccatccatatcgtcacaggctaaacagttgttgctccaccataccttgggtaatggtgacttcactgtttttcacagaatgtccaatagcatttctcaaactacagcatttctctcagatatctctattgcaccaggtcaaatagatagatgcatcagagaagcatatgttcatcagagaccagtttatgttggtttaccggcaaatatggttgatctcaaggttccttctagtctcttagaaactccaattgatttgaaattgaaacaaaatgatcctgaagctcaggaagaagttgttgaaacagtcctgaagttggtgtcccaagctacaaaccccattatcttggtagacgcttgtgccctcagacacaattgcaaagaggaagtcaaacaattggttgatgccactaattttcaagtctttacaactccaatgggtaaatctggtatctccgaatctcatccaagatttggcggtgtctatgtcgggacaatgtcgagtcctcaagtcaaaaaagccgttgaaaatgccgatcttatactatctgttggttcgttgttatcggacttcaatacaggttcattttcatactcctacaagacgaagaatgttgttgaattccactctgactatatgaaaatcagacaggccaccttcccaggagttcaaatgaaagaagccttgcaacagttgataaaaagggtctcttcttacatcaatccaagctacattcctactcgagttcctaaaaggaaacagccattgaaagctccatcagaagctcctttgacccaagaatatttgtggtctaaagtatccggctggtttagagagggtgatattatcgtaaccgaaactggtacatctgctttcggaattattcaatcccattttcccagcaacactatcggtatatcccaagtcttgtggggctcaattggtttcacagtaggtgcaacagttggtgctgccatggcagcccaggaaatcgaccctagcaggagagtaattttgttcgtcggtgatggttcattgcagttgacggttcaggaaatctctacgttgtgtaaatgggattgtaacaatacttatctttacgtgttgaacaatgatggttacactatagaaaggttgatccacggcaaaagtgccagctacaacgatatacagccttggaaccatttatccttgcttcgcttattcaatgctaagaaataccaaaatgtcagagtatcgactgctggagaattggactctttgttctctgataagaaatttgcttctccagataggataagaatgattgaggtgatgttatcgagattggatgcaccagcaaatcttgttgctcaagcaaagttgtctgaacgggtaaaccttgaaaattgaattaaacataccaattcaccgctatttagttattatattcatagcagcagttatagaattggctt

SEQ ID NO: 4184 - protein, 570 aa, Pichia stipitis
MVSTYPESEVTLGRYLFERLHQLKVDTIFGLPGDFNLSLLDKVYEVPDMRWAGNANELNAAYAADGYSRIKGLSCLVTTFGVGELSALNGVGGAYAEHVGLLHVVGVPSISSQAKQLLLHHTLGNGDFTVFHRMSNSISQTTAFLSDISIAPGQIDRCIREAYVHQRPVYVGLPANMVDLKVPSSLLETPIDLKLKQNDPEAQEEVVETVLKLVSQATNPIILVDACALRHNCKEEVKQLVDATNFQVFTTPMGKSGISESHPRFGGVYVGTMSSPQVKKAVENADLILSVGSLLSDFNTGSFSYSYKTKNVVEFHSDYMKIRQATFPGVQMKEALQQLIKRVSSYINPSYIPTRVPKRKQPLKAPSEAPLTQEYLWSKVSGWFREGDIIVTETGTSAFGIIQSHFPSNTIGISQVLWGSIGFTVGATVGAAMAAQEIDPSRRVILFVGDGSLQLTVQEISTLCKWDCNNTYLYVLNNDGYTIERLIHGKSASYNDIQPWNHLSLLRLFNAKKYQNVRVSTAGELDSLFSDKKFASPDRIRMIEVMLSRLDAPANLVAQAKLSERVNLEN

SEQ ID NO: 4185 - DNA, 2206 bp, Pichia stipitis
  CDS (254)..(2044): transl_table=12
ccgaattcgaattcagggataaagtatataaaggccattggatcctgggaggttcgtcccagacatttggttttgttctccatcacaatccagatttgatcaattgactacaattaacagagtctagccctcccgtatccggaaaagcctcttctctgagatcgactcaattgacttgaataatatttcaaaatataagagcttactgcgaatccccccatcccccaaaaaagccgcctaacatacaactatcatggctgaagtctcattaggaagatatctcttcgagagattgtaccaattgcaagtgcagaccatcttcggtgtccctggtgatttcaacttgtcgcttttggacaagatctacgaagtggaagatgcccatggcaagaattcgtttagatgggctggtaatgccaacgaattgaatgcatcgtacgctgctgacggttactcgagagtcaagcgtttagggtgtttggtcactacctttggtgtcggtgaattgtctgctttgaatggtattgccggttcttatgccgaacatgttggtttgcttcatgtcgtaggtgttccatcgatttcctcgcaagctaagcaattgttacttcaccacactttgggtaatggtgatttcactgttttccatagaatgtccaacaacatttctcagaccacagcctttatctccgatatcaactcggctccagctgaaattgatagatgtatcagagaggcctacgtcaaacaaagaccagtttatatcgggttaccagctaacttagttgatttgaatgttccggcctctttgcttgagtctccaatcaacttgtcgttggaaaagaacgacccagaggctcaagatgaagtcattgactctgtcttagacttgatcaaaaagtcgctgaacccaatcatcttggtcgatgcctgtgcctcgagacatgactgtaaggctgaagttactcagttgattgaacaaacccaattcccagtatttgtcactccaatgggtaaaggtaccgttgatgagggtggtgtagacggagaattgttagaagatgatcctcatttgattgccaaggtcgctgctaggttgtctgctggcaagaacgctgcctctagattcggaggtgtttatgtcggaaccttgtcgaagcccgaagtcaaggacgctgtagagagtgcagatttgattttgtctgtcggtgcccttttgtctgatttcaacactggttcattttcctactcctacagaaccaagaacatcgtcgaattccattctgattacactaagattagacaagccactttcccaggtgtgcagatgaaggaagccttgcaagaattgaacaagaaagtttcatctgctgctagtcactatgaagtcaagcctgtgcccaagatcaagttggccaatacaccagccaccagagaagtcaagttaactcaggaatggttgtggaccagagtgtcttcgtggttcagagaaggtgatattattatcaccgaaaccggtacatcctccttcggtatagttcaatccagattcccaaacaacaccatcggtatctcccaagtattgtggggttctattggtttctctgttggtgccactttgggtgctgccatggctgcccaagaactcgaccctaacaagagaaccatcttgtttgttggagatggttctttgcaattgaccgttcaggaaatctccaccatgatcagatggggtaccacaccttaccttttcgtgttgaacaatgacggttacaccatcgagcgtttgatccacggtgtaaatgcctcatataatgacatccaaccatggcaaaacttggaaatcttgcctactttctcggccaagaactacgacgctgtgagaatctccaacatcggagaagcagaagatatcttgaaagacaaggaattcggaaagaactccaagattagattgatagaagtcatgttaccaagattggatgcaccatctaaccttgccaaacaagctgccattacagctgccaccaacgccgaagcttagtaaaaaggattagtgttatttttttgcacccacgttatatatattaatgcacaactatgagagacaattccgtagtaaacgaggacgcttttctttcagataaactgcattttgtctatccgacagatttcgtatttcatacggctttggcataaatgctcg

SEQ ID NO: 4186 - protein, 596 aa, Pichia stipitis
MAEVSLGRYLFERLYQLQVQTIFGVPGDFNLSLLDKIYEVEDAHGKNSFRWAGNANELNASYAADGYSRVKRLGCLVTTFGVGELSALNGIAGSYAEHVGLLHVVGVPSISSQAKQLLLHHTLGNGDFTVFHRMSNNISQTTAFISDINSAPAEIDRCIREAYVKQRPVYIGLPANLVDLNVPASLLESPINLSLEKNDPEAQDEVIDSVLDLIKKSLNPIILVDACASRHDCKAEVTQLIEQTQFPVFVTPMGKGTVDEGGVDGELLEDDPHLIAKVAARLSAGKNAASRFGGVYVGTLSKPEVKDAVESADLILSVGALLSDFNTGSFSYSYRTKNIVEFHSDYTKIRQATFPGVQMKEALQELNKKVSSAASHYEVKPVPKIKLANTPATREVKLTQEWLWTRVSSWFREGDIIITETGTSSFGIVQSRFPNNTIGISQVLWGSIGFSVGATLGAAMAAQELDPNKRTILFVGDGSLQLTVQEISTMIRWGTTPYLFVLNNDGYTIERLIHGVNASYNDIQPWQNLEILPTFSAKNYDAVRISNIGEAEDILKDKEFGKNSKIRLIEVMLPRLDAPSNLAKQAAITAATNAEA

SEQ ID NO: 4187 - DNA, 1707 bp, Zymomonas mobilis
  CDS (1)..(1707): transl_table=11
  misc_feature (622)..(622): n is a, g, c or t
atgagttatactgtcggtacctatttagcggagcggcttgtccagattggtctcaagcatcacttcgcagtcgcgggcgactacaacctcgtccttcttgacaacctgcttttgaacaaaaacatggagcaggtttattgctgtaacgaactgaactgcggtttcagtgcagaaggttatgctcgtgccaaaggcgcagcagcagccgtcgttacctacagcgtcggtgcgctttccgcatttgatgctatcggtggcgcctatgcagaaaaccttccggttatcctgatctccggtgctccgaacaacaatgaccacgctgctggtcacgtgttgcatcacgctcttggcaaaaccgactatcactatcagttggaaatggccaagaacatcacggccgccgctgaagcgatttataccccggaagaagctccggctaaaatcgatcacgtgattaaaactgctcttcgtgagaagaagccggtttatctcgaaatcgcttgcaacattgcttccatgccctgcgccgctcctggaccggcaagcgcattgttcaatgacgaagccagcgacgaagcttctttgaatgcagcggttgaagaaaccctgaaattcatcgccnaccgcgacaaagttgccgtcctcgtcggcagcaagctgcgcgcagctggtgctgaagaagctgctgtcaaatttgctgatgctcttggtggcgcagttgctaccatggctgctgcaaaaagcttcttcccagaagaaaacccgcattacatcggtacctcatggggtgaagtcagctatccgggcgttgaaaagacgatgaaagaagccgatgcggttatcgctctggctcctgtctttaacgactactccaccactggttggacggatattcctgatcctaagaaactggttctcgctgaaccgcgttctgtcgtcgttaacggcattcgcttccccagcgtccatctgaaagactatctgacccgtttggctcagaaagtttccaagaaaaccggtgctttggacttcttcaaatccctcaatgcaggtgaactgaagaaagccgctccggctgatccgagtgctccgttggtcaacgcagaaatcgcccgtcaggtcgaagctcttctgaccccgaacacgacggttattgctgaaaccggtgactcttggttcaatgctcagcgcatgaagctcccgaacggtgctcgcgttgaatatgaaatgcagtggggtcacattggttggtccgttcctgccgccttcggttatgccgtcggtgctccggaacgtcgcaacatcctcatggttggtgatggttccttccagctgacggctcaggaagtcgctcagatggttcgcctgaaactgccggttatcatcttcttgatcaataactatggttacaccatcgaagttatgatccatgatggtccgtacaacaacatcaagaactgggattatgccggtctgatggaagtgttcaacggtaacggtggttatgacagcggtgctggtaaaggcctgaaggctaaaaccggtggcgaactggcagaagctatcaaggttgctctggcaaacaccgacggcccaaccctgatcgaatgcttcatcggtcgtgaagactgcactgaagaattggtcaaatggggtaagcgcgttgctgccgccaacagccgtaagcctgttaacaagctcctctag

SEQ ID NO: 4188 - protein, 568 aa, Zymomonas mobilis
  misc_feature (208)..(208): The Xaa at location 208 stands for Asn, Asp, His, or Tyr.
MSYTVGTYLAERLVQIGLKHHFAVAGDYNLVLLDNLLLNKNMEQVYCCNELNCGFSAEGYARAKGAAAAVVTYSVGALSAFDAIGGAYAENLPVILISGAPNNNDHAAGHVLHHALGKTDYHYQLEMAKNITAAAEAIYTPEEAPAKIDHVIKTALREKKPVYLEIACNIASMPCAAPGPASALFNDEASDEASLNAAVEETLKFIAXRDKVAVLVGSKLRAAGAEEAAVKFADALGGAVATMAAAKSFFPEENPHYIGTSWGEVSYPGVEKTMKEADAVIALAPVFNDYSTTGWTDIPDPKKLVLAEPRSVVVNGIRFPSVHLKDYLTRLAQKVSKKTGALDFFKSLNAGELKKAAPADPSAPLVNAEIARQVEALLTPNTTVIAETGDSWFNAQRMKLPNGARVEYEMQWGHIGWSVPAAFGYAVGAPERRNILMVGDGSFQLTAQEVAQMVRLKLPVIIFLINNYGYTIEVMIHDGPYNNIKNWDYAGLMEVFNGNGGYDSGAGKGLKAKTGGELAEAIKVALANTDGPTLIECFIGREDCTEELVKWGKRVAAANSRKPVNKLL

SEQ ID NO: 4189 - DNA, 1824 bp, Vitis vinifera
  CDS (1)..(1824)
atggacaataagattggatcacaactggattcatgcaaacccgccaataacgacgtgggttccgctcctcaaaacggcaccgtttccaccattcaggactctccctctccggcccaccccaccggctcccgcgccaccctcggcagccacatcgctcaccgtcttgttcagattggcgtcaacgacgtcttctccgttcccggagacttcaacctcactcttctcgattgcatcattgccgagccgggtctcaacaacattggctgctgtaacgagctcaacgccggctacgccgccgacggctatgccagggcccgcggcgtcggtgcgtgtgttgtcaccttcactgtcggcgggctcagcattctcaacgccatcgccggcgcttacagtgagaaccttccggtcatttgtatcgtcggaggtcccaacaccaacgactacggtactaatagaattctccaccacactattgggttgccggacttcagccaagaagtccgatgcttccagcctgttacctgctatcaggctattataaatcatttggatgaagcccatgagctcattgataaggccatttctacagctctgaaagaaagcaaacctgtgtacattagtgtcagttgtaacttgccaacaatatttcatccaaccttcagtcgagagcctattcctttcgccctttctcccaaaatgagcaattgcaaggggttagacgcagcagtggaggctgcggcagccttcttgaacaaggcggtgaagcctgtgatagtgggagggccgaaactacgggtggcgaaggcgacaaaagcctttgtcgaattggcagacgcctgtggttacgcccttgctgtgatgccatcggccaaggggctggttcctgagcaccaccctcattttatagggacgtactggggagccgtcggcactgccttctgcggcgagattgtggaatcagctgacgcatacgtgtttgtagggccgattttcaacgactacagctccgttgggtactcccttctgctcaagagggagaaggccatcatcgtgcaaccagaacgcgttgtcatcgccaacgggccagctttcgggtgtgttctgatgaaggactttctcccagctctggccaagaggcttaacaacaataccaccgcctatgagaactaccgacgtatccacattccggatggtgttcctctaaaatgcgaacccactgagcctttgagagttaacattctcttccagcacatacagaagctgctttcacacgacactgccgtgatcgcagagaccggggactcctggtttaactgccagaaactcaaattaccagaaggatgtgggtacgagtttcaaatgcagtatggttccattgggtggtctgttggcgcgatgctggggtatgcgcagtcggttccagacaagcgggtgattgcttgcattggcgatgggagcttccaggtgactgcacaggatgtgtcaacgatgattcggtgcgagcagaagagcatcatcttcctgataaacaatgggggatacaccatagaagttgaaatccatgatggcccctacaatgtgattaagaactggaactacactggcctagtggatgcaatccataatggtgaaggcaactgctggacaaagaaggtcaataatgaacaggagctcatagaggccattgaaatagcaacaggggagaagaaggattgtttgtgtttcattgaagtggtagttcacaaggatgacaccagcaaagagcttcttgaatggggatccagggtcagctctgccaatagccgtgcgccaaatcctcagtag

SEQ ID NO: 4190 - protein, 607 aa, Vitis vinifera
MDNKIGSQLDSCKPANNDVGSAPQNGTVSTIQDSPSPAHPTGSRATLGSHIAHRLVQIGVNDVFSVPGDFNLTLLDCIIAEPGLNNIGCCNELNAGYAADGYARARGVGACVVTFTVGGLSILNAIAGAYSENLPVICIVGGPNTNDYGTNRILHHTIGLPDFSQEVRCFQPVTCYQAIINHLDEAHELIDKAISTALKESKPVYISVSCNLPTIFHPTFSREPIPFALSPKMSNCKGLDAAVEAAAAFLNKAVKPVIVGGPKLRVAKATKAFVELADACGYALAVMPSAKGLVPEHHPHFIGTYWGAVGTAFCGEIVESADAYVFVGPIFNDYSSVGYSLLLKREKAIIVQPERVVIANGPAFGCVLMKDFLPALAKRLNNNTTAYENYRRIHIPDGVPLKCEPTEPLRVNILFQHIQKLLSHDTAVIAETGDSWFNCQKLKLPEGCGYEFQMQYGSIGWSVGAMLGYAQSVPDKRVIACIGDGSFQVTAQDVSTMIRCEQKSIIFLINNGGYTIEVEIHDGPYNVIKNWNYTGLVDAIHNGEGNCWTKKVNNEQELIEAIEIATGEKKDCLCFIEVVVHKDDTSKELLEWGSRVSSANSRAPNPQ

SEQ ID NO: 4191 - DNA, 1818 bp, Vitis vinifera
  CDS (1)..(1818)
atggataccaagatcagtgttactgacgcctctgtgcccacgaacagcaacgtgggttgcccttcaaacggcatcgtttcttctattctgagctcagtgcctccctccgtcatatcttcgtcggaggccactctcggccgtcacttggctcgccgtttggtgcagatcggcgtcagtgacgtcttctccgttcccggggattttaatcttacacttctcgaccatttgatcgctgagcctgggcttaaaaatattggctgctgcaatgagctcaacgcaggatacgccgccgacggctacgcgcggtcccgtggcgtcggtgcttgcgtcgtcaccttcacggtcggcgggctcagtgtcctcaacgccatcgccggcgcttacagcgagaaccttcctgtcatctgtatcgtgggcggtcccaactccaacgactacggcaccaacagaatcctccaccacaccatcggtttgcccgatttcagtcaagagttccgttgctttcagaccgtgacttgttatcaggctgtggtgaacaacttggaagacgcacatgagcagatcgatacagccatttcaacagctttgaaggaaagcaaacctgtttacatcagtattagctgtaatttgcccgggattcctcatcccactttcagtcgggagcccgttccattctgcttggcgcccaaagtgactaatcaaatgggtctagaagctgcggtggaggccgctgcggccttcttgaacaaggcggtgaagcctgtgatggtgggtgggcccaaattgcgagttgccaaagcttgcgaggcatttgttgaactggcagatgcttgtggctatcccgtggcggtgatgccatcagcaaaaggactggtgccggagtgccatcccaggttcattgggacttactggggtgcggtgagcacggccttttgtgcggagattgtggaatccgctgattcatacatctttgcaggacccattttcaacgattatagttctgttgggtattctctgcttctcaagaaggataaggccatattggtacagcccgagcgggttgtgattggtaatgggccagcatttggctgcattttgatgaaagatttcctcaaggcactctccaagaggctcaagtgcaataccactgcttatgagaactaccataggatctatgttcctgaagggcagcctctcaggtctgatcccaaggagcctttgagggttaatgttctgttccagcatatacagaaaatgctgtcaagtgagactgctgtgattgctgagactggggattcttggtttaactgccagaagctgaaattgcccaagggatgcggatatgagttccaaatgcaatatggatcgattggttggtcagtaggtgccactcttgggtatgcacaggctgtgccaaacaagagggtgatttcttgcattggtgatggtagctttcaggtgaccgcacaagatgtctcgacaatgatccgctgtgagcagaggaccatcatattcctgataaacaatggtggatacaccattgaggttgagatccatgatggaccttacaatgtgattaagaactggaactacactggcctagttgatgccatccacaatggtgaaggcaagtgctggaccacaaaggttgtctgcgaggaagatctcattaacgcaattgagacagcaacagggtccaaaaaggactgcttttgcttcattgaggtgatcgctcacaaagatgacacaagcaaagagctgctggaatggggctccagggtctctgctgccaatagccgcccgccaaaccctcagtaa

SEQ ID NO: 4192 - protein, 605 aa, Vitis vinifera
MDTKISVTDASVPTNSNVGCPSNGIVSSILSSVPPSVISSSEATLGRHLARRLVQIGVSDVFSVPGDFNLTLLDHLIAEPGLKNIGCCNELNAGYAADGYARSRGVGACVVTFTVGGLSVLNAIAGAYSENLPVICIVGGPNSNDYGTNRILHHTIGLPDFSQEFRCFQTVTCYQAVVNNLEDAHEQIDTAISTALKESKPVYISISCNLPGIPHPTFSREPVPFCLAPKVTNQMGLEAAVEAAAAFLNKAVKPVMVGGPKLRVAKACEAFVELADACGYPVAVMPSAKGLVPECHPRFIGTYWGAVSTAFCAEIVESADSYIFAGPIFNDYSSVGYSLLLKKDKAILVQPERVVIGNGPAFGCILMKDFLKALSKRLKCNTTAYENYHRIYVPEGQPLRSDPKEPLRVNVLFQHIQKMLSSETAVIAETGDSWFNCQKLKLPKGCGYEFQMQYGSIGWSVGATLGYAQAVPNKRVISCIGDGSFQVTAQDVSTMIRCEQRTIIFLINNGGYTIEVEIHDGPYNVIKNWNYTGLVDAIHNGEGKCWTTKVVCEEDLINAIETATGSKKDCFCFIEVIAHKDDTSKELLEWGSRVSAANSRPPNPQ

SEQ ID NO: 4193 - DNA, 1644 bp, Microcystis aeruginosa PCC 7806
  CDS (1)..(1644): transl_table=11
atgatcaccatcggcgaatatttattccagcgtctccataatttaggggttaatcatatttttggggtgccgggggattatgtcctcgatttgatggatgttttggtggaaagtccgatcgaattagtttgcacctgtaatgagcttaacgcaggctatgccgccgatgcctacgcgcgagtcaaaggtatgggtgctgtctgtgtcacctacggagtggggggatttagcctcgttaatgctgtggtcggtgcttacgctgaaagagttcccctggtggtgattagtggagcttctgatcgctcgattcgccgggataatttattattacaccacaccacgggcgattataatctgcaattttcgatcatggaaaaagtcacggttgcctcggttattctcactaattccgcccaagcagccagtcaaatcgatcaagctttagcagcttgtttgcatcacaaacgtcctgtgtatatcgaaattcctcgggatctggtctatcgtccctgtatcccctcagaaaatccaatttatttaaccgataatctcacggataccgccgctttagaagaagccattgaagaagcggttttattattagaaaaagcggaaaaaccaattattttagcgggggtagaattccatcggtttaaactccaggataagttactgaaacttttagaggtaacgggttatcccttggccaccactattttaggtaagtcgtcaatttcggaaatgcagccgcaatttatcggcacttatgtgggagcattaagtcgcgaatacgttagtcaacgggtggaaaatgccgattgtgtcctctgtttaggagcgattatgtccgatatgaatttaggcggatttacggctaatttaaatcccaataatttgattaatgctaattccgagaaagtaaaaattaaacatcacttctatcaaccggtattcctaggggattttatcgatggtttaattgataaactaagtcacaaagaagcagctacactagagattaaacccgcggccgaattgaaggatttagaattcatcgccgtgccagagcaaaaattaactaatgctcgtttctatgagcgaatgaatcattttatcgctcaagaatcttttgttatttccgatacaggggacgcaattattgccacaattgatttattaatgccccaacaaaccgactttattggtcaagcattttatctctctattggttattcaattcccgcctgtttaggagtagctttggccgcacccaatactcgtcctatcgtctttgtgggtgatggtgcttttcaaatgaccgcccaagaactttcgacaattatccgtcaccatctcaatccaatgatctttttaattaataacgacggttacacgatcgagcgggtaattcaggataatatttataatgatctacaaccgtggaaatatcatcaattaccagcagtatttaacggggaaagttggagttgtcaagtcagaaccgaaggggaattagaaaaggctttatcaattgcccagggtaacatcgatcgcctatcatttattgaagtacatctcgatcgttttgactgttccccaggcttaattcgtttaggtcaagctgtacgttcaccccatgcttag

SEQ ID NO: 4194 - protein, 547 aa, Microcystis aeruginosa PCC 7806
MITIGEYLFQRLHNLGVNHIFGVPGDYVLDLMDVLVESPIELVCTCNELNAGYAADAYARVKGMGAVCVTYGVGGFSLVNAVVGAYAERVPLVVISGASDRSIRRDNLLLHHTTGDYNLQFSIMEKVTVASVILTNSAQAASQIDQALAACLHHKRPVYIEIPRDLVYRPCIPSENPIYLTDNLTDTAALEEAIEEAVLLLEKAEKPIILAGVEFHRFKLQDKLLKLLEVTGYPLATTILGKSSISEMQPQFIGTYVGALSREYVSQRVENADCVLCLGAIMSDMNLGGFTANLNPNNLINANSEKVKIKHHFYQPVFLGDFIDGLIDKLSHKEAATLEIKPAAELKDLEFIAVPEQKLTNARFYERMNHFIAQESFVISDTGDAIIATIDLLMPQQTDFIGQAFYLSIGYSIPACLGVALAAPNTRPIVFVGDGAFQMTAQELSTIIRHHLNPMIFLINNDGYTIERVIQDNIYNDLQPWKYHQLPAVFNGESWSCQVRTEGELEKALSIAQGNIDRLSFIEVHLDRFDCSPGLIRLGQAVRSPHA

SEQ ID NO: 4195 - DNA, 1725 bp, Chaetomium globosum
  CDS (1)..(1725)
atgacagacatcagggagcagggccttaacaagcccattgctatcgccgagtatcttttcaagagactccatgagatcggcattcgctccgtccacggcctgccgggcgacttcaatctggtagccctagactacctccccaaggccggattgcgctgggtaggcagcgtgaatgaactcaatgcagcttatgccgccgacggatatgctcgtaccaagggcatctcggccgtccttaccaccttcggcgtgggagagctatcagccatcaacggcattgctggcgccttctcggaacacgttccggtcgtacacatcgtcggctgtccatccacaatctcgcagcgcaagggcatgttgctgcatcacacactcggcaatggtgacttcaatgtcttcgccaacatgagctcccagatctcatgcgacatggctcgcctgaacaagccggccgaggttcctgaccagatcgatcatgcactgcgggagtgttggattcgcagtcgcccggtgtacatcatgctgccgaccgatatggccgagaagaaggtggatggcgctcgtcttgacacacccattgatctctctgaacccaagaacgagacagagcgtgaagactacgtcgtggacgtggttctcaagtacctccacgcggccaaggcgccggtcattctggtcgatgcatgtgcgatccgtcacagggtgctcgaggaggtgcatgacctgatggaaaagactccgctcccagtgtttgtaacgcccatgggcaagggcgccatcaatgagaaccacccctcgtacggtggcgtgtacgcaggcacgggttcgcagcccgctgtcgctgagcgggtcgagtcggcggacctagtgctctccatcggcgcgctgaagagcgacttcaacacggcgggattctcataccggacgtcgcagctcaacacgatcgacttccactcgacgcactgcactgtgcggtactctgagtaccccggcgtggctatgcgcggcgtgctacgcaaagtgaatgagcgggtcgacctgagcaagctatgccggccatcctcgcccgaggtggctaacgacgtgaccaagaacagggacagttccgagaccataacccaggccttcttctggccccgcgtcggggagtacctgaaggaggatgacatcgtggtgactgagacgggcacttccaactttggcatctgggagactaagtacccacggggtgtaactggcgtcacccagattctctggggcagcatcggctggtcagtcggcgctgctcaaggcgctgcgctggctgcgaaggacatgggcgccgaccggcggaccgtcttgttcgtcggcgacggctcgttccaacttaccgcgcaagaggtaacgaccatgttgcggcataacctcaaggttaccattttcctcatctataacgaggggttcaccattgagcgctatatccacggcatggacgccgagtacaacgacattgtccgctggcagtacaccgacgtgccgactgtgtttggtggatcggacaagcaggtccgcaagtttgtcatcaagaccaaggatgagctggagaagctgttgacgaacaaggagttcaacgaggctggcgggctgcagttcgtcgaactgtggatgcccaaggaggatgcgccgcgggcgctgaagattaccgctgagattgctgcgaagaataatgcaaagatgagcgactaa

SEQ ID NO: 4196 - protein, 574 aa, Chaetomium globosum
MTDIREQGLNKPIAIAEYLFKRLHEIGIRSVHGLPGDFNLVALDYLPKAGLRWVGSVNELNAAYAADGYARTKGISAVLTTFGVGELSAINGIAGAFSEHVPVVHIVGCPSTISQRKGMLLHHTLGNGDFNVFANMSSQISCDMARLNKPAEVPDQIDHALRECWIRSRPVYIMLPTDMAEKKVDGARLDTPIDLSEPKNETEREDYVVDVVLKYLHAAKAPVILVDACAIRHRVLEEVHDLMEKTPLPVFVTPMGKGAINENHPSYGGVYAGTGSQPAVAERVESADLVLSIGALKSDFNTAGFSYRTSQLNTIDFHSTHCTVRYSEYPGVAMRGVLRKVNERVDLSKLCRPSSPEVANDVTKNRDSSETITQAFFWPRVGEYLKEDDIVVTETGTSNFGIWETKYPRGVTGVTQILWGSIGWSVGAAQGAALAAKDMGADRRTVLFVGDGSFQLTAQEVTTMLRHNLKVTIFLIYNEGFTIERYIHGMDAEYNDIVRWQYTDVPTVFGGSDKQVRKFVIKTKDELEKLLTNKEFNEAGGLQFVELWMPKEDAPRALKITAEIAAKNNAKMSD

SEQ ID NO: 4197 - DNA, 1818 bp, Prunus armeniaca
  CDS (1)..(1818)
atggacaccaaaatcggagcacttgacgtttgcaagccggcaagcaacgaagtgggcagcctgccaaacggtaccgctatggctattcagaattcggtcccctccacagtgatcaactcgtccgaggccactctgggtcgccaccttgctcgccgactcgtccaaatcggcgtcactgacgtcttcactgtgcccggtgactttaacttgaccctcctcgaccacctgatcgcagagcctgggctcaccaacattggctgctgcaacgagctcaacgccggctacgccgctgatggctacgctcgctctcgtggcgtcggcgcgtgtgttgttactttcactgtgggggggctcagtgttctcaatgcgatcgctggagcctacagtgagaacttgcctctgatttgtatagttggaggacccaactctaatgactatggaaccagccggattcttcaccacactattgggttgcctgattttagccaagagcttaggtgctttcagaccgtcacttgctatcaggctgtcgtaaataatctggaagatgcacatgaatcgatcgatacggcaatttcaactgctttgaaagaaagcaagcctgtttacatcagcataagctgtaacttggctgggattccccatcctacttttagccgggaaccagttccattttcattgtctcccagattgagcaatcagtggggcttagaggctgcagttgaggcagctgcagagttcttgaacaaggcagtgaaaccagttatggtaggtgggcctaaactgcgagttgcacatgctggtgaagcctttgttgaactagctgataccagtggttatgctctggctgtgatgccttcagcaaaggggcttgtgccagagcaccaccctcatttcattgggacatattggggcgccgtgagcaccgccttttgtgctgagattgtggagtctgcagatgcttacttgtttgctggaccaattttcaatgactacagctctgttgggtactctctccttctcaagaaagagaaggcaatcatcgtgcagcccgatcgtgtgacaatagcaaatggcccttcatttggttgtgttctcatgaaggatttcctccgagcactagcaaagaagctcaaccacaacaacactgctcatgagaactaccgcaggatctttgttcctgatggacaccctctaaagtgtgcacccagagaacctttgagggttaatgttctgtttcaacatgtccaaaagatgctgtcaagtgaaacagctgtgattgctgagacaggggactcatggtttaactgccagaaactgagattgccggctggttgcgggtacgagttccaaatgcaatatggatcaattggttggtcagttggagcaactcttgggtatgctcaggctgttcctgagaagcgagtgctcgctttcatcggtgatgggagctttcaggtgactgcccaagatgtgtcgacaatgattcgaaatgggcagaggaccatcatcttcctgataaacaatggtggatacaccattgaagtagagatccatgatggaccatacaatgtgatcaagaactggaactacacaggacttgttgatgccatccacaatggagagggcaagtgctggacaaccaaggtccgttatgaagaggagctgattgaagcaattgagactgcaactggggacaagaaggatagcttgtgcttcattgaggtgatagttcacaaggatgataccagcaaagagttgcttgagtgggggtctagggtttctgctgccaacagccgcccacccaaccctcagtaa

SEQ ID NO: 4198 - protein, 605 aa, Prunus armeniaca
MDTKIGALDVCKPASNEVGSLPNGTAMAIQNSVPSTVINSSEATLGRHLARRLVQIGVTDVFTVPGDFNLTLLDHLIAEPGLTNIGCCNELNAGYAADGYARSRGVGACVVTFTVGGLSVLNAIAGAYSENLPLICIVGGPNSNDYGTSRILHHTIGLPDFSQELRCFQTVTCYQAVVNNLEDAHESIDTAISTALKESKPVYISISCNLAGIPHPTFSREPVPFSLSPRLSNQWGLEAAVEAAAEFLNKAVKPVMVGGPKLRVAHAGEAFVELADTSGYALAVMPSAKGLVPEHHPHFIGTYWGAVSTAFCAEIVESADAYLFAGPIFNDYSSVGYSLLLKKEKAIIVQPDRVTIANGPSFGCVLMKDFLRALAKKLNHNNTAHENYRRIFVPDGHPLKCAPREPLRVNVLFQHVQKMLSSETAVIAETGDSWFNCQKLRLPAGCGYEFQMQYGSIGWSVGATLGYAQAVPEKRVLAFIGDGSFQVTAQDVSTMIRNGQRTIIFLINNGGYTIEVEIHDGPYNVIKNWNYTGLVDAIHNGEGKCWTTKVRYEEELIEAIETATGDKKDSLCFIEVIVHKDDTSKELLEWGSRVSAANSRPPNPQ

SEQ ID NO: 4199 - DNA, 1791 bp, Pichia stipitis
  CDS (1)..(1791): transl_table=12
atggctgaagtctcattaggaagatatctcttcgagagattgtaccaattgcaagtgcagaccatcttcggtgtccctggtgatttcaacttgtcgcttttggacaagatctacgaagtggaagatgcccatggcaagaattcgtttagatgggctggtaatgccaacgaattgaatgcatcgtacgctgctgacggttactcgagagtcaagcgtttagggtgtttggtcactacctttggtgtcggtgaattgtctgctttgaatggtattgccggttcttatgccgaacatgttggtttgcttcatgtcgtaggtgttccatcgatttcctcgcaagctaagcaattgttacttcaccacactttgggtaatggtgatttcactgttttccatagaatgtccaacaacatttctcagaccacagcctttatctccgatatcaactcggctccagctgaaattgatagatgtatcagagaggcctacgtcaaacaaagaccagtttatatcgggttaccagctaacttagttgatttgaatgttccggcctctttgcttgagtctccaatcaacttgtcgttggaaaagaacgacccagaggctcaagatgaagtcattgactctgtcttagacttgatcaaaaagtcgctgaacccaatcatcttggtcgatgcctgtgcctcgagacatgactgtaaggctgaagttactcagttgattgaacaaacccaattcccagtatttgtcactccaatgggtaaaggtaccgttgatgagggtggtgtagacggagaattgttagaagatgatcctcatttgattgccaaggtcgctgctaggttgtctgctggcaagaacgctgcctctagattcggaggtgtttatgtcggaaccttgtcgaagcccgaagtcaaggacgctgtagagagtgcagatttgattttgtctgtcggtgcccttttgtctgatttcaacactggttcattttcctactcctacagaaccaagaacatcgtcgaattccattctgattacactaagattagacaagccactttcccaggtgtgcagatgaaggaagccttgcaagaattgaacaagaaagtttcatctgctgctagtcactatgaagtcaagcctgtgcccaagatcaagttggccaatacaccagccaccagagaagtcaagttaactcaggaatggttgtggaccagagtgtcttcgtggttcagagaaggtgatattattatcaccgaaaccggtacatcctccttcggtatagttcaatccagattcccaaacaacaccatcggtatctcccaagtattgtggggttctattggtttctctgttggtgccactttgggtgctgccatggctgcccaagaactcgaccctaacaagagaaccatcttgtttgttggagatggttctttgcaattgaccgttcaggaaatctccaccataatcagatggggtaccacaccttaccttttcgtgttgaacaatgacggttacaccatcgagcgtttgatccacggtgtaaatgcctcatataatgacatccaaccatggcaaaacttggaaatcttgcctactttctcggccaagaactacgacgctgtgagaatctccaacatcggagaagcagaagatatcttgaaagacaaggaattcggaaagaactccaagattagattgatagaagtcatgttaccaagattggatgcaccatctaaccttgccaaacaagctgccattacagctgccaccaacgccgaagcttag

SEQ ID NO: 4200 - protein, 596 aa, Pichia stipitis
MAEVSLGRYLFERLYQLQVQTIFGVPGDFNLSLLDKIYEVEDAHGKNSFRWAGNANELNASYAADGYSRVKRLGCLVTTFGVGELSALNGIAGSYAEHVGLLHVVGVPSISSQAKQLLLHHTLGNGDFTVFHRMSNNISQTTAFISDINSAPAEIDRCIREAYVKQRPVYIGLPANLVDLNVPASLLESPINLSLEKNDPEAQDEVIDSVLDLIKKSSNPIILVDACASRHDCKAEVTQLIEQTQFPVFVTPMGKGTVDEGGVDGELLEDDPHLIAKVAARLSAGKNAASRFGGVYVGTLSKPEVKDAVESADLILSVGALLSDFNTGSFSYSYRTKNIVEFHSDYTKIRQATFPGVQMKEALQELNKKVSSAASHYEVKPVPKIKLANTPATREVKLTQEWLWTRVSSWFREGDIIITETGTSSFGIVQSRFPNNTIGISQVLWGSIGFSVGATLGAAMAAQELDPNKRTILFVGDGSLQLTVQEISTIIRWGTTPYLFVLNNDGYTIERLIHGVNASYNDIQPWQNLEILPTFSAKNYDAVRISNIGEAEDILKDKEFGKNSKIRLIEVMLPRLDAPSNLAKQAAITAATNAEA

SEQ ID NO: 4201 - DNA, 1710 bp, Pichia stipitis
  CDS (1)..(1710): transl_table=12
atggtatcaacctacccagaatcagaggttactctaggaaggtacctctttgagcgactccaccaattgaaagtggacaccattttcggcttgccgggtgacttcaacctttccttattggacaaagtgtatgaagttccggatatgaggtgggctggaaatgccaacgaattgaatgctgcctatgctgccgatggttactccagaataaagggattgtcttgcttggtcacaacttttggtgttggtgaattgtctgctttaaacggagttggtggtgcctatgctgaacacgtaggacttctacatgtcgttggagttccatccatatcgtcacaggctaaacagttgttgctccaccataccttgggtaatggtgacttcactgtttttcacagaatgtccaatagcatttctcaaactacagcatttctctcagatatctctattgcaccaggtcaaatagatagatgcatcagagaagcatatgttcatcagagaccagtttatgttggtttaccggcaaatatggttgatctcaaggttccttctagtctcttagaaactccaattgatttgaaattgaaacaaaatgatcctgaagctcaagaagttgttgaaacagtcctgaagttggtgtcccaagctacaaaccccattatcttggtagacgcttgtgccctcagacacaattgcaaagaggaagtcaaacaattggttgatgccactaattttcaagtctttacaactccaatgggtaaatctggtatctccgaatctcatccaagattgggcggtgtctatgtcgggacaatgtcgagtcctcaagtcaaaaaagccgttgaaaatgccgatcttatactatctgttggttcgttgttatcggacttcaatacaggttcattttcatactcctacaagacgaagaatgttgttgaattccactctgactatatgaaaatcagacaggccaccttcccaggagttcaaatgaaagaagccttgcaacagttgataaaaagggtctcttcttacatcaatccaagctacattcctactcgagttcctaaaaggaaacagccattgaaagctccatcagaagctcctttgacccaagaatatttgtggtctaaagtatccggctggtttagagagggtgatattatcgtaaccgaaactggtacatctgctttcggaattattcaatcccattttcccagcaacactatcggtatatcccaagtcttgtggggctcaattggtttcacagtaggtgcaacagttggtgctgccatggcagcccaggaaatcgaccctagcaggagagtaattttgttcgtcggtgatggttcattgcagttgacggttcaggaaatctctacgttgtgtaaatgggattgtaacaatacttatctttacgtgttgaacaatgatggttacactatagaaaggttgatccacggcaaaagtgccagctacaacgatatacagccttggaaccatttatccttgcttcgcttattcaatgctaagaaataccaaaatgtcagagtatcgactgctggagaattggactctttgttctctgataagaaatttgcttctccagataggataagaatgattgaggtgatgttatcgagattggatgcaccagcaaatcttgttgctcaagcaaagttgtctgaacgggtaaaccttgaaaattga

SEQ ID NO: 4202 - protein, 569 aa, Pichia stipitis
MVSTYPESEVTLGRYLFERLHQLKVDTIFGLPGDFNLSLLDKVYEVPDMRWAGNANELNAAYAADGYSRIKGLSCLVTTFGVGELSALNGVGGAYAEHVGLLHVVGVPSISSQAKQLLLHHTLGNGDFTVFHRMSNSISQTTAFLSDISIAPGQIDRCIREAYVHQRPVYVGLPANMVDLKVPSSLLETPIDLKLKQNDPEAQEVVETVSKLVSQATNPIILVDACALRHNCKEEVKQLVDATNFQVFTTPMGKSGISESHPRLGGVYVGTMSSPQVKKAVENADLILSVGSLLSDFNTGSFSYSYKTKNVVEFHSDYMKIRQATFPGVQMKEALQQLIKRVSSYINPSYIPTRVPKRKQPLKAPSEAPLTQEYLWSKVSGWFREGDIIVTETGTSAFGIIQSHFPSNTIGISQVLWGSIGFTVGATVGAAMAAQEIDPSRRVILFVGDGSLQLTVQEISTLCKWDCNNTYLYVLNNDGYTIERLIHGKSASYNDIQPWNHLSLLRLFNAKKYQNVRVSTAGELDSLFSDKKFASPDRIRMIEVMLSRLDAPANLVAQAKLSERVNLEN

SEQ ID NO: 4203 - DNA, 1653 bp, Enterobacter agglomerans
  CDS (1)..(1653): transl_table=11
atgtccacattcactgtcggagattacctgctgacccgtctgcaggagattggtatcaagcatctgtttggtgtgccgggcgactacaacctgcaattcctggaccgcgttattgcccatcctgaaatcagctgggtgggctgcgccaatgaactcaacgcagcctatgcggcggacggttatgcgcgctgcaacggcgcgggggcactgttaacgacgtttggtgttggcgagctcagcgcgattaatggtactgcgggcagttatgccgagtatctgccggtgattcatattgtaggtgcgccagccacgcaggcgcagttgcagggtgactgcgtgcatcactcgctgggcgatggtgatttccagcattttattcgcatggctgccgaggtcagtgtggcaaccgcactgctgactgccgacaatgccacggctgagattgatcgggtgattatcagtgcgctgcaggcccgtcgtcccggctatctgtcgctggcggtggacgtggcagccatggctgtgcagccacctgcacagccgctgaacacccatcagcctgcatcggctgacgcgcgtcgcgctttcagggccgcggcagaacgtttactggcaccggcacagcgtgtctcactgctggcagattttctggcgctgcgctggcagcagcagtctgcgctggccgcgctgcgcgaacagagcgcgattccctgcgccagtctgctgatgggcaaaggcgtactggatgagcagcagccaggttacgtcggtacctatgccggcgcggccagtgcagggcaggtatgtgaacagattgaacaggtggatgcagcaatttgcgtcggtgtccgttttaccgacaccattacggcaggttttacacagcagtttgccaccgagcgactgatcgatctgcagcccttcagtgccagcgtgggtaatgaacgttttgcgccgttgtcgatggcggatgcgctcagtgaactgcaaccgctgtttgaacattatggtcagcagtggcagcctgccgccgcaatccccgccgcgcagccagcagaacccacggcggtgatcagtcagcacgccttctggcaggccatgcagggatttctgcaacccggcgacctgattctggccgagcaggggacggccgcctttggtgccgccgcgttgcgattaccctcgcgggcacagctggtggttcagccattatggggatcaatcggctatactcttccggcagcgtttggcgcgcagaccgccaaccctgatcgacgggttatcctgatcatcggagacggttcggcgcaactgactattcaggagctggggtcgatgttgcgcgatgggcagcgactgataatctttttactgaataatgacggctataccgtcgaacgggcgattcatggcgcaacacaacgttacaatgatatcgccccgtggaactggacggctctgccacacgcccttagccttcagggccaggcgcagagctggcgcatcagtgaaaccgtgcagttagacgaggtgatgacgcgacttgccgcgcctcaatggctttcgctggttgaggtggttatgctgaaagacgatttgccgccactgctcagaaaagtcaccgcctgcctgaatcaacgcaacggcggctaa

SEQ ID NO: 4204 - protein, 550 aa, Enterobacter agglomerans
MSTFTVGDYLLTRLQEIGIKHLFGVPGDYNLQFLDRVIAHPEISWVGCANELNAAYAADGYARCNGAGALLTTFGVGELSAINGTAGSYAEYLPVIHIVGAPATQAQLQGDCVHHSLGDGDFQHFIRMAAEVSVATALLTADNATAEIDRVIISALQARRPGYLSLAVDVAAMAVQPPAQPLNTHQPASADARRAFRAAAERLLAPAQRVSLLADFLALRWQQQSALAALREQSAIPCASLLMGKGVLDEQQPGYVGTYAGAASAGQVCEQIEQVDAAICVGVRFTDTITAGFTQQFATERLIDLQPFSASVGNERFAPLSMADALSELQPLFEHYGQQWQPAAAIPAAQPAEPTAVISQHAFWQAMQGFLQPGDLILAEQGTAAFGAAALRLPSRAQLVVQPLWGSIGYTLPAAFGAQTANPDRRVILIIGDGSAQLTIQELGSMLRDGQRLIIFLLNNDGYTVERAIHGATQRYNDIAPWNWTALPHALSLQGQAQSWRISETVQLDEVMTRLAAPQWLSLVEVVMLKDDLPPLLRKVTACLNQRNGG

SEQ ID NO: 4205 - DNA, 1818 bp, Schizosaccharomyces pombe
  CDS (1)..(1818)
atgactaaggacgctgaatctactatgaccgttggtacctatctcgcccagagattggtcgaaatcggtatcaagaaccactttgttgttcctggtgactacaaccttcgtcttttggacttcttggagtactatcccggtttgtctgagattggttgctgtaacgagttgaactgtgccttcgctgctgagggttacgctcgttctaacggtattgcttgcgccgtcgtcacctactccgtcggtgccttgaccgctttcgatggtattggaggtgcctacgctgagaaccttcccgtcattttggtctctggttcccccaacaccaatgaccttagctctggtcatttgttgcaccacactcttggtactcatgactttgaataccaaatggagattgccaagaagctcacttgtgccgctgttgccatcaagagagctgaggatgctcccgttatgattgaccatgccatccgtcaagctatcctccaacacaagcctgtctacattgaaatccccaccaacatggctaaccaaccttgcgctgtccccggtcccattagcgctgtcatctcccctgagatcagtgataaggagtcccttgagaaggccactgacattgctgctgaattaatcagcaagaaggagaaacccattcttttagctggtcccaagctccgtgctgctggtgccgaatctgccttcgttaagttggccgaagctttgaactgtgccgctttcatcatgcccgctgctaagggtttctactctgaggagcacaagaactatgctggtgtctactggggtgaagttagcagctccgagaccaccaaggctgtttatgagagctccgaccttgtcatcggtgctggtgtccttttcaacgattacagcactgtcggttggagagctgctcccaaccccaacatcttgttgaactctgactacactagcgtttccatccctggttacgttttctcccgtgtctacatggccgaattcttggagcttcttgccaagaaggtttccaagaagcccactactcttgaggcttacaacaagggtcgccctcaaaccgttgtttccaaggctgccgagcctaaggctgctttgaaccgtgttgaggttatgcgtcaaatccaaggtttggtcgatagcaacaccactttgtatgctgagactggtgactcctggttcaacggtcttcaaatgaagttacccgctggtgccaagtttgaggttgagatgcaatggggtcacattggttggtctgttccttctgctatgggttatgctgtcgctgcccctgagagaagaaccattgtcatggttggtgacggttctttccaacttactggtcaagagatctctcaaatgatccgccacaagctccccgttctcattttcttgcttaacaaccgtggttacaccattgagattcaaatccacgatggtccttacaaccgtatccaaaactgggacttcgctgctttctgcgagtctttgaacggtgaaaccggtaagactaagggtcttcatgctaagactggtgaagagcttaccagcgccatcaaggttgctcttcaaaacaaggagggttctactttgattgagtgtcccatcgacgaggctgcctgcatccaagagtggatcgccgggtatcgaacttttactccccgaaaaatccagcttacattcctggatactcaagcttgcatggctgcaggtcttctttccgcctcagaaggtactccctatagtgagtcgtattttctttccgcctcagaaggtatctgcccctatagtgagtcgtattga

SEQ ID NO: 4206 - protein, 605 aa, Schizosaccharomyces pombe
MTKDAESTMTVGTYLAQRLVEIGIKNHFVVPGDYNLRLLDFLEYYPGLSEIGCCNELNCAFAAEGYARSNGIACAVVTYSVGALTAFDGIGGAYAENLPVILVSGSPNTNDLSSGHLLHHTLGTHDFEYQMEIAKKLTCAAVAIKRAEDAPVMIDHAIRQAILQHKPVYIEIPTNMANQPCAVPGPISAVISPEISDKESLEKATDIAAELISKKEKPILLAGPKLRAAGAESAFVKLAEALNCAAFIMPAAKGFYSEEHKNYAGVYWGEVSSSETTKAVYESSDLVIGAGVLFNDYSTVGWRAAPNPNILLNSDYTSVSIPGYVFSRVYMAEFLELLAKKVSKKPTTLEAYNKGRPQTVVSKAAEPKAALNRVEVMRQIQGLVDSNTTLYAETGDSWFNGLQMKLPAGAKFEVEMQWGHIGWSVPSAMGYAVAAPERRTIVMVGDGSFQLTGQEISQMIRHKLPVLIFLLNNRGYTIEIQIHDGPYNRIQNWDFAAFCESLNGETGKTKGLHAKTGEELTSAIKVALQNKEGSTLIECPIDEAACIQEWIAGYRTFTPRKIQLTFLDTQACMAAGLLSASEGTPYSESYFLSASEGICPYSESY

SEQ ID NO: 4207 - DNA, 1713 bp, Fusarium oxysporum
  CDS (1)..(1713)
atgagcaactccaacctccaaaagccaattgacgtggctgaatacctcttcaagcgtctctacgaagtcggtgttcgatctgttcacggtgttcccggtgactacaacctcgtcgccctcgactatcttcctcaatgcaacctcaagtgggtcggcagtgttaacgagcttaacgctgcctacgctgctgatggatatgcccgtgtcaccaagatggctgctctcatcaccaccttcggtgttggtgagctctctgccgtcaacggtgttgctggctcttactccgagcacatccccgtcgtccacattgttggatgcccttctaccatctctcagcgtgaccagatgcttcttcaccacactctcggaaacggtgactttgatgtctttgccaacatgagcgctcaaatctcttgcaacgtcgccaagctcaacaagccctccgagatcgccgagcagatcgatactgctctccgcacttgctggctccgctctcgtcccgtctacatcatggtccctaccgatatggtccaggagaaggttgagggtgctcggcttgacacctccatcgacctgtctgagcctcagaacgaccccggtaacgaggacttcgtcgttgatgagatcctcaaggctatgtacgctgctcagcgccctgtcatccttgtcgactcttgtgctatccgtcaccgtgttgtcaaggaggttcaccagctcattgacaagctcgaccttcccgtctttgttacccccatgggtaagggtgctgtgaacgaggaccaccccaactatggtggtgtcttcgctggtgacggctctcatcccgctcgtgcccagtctatagttgagggctctgatctccttctcaccattggtgctctcaagagtgatttcaacaccaccggtttctcttaccgcacatcacaaatcaactctgttgatttccacagtactcactgcaaggtccgctactccacataccccggcgttgccatgcgtggtgtcctccgcaagatcatcgaccgagtcgaccccaagtctatgcccgctccttctatccctgaggtcaggaacgaggtcgagaagaacaccgacgactctgagatcatcacacaggcctggctctggccccgtgtcggcgaatacctcatccccaacgacatcgtcgtcactgagactggtaccgctaacttcggtatctgggacactcgattcccccgcaacgtcaccgccctcagccaagttctctggggcagcatcggctggtccgttggtgcttgccagggtgctgccctcgctgctaaggatgctggcaaggaaggccgaacaatcctctttgttggtgatggatctttccaattgaccgctcaggagctgagcaccatgatccgacatcacctcaagcccacaattttcgtcatctgcaacgatggcttcaccattgagcgattcatccacggtatggatgctgtctacaacgacatcaacaactggaagtacaaggacctcgtcagcgtcttcggcggcgagaagacctgcaagaccttccagatcaagaccaagactgagctcaacgagctcctcaccaacaaggagttcaacgctgctgagtgcttgcaattcgtcgagctctacatgcccagagaggatgctcctcgcgctctgatcatgactgccgaggccagtgctaggaacaacgccaagaagcactaa

SEQ ID NO: 4208 - protein, 570 aa, Fusarium oxysporum
MSNSNLQKPIDVAEYLFKRLYEVGVRSVHGVPGDYNLVALDYLPQCNLKWVGSVNELNAAYAADGYARVTKMAALITTFGVGELSAVNGVAGSYSEHIPVVHIVGCPSTISQRDQMLLHHTLGNGDFDVFANMSAQISCNVAKLNKPSEIAEQIDTALRTCWLRSRPVYIMVPTDMVQEKVEGARLDTSIDLSEPQNDPGNEDFVVDEILKAMYAAQRPVILVDSCAIRHRVVKEVHQLIDKLDLPVFVTPMGKGAVNEDHPNYGGVFAGDGSHPARAQSIVEGSDLLLTIGALKSDFNTTGFSYRTSQINSVDFHSTHCKVRYSTYPGVAMRGVLRKIIDRVDPKSMPAPSIPEVRNEVEKNTDDSEIITQAWLWPRVGEYLIPNDIVVTETGTANFGIWDTRFPRNVTALSQVLWGSIGWSVGACQGAALAAKDAGKEGRTILFVGDGSFQLTAQELSTMIRHHLKPTIFVICNDGFTIERFIHGMDAVYNDINNWKYKDLVSVFGGEKTCKTFQIKTKTELNELLTNKEFNAAECLQFVELYMPREDAPRALIMTAEASARNNAKKH

SEQ ID NO: 4209 - DNA, 1770 bp, Citrus sinensis
  CDS (1)..(1770)
atggacactgcaaacgcaatgggctcaacgggtcaacccggctcagctccagctccagtccgcggcggggcctccgtcggcacgctaggccggcacctggcgcggcggctggtggagatcggcgcgaaggatgtcttctcggttccgggagactttaacttgacgctcttggatcatctcatagcggagccggagttaaacttggtcggctgctgcaacgagctgaacgccggatacgccgccgacggctacgcacgctccagaggcgtgggggcctgtgtggtgacgttcactgtgggtggccttagcgtcttgaacgccattgctggcgcttacagtgagaatttgcccgttatctgtatcgtcggcggccctaattctaatgattatgggactaacaggatcttgcatcataccattggcctgcctgatttcacccaggaacttagatgcttccaagctatcacctgttctcaggctgtggtgaataatctgggtgatgcacatgagctcattgacacagcaatctctactgctttgaaggaaagcaaaccggtttatatcagtataagctgtaatttgcctggaattcctcatcccacatttgctagggaccccgtccccttctttcttgctcctaaggtaagcaatcaattaggattagaagcagccgtggaagcgactgctgattttttgaataaagctgtgaagcctgtccttgttgggggcccaaatataagggttgctaaggcacaaaaggcctttatagagcttgcagatgccactggatatccaatagcaattatgccatctggtaaagggctggtgccggagcaccatccacattttatcgggacatactggggtgctgtcagctccagcttctgtggtgagatagtggagtctgccgatgcctatgtttttgttggccccatcttcaatgactacagctctgtgggatactcgttgctgattaagaaggagaaagcaatcatagtgcagcctcatcgtgtaactgtaggcaatggtccttcccttggctgggttttcatggctgacttcttaagtgcattggctaagaagctaaggaaaaacactacagcgctggagaattaccgccgcatatatgtccctcctggcattccagtgaagcgtgcgcaaaatgagcctcttcgagtcaatgttctcttcaaacacattcaggacatgctgagtggagacactgcagtaatcgctgaaactggagactcttggtttaactgtcagaagctccgcctccccgagaattgtggatatgaatttcagatgcagtatggatccattggctggtcagttggtgccaccctgggatatgctcaggctgctaaagataagcgtgtgattgcttgcattggtgatggaagtttccaggtaactgctcaggagatatcaacgatgattcgatgtggacaaaggagcatcatattccttatcaacaatggcgggtatacaattgaagtagagattcatgatgggccttacaatgtgattaagaactgggattatactggcctggtaaatgccatccacaatggagaaggaaaatgctggactgccaaggtgcggagtgaagatgaactaacagaagcaatgaaggcagctactggagaacaaaaagattctctatgttttatcgaagtatttgtgcacaaggatgacaccagcaaagagctgctggagtggggatccagggtttctgcagccaacagccgccctccaaatcctcaatag

SEQ ID NO: 4210 - protein, 589 aa, Citrus sinensis
MDTANAMGSTGQPGSAPAPVRGGASVGTLGRHLARRLVEIGAKDVFSVPGDFNLTLLDHLIAEPELNLVGCCNELNAGYAADGYARSRGVGACVVTFTVGGLSVLNAIAGAYSENLPVICIVGGPNSNDYGTNRILHHTIGLPDFTQELRCFQAITCSQAVVNNLGDAHELIDTAISTALKESKPVYISISCNLPGIPHPTFARDPVPFFLAPKVSNQLGLEAAVEATADFLNKAVKPVLVGGPNIRVAKAQKAFIELADATGYPIAIMPSGKGLVPEHHPHFIGTYWGAVSSSFCGEIVESADAYVFVGPIFNDYSSVGYSLLIKKEKAIIVQPHRVTVGNGPSLGWVFMADFLSALAKKLRKNTTALENYRRIYVPPGIPVKRAQNEPLRVNVLFKHIQDMLSGDTAVIAETGDSWFNCQKLRLPENCGYEFQMQYGSIGWSVGATLGYAQAAKDKRVIACIGDGSFQVTAQEISTMIRCGQRSIIFLINNGGYTIEVEIHDGPYNVIKNWDYTGLVNAIHNGEGKCWTAKVRSEDELTEAMKAATGEQKDSLCFIEVFVHKDDTSKELLEWGSRVSAANSRPPNPQ

SEQ ID NO: 4211 - DNA, 1767 bp, Petunia hybrida
  CDS (1)..(1767)
atggccggggtagccaatggtggtactaaatgtattcaagattctagttctgcgtccgctatcgcgaacgctgaagcaaccctcgggcgccatttagcccgaaggctagtagaaattggcattgaagatgttttttcagtgccgggggattttaatcttactctgcttgatcacttaatagctgagcctaagcttaaaaatattggttgttgtaatgagttaaatgctggatatgctgctgatggatatgcaagggaacgtggaattggtgcatgtgttgttacgttcacagttggtggacttagtgtgcttaatgctattgctggtgcttatagtgaaaatcttcctgttatttgtattgttggaggtcctaatactaatgattatggaactaatagaatattgcatcatactattggattgccagattttagccaagaattaagatgttttcagactgttacttgttatcaggctgtggtgaatcatttggatgatgcacatgaacaaattgataaagccatttccactgctctaaaagaaagcaagccagtatacattagtataagttgcaatttgccagccatccctcatccaactttcagcagggatcccatccctttttctatctcaccaaggctaagtaacaagagaggattggaagctgcagtggatgcaacagttgctttcctaaggcaggcagtgaaaccagtgatgataggaggaccaaagctaagagtagcaaaagcccttaatgcttttgttgaatttgctgattcttctggttatgcaatggctgtaatgccttcagcaaaaggactagtgccagaacaacaccctcatttcattggcacttattggggtgcagtgggcacatcctattgcggggaaattgttgaatcagctgatgcttacttgtttgctggtccaatctttaatgactacagctctgttgggtactcacttttgatcaagaaagaaaagtcgatcatcgtgcagcctgatagagttgtaattggcaatggaccggcttttggctgtgtactaatgaaagatttccttactgaactagcaaagaggattcagaaaaacacaactgcatatgaaaactatcgtcggatctttgttcctgaagggactcctccaaaatcggagcctaatgaacctttaagggtcaatgtaatgttccagcatatacagaagatgctttcagatgaaacagctgtgattgctgagacgggggattcttggttcaattgccagaagcttaagttaccaaaaggatgtgggtatgaattccagatgcaatatggctccattggttggtctgttggtgctacattaggctatgcgcaatctgtacccaaaaaacgtgtcatatcttgcattggtgatggaagttttcaggttactgcacaagacgtgtcaacaatgattcgttgcgaccaaaagaacatcattttcttgattaataatggtggttacaccattgaggttgaaatccatgatggaccatacaatgtgatcaagaactggaactacactggcttagttgaagcaattcacaatggtgaaggcaattgctggactcagaaggtaagaactgaagaggaactcactgatgcaattgcaacagcaactggagaaaagaaggattgtttatgcttcatagaagttatcgttcacaaagacgacactagcaaagagctacttgaatggggatccagggtctgttctgctaatggccgtccaccaaatcctcaataa

SEQ ID NO: 4212 - protein, 588 aa, Petunia hybrida
MAGVANGGTKCIQDSSSASAIANAEATLGRHLARRLVEIGIEDVFSVPGDFNLTLLDHLIAEPKLKNIGCCNELNAGYAADGYARERGIGACVVTFTVGGLSVLNAIAGAYSENLPVICIVGGPNTNDYGTNRILHHTIGLPDFSQELRCFQTVTCYQAVVNHLDDAHEQIDKAISTALKESKPVYISISCNLPAIPHPTFSRDPIPFSISPRLSNKRGLEAAVDATVAFLRQAVKPVMIGGPKLRVAKALNAFVEFADSSGYAMAVMPSAKGLVPEQHPHFIGTYWGAVGTSYCGEIVESADAYLFAGPIFNDYSSVGYSLLIKKEKSIIVQPDRVVIGNGPAFGCVLMKDFLTELAKRIQKNTTAYENYRRIFVPEGTPPKSEPNEPLRVNVMFQHIQKMLSDETAVIAETGDSWFNCQKLKLPKGCGYEFQMQYGSIGWSVGATLGYAQSVPKKRVISCIGDGSFQVTAQDVSTMIRCDQKNIIFLINNGGYTIEVEIHDGPYNVIKNWNYTGLVEAIHNGEGNCWTQKVRTEEELTDAIATATGEKKDCLCFIEVIVHKDDTSKELLEWGSRVCSANGRPPNPQ

SEQ ID NO: 4213 - DNA, 1818 bp, Dianthus caryophyllus
  CDS (1)..(1818)
atggatactaaaataggatcacttgacacgtgtccaccacaaaacagcgacatatgttgcccaaacaaaaccaccaccacagcaactcacctccacgcgccaccgacgactcacgcgccgccggagtccacactcggtcgccacctcgcgcgtcgcctcgttcaaatcggcgtgaacgacgtcttctctgttcccggcgacttcaaccttactctcctcgaccacctgttggctgagcccggtctcaacctcgtcggttgctgtaacgagctcaatgccggttacgccgccgacggttacgctcggtcgcgcggtgtcggcgcgtgcgttgtcacgttcactgtcggtggtttgagcgtgctcaacgctattgctggggcctacagtgagaatttgccggtgatttgtatcgtcggtggaccgaactcgaacgattatggaacgaacagagtgttgcatcatacgatcggtttgccggattttagtcaggagatgcgctgctttcaaaccgttacttgttatcaggcggtggtgaacaatctggaagatgctcacgagcagatagacacggcgatatcgacagcgttgaaggagagtaagccggtgtacataagtgtaagctgcaatttgccggcgattccacaccctactttcagccgtgaacctgttcctttttctctctctcctaggatgagtaacaagatgggtctggaggctgcagtggaagcagcagcagagtttctgaacaaggctgtgaagccagtgatggtggctgggcctaaactgcgtgtagcgaaggcgtgtaatgcttttgtcgagttagtcgacgcttctggatacgctacagcagtgatgccctcagccaaaggcctagtcccggagcaccattcccacttcatcggcacctactggggagcagttagcaccgctttctgcgcagagattgttgaatctgctgatgcatatatatttgcaggtccgattttcaacgactacagttcagtcggctactcgttgcttctcaagaaagagaaggctatcctggttcagcctgatagggtggtgatcggaaatggtcccgcttttggttgtgtgctgatgaaggactttttgactgagttggctaagaagatcaagaaaaacactacagctttcgagaactacacccgaatctttgttcctgagggacaacctctcaagtgcgaaccaaaggaacctctgagagtcaatgttcttttccagcatattcagaagatgttgtcgagtgacactgctgtcattgccgagactggggactcgtggtttaactgtcagaagttgaagctgccaaagggatgcggatacgagttccaaatgcagtatggatcaattggatggtctgtaggagctactcttggttatgctcaagctgttcctgagaagcgagttcttgcattcattggtgacggtagttttcaggtgacagcccaagacgtgtcgactatgctaagatgtggtcagaagaccataatcttcctgatcaacaatggtggatacaccattgaagtcgagattcacgacggtccgtacaacgtcatcaagaactggaactacactgctcttatcgatgcaatccacaacggagagggcaaatgttggacagctaaggttttctgtgaagaagagctggtgaatgctatcaaaaccgcgactggaccaaaggcggactgcctgtgcttcatcgaggtgatcgtgcataaagatgacacaagcaaagaacttcttgaatggggatctcgggtttctgctgccaacagccgccctcctaatcctcagtaa

SEQ ID NO: 4214 - protein, 605 aa, Dianthus caryophyllus
MDTKIGSLDTCPPQNSDICCPNKTTTTATHLHAPPTTHAPPESTLGRHLARRLVQIGVNDVFSVPGDFNLTLLDHLLAEPGLNLVGCCNELNAGYAADGYARSRGVGACVVTFTVGGLSVLNAIAGAYSENLPVICIVGGPNSNDYGTNRVLHHTIGLPDFSQEMRCFQTVTCYQAVVNNLEDAHEQIDTAISTALKESKPVYISVSCNLPAIPHPTFSREPVPFSLSPRMSNKMGLEAAVEAAAEFLNKAVKPVMVAGPKLRVAKACNAFVELVDASGYATAVMPSAKGLVPEHHSHFIGTYWGAVSTAFCAEIVESADAYIFAGPIFNDYSSVGYSLLLKKEKAILVQPDRVVIGNGPAFGCVLMKDFLTELAKKIKKNTTAFENYTRIFVPEGQPLKCEPKEPLRVNVLFQHIQKMLSSDTAVIAETGDSWFNCQKLKLPKGCGYEFQMQYGSIGWSVGATLGYAQAVPEKRVLAFIGDGSFQVTAQDVSTMLRCGQKTIIFLINNGGYTIEVEIHDGPYNVIKNWNYTALIDAIHNGEGKCWTAKVFCEEELVNAIKTATGPKADCLCFIEVIVHKDDTSKELLEWGSRVSAANSRPPNPQ

SEQ ID NO: 4215 - DNA, 1743 bp, Lotus japonicus
  CDS (1)..(1743)
atggaaaccgccactcaactcacctcacctcctccaccctccgccttcgacggcacgctcggccaccacctcgctcgccgcctcgtcgagatcggcgtcagggacgtcttctccgttcccggcgacttcaacttaactctcctcgaccacctcatcggcgagcctcagctcaacgtcatcggctgctgcaacgagcttaacgccggctacgccgccgacggctacgctcgtgctaagggtgttggcgcctgcgtcgtcaccttcaccgtcggtggtctcagcgtcctcaacgccatcgccggagcttacagtgagaatcttcccgtgatttgcatagttgggggaccgaattccaacgactacggtactaaccggatcctccatcacaccatcgggttacccgatttctcacaggagctacgatgctttcagactgtcacgtgtttccaggctgtggtgaataacttggaagatgcacatgagcttctggatactgcaatttctactgctttgaaagagagcaagcctgtttacatcagcattagttgtaatcttcctgcaattcatcatccaacttttgctagagacccagttccattttttctttctccaaaggtaagcaatcaggaaggattagaagcagcagtggaagtagcagctgcttttctcaacaaagctgtgaagccagtcattgtgggtggtccaaaactaagggcaccaaaggcacaaaaggcttttctagagtttgcagaagcaagtggatatgcaatagctgttatgccatctgggaagggatttgtgcctgaggatcatccacattttattgggacatactggggtgctgtcagtactggctattgtggggagatagttgagtctgctgatgcttatatttttgttggcccaatcttcaatgactatagctccgttggatactcattgttggtaaagaaggagaaagccatcatggtgcagcctaatcgggtcaccattggcaatggcccttccttgggctgggttttcatggctgatttcttaactgcattgtctaagaaggtgaagaccaacaaagcagctatggagaattaccaacgtatctttgttccacccggtattgctctgacacgagagaagggtgaacctcttagagttaatgttctgttcaagcacattcaggcaatgctaagtggagatagtgctgtaattgctgaaactggagactcatggttcaattgtcagaaactccgactgcctgcgaattgtggttatgaattccagatgcagtatggatctattggttggtcagtaggcgctacacttggatatgcacaggctgcaacaaataagcgtgtaattgcttgcattggtgatggcagttttcaggtgacagcacaggatatttcaaccatgatccgctgtgaacagaagaccatcatcttcctcatcaataatggaggttatacaattgaagttgagattcacgatggcccatacaatgtaatcaagaattgggactacactcgctttgttgaagccatcaataatggacaaggcaaatgctggactgccaaggtacgtacagaggatgatctaacagaagcaattgcagctgccactggaccacagaaagattcactttgttttatagaagtttttgtgcacaaggatgataccagcaaagagttactagaatggggatcacgtgtagctgctgctaacggccgtcctcctaatcctcaataa

SEQ ID NO: 4216 - protein, 580 aa, Lotus japonicus
METATQLTSPPPPSAFDGTLGHHLARRLVEIGVRDVFSVPGDFNLTLLDHLIGEPQLNVIGCCNELNAGYAADGYARAKGVGACVVTFTVGGLSVLNAIAGAYSENLPVICIVGGPNSNDYGTNRILHHTIGLPDFSQELRCFQTVTCFQAVVNNLEDAHELLDTAISTALKESKPVYISISCNLPAIHHPTFARDPVPFFLSPKVSNQEGLEAAVEVAAAFLNKAVKPVIVGGPKLRAPKAQKAFLEFAEASGYAIAVMPSGKGFVPEDHPHFIGTYWGAVSTGYCGEIVESADAYIFVGPIFNDYSSVGYSLLVKKEKAIMVQPNRVTIGNGPSLGWVFMADFLTALSKKVKTNKAAMENYQRIFVPPGIALTREKGEPLRVNVLFKHIQAMLSGDSAVIAETGDSWFNCQKLRLPANCGYEFQMQYGSIGWSVGATLGYAQAATNKRVIACIGDGSFQVTAQDISTMIRCEQKTIIFLINNGGYTIEVEIHDGPYNVIKNWDYTRFVEAINNGQGKCWTAKVRTEDDLTEAIAAATGPQKDSLCFIEVFVHKDDTSKELLEWGSRVAAANGRPPNPQ

SEQ ID NO: 4217 - DNA, 1695 bp, Saccharomyces kluyveri
  CDS (1)..(1695)
atgtccgaaattactctaggtctctacttgtttgaaagactgaaccaagtcgatgttaaaaccattttcggtttgccaggtgactttaacttgtccttgttggacaagatctacgaagtcccaggtatgagatgggctggtaacgctaacgaattgaacgctgcttacgctgctgacggttacgctagagttaagggtatgtcctgtatcatcaccaccttcggtgtcggtgaattgtctgccttgaacggtattgccggttcttatgctgaacacgttggtgttttgcacgttgtcggtgttccatccgtctcttcccaagctaagcaattgttgttgcatcacaccttgggtaacggtgacttcactgtcttccacagaatgtctgccaacatctctgaaaccaccgcttgggttaccgacattgccactgccccagctgaaattgacagatgcatcagaaccacctacgtcacccaaagaccagtctacttgggtttgccagccaacttggttgacttgatggtcccagcttctttgttggacaccccaattgacttgtctctaaagccaaacgacccagaagccgaagctgaagttgtcaacagcgtcttggaattgatcaaggacgctaagaacccaattatcttggccgatgcctgtgcttccagacacgacgtcaagcctgaaactaagcaattgatcgacattacccaattcccagccttcgttaccccattgggtaagggttccatcgacgaacaacacccaagattcggtggtgtttacgtcggtaccttgtctaacgacgatgtcaaggaagccgttgaatctgctgacttgattctatctgtcggtgctttgttgtccgacttcaacaccggttctttctcttactcttacaagaccaagaacattgttgaattccactctgactacatcaagatcagaaacgctaccttcccaggtgtccaaatgaaatttgcattgcaaaagttgttgtctgaaatcggtgcagttgttaaggactacaagccagttgctgttccaccaaagccaactccaaacccagcttgtgacccatccaccccattgaagcaagaatgggtctggaaccaagtcggtagattcttgcaagaaggtgacgttgtcatcactgaaaccggtacctccgctttcggtatcaaccaaactcatttccctaacaatacttacggtatctcccaagtcttatggggttctatcggtttcaccaccggtgcttgtttgggtgctgcttgcgctgctgaagaacttgacaagaacaagagagtcatcctattcattggtgacggttctttgcaattgactgttcaagaaatctccaccatgatcagatggggtctaagaccatacttgttcgtcttgaacaacgacggttacaccattgaaagattgattcacggtgaaaacgctcaatacaacgaaattcaaccatggaagaacttggacctattgccaaccttcggtgctaaggactacgaaacctacagagtcgccactaccggtgaatgggacaagttggcccaagacgaggccttcaacaagaactccagaatcagaatggttgaagttatgctacctgttatggatgctccatctaacttggtcaagcaagcccaattgactgctagcatcaacgccaagcaagattaa

SEQ ID NO: 4218 - protein, 564 aa, Saccharomyces kluyveri
MSEITLGLYLFERLNQVDVKTIFGLPGDFNLSLLDKIYEVPGMRWAGNANELNAAYAADGYARVKGMSCIITTFGVGELSALNGIAGSYAEHVGVLHVVGVPSVSSQAKQLLLHHTLGNGDFTVFHRMSANISETTAWVTDIATAPAEIDRCIRTTYVTQRPVYLGLPANLVDLMVPASLLDTPIDLSLKPNDPEAEAEVVNSVLELIKDAKNPIILADACASRHDVKPETKQLIDITQFPAFVTPLGKGSIDEQHPRFGGVYVGTLSNDDVKEAVESADLILSVGALLSDFNTGSFSYSYKTKNIVEFHSDYIKIRNATFPGVQMKFALQKLLSEIGAVVKDYKPVAVPPKPTPNPACDPSTPLKQEWVWNQVGRFLQEGDVVITETGTSAFGINQTHFPNNTYGISQVLWGSIGFTTGACLGAACAAEELDKNKRVILFIGDGSLQLTVQEISTMIRWGLRPYLFVLNNDGYTIERLIHGENAQYNEIQPWKNLDLLPTFGAKDYETYRVATTGEWDKLAQDEAFNKNSRIRMVEVMLPVMDAPSNLVKQAQLTASINAKQD

SEQ ID NO: 4219 - DNA, 1695 bp, Saccharomyces kluyveri
  CDS (1)..(1695)
atgtcggaaattacattaggtcgttacttgtttgaaaggttaaagcaggtgcaggttcagacgatcttcggattaccgggtgactttaatttgtctttgttggacaagatttacgaggttccgggtttgaggtgggcgggtaatgcaaatgagttgaatgcggcttatgcagcagatggttacgctagagtcaaaggtatgtcttgtattgttactacctttggtgtcggtgagttgtctgcgctgaacggtattgcgggttcgtatgcagaacacgtcggggtcttgcacgttgtcggcgttccatcagtctcgtcccaagcccaacagttgctattgcatcacacgttaggcaacggtgactttaccgtgtttcatagaatgtcctccgaaatctccgaaactactgcagtgatcactgatatcaaagatgctccaaaggaaattgacaggtgtattaaggtcacttactctaagcagagacccgtgtatttgggtctcccagctaacttggttgatttgaaggtttccgcatctttgttggacactccgatcgatttgtccatgacccccaatgatgccgatgccgaagatgaagttgttgaaacggtcttggcaatggtctccaaggcaaagaaccctgtcattctagcagacgcatgttgtactagacacgacgtcaaacgggaaaccaagaagttgatcgatttgacccagttccccgcttttgtgacaccaatgggcaagggctccatcgacgaggatcatccaaggtttggcggtgtttacgtgggcactttgtctgatcctgaagtaaaggaagccgttgagtctgcggacttggtcttatccgtcggcgccctgctatctgatttcaacaccggttctttttcttactcctacaagaccaagaatattgtggaattccactctgactacaccaaagtcagaaatgccactttccccggtgtgcagatgaaactcgtgttgcaaaaactgttatccaaggtgtccgatgcagcaagcggttataaaccagttccagttcccaagggtacaagatctaacccaggagtcgaatcttctactcctttgaaacaggaatggatttggaaccacattagcgactggttggaagaaggcgatgttgtcattacagagaccggcacttctgcgttcggtatcaaccagtcccgtttccctaacagcacctacggtatttctcaagtcttgtgggggtctattggctattctgtcggctcttgtttaggtgctgcttttgccgcagaagagttggacaagaatagaagggtcatcttgttcgttggggatggttctttacaactaaccgtccaagagatttccacaatggtcagatggggtctcaagccatatttgtttgtgttgaacaacgatggttatacaatcgaaaggttaattcatggtgagactgctcagtataacgacgttcaaccgtggttacatttgaacctgctaccaacttttggtgccaaggattacgattcgattagaatttccactacaggcgaatttctcaagttgactgaggatcaggctttcagtaggaattccaagattaggttgattgaagtaatgttacccgttatggatgctccttcgacgttggttaagcaagcccaattgactgccgctacaaatgctaagcagggctaa

SEQ ID NO: 4220 - protein, 564 aa, Saccharomyces kluyveri
MSEITLGRYLFERLKQVQVQTIFGLPGDFNLSLLDKIYEVPGLRWAGNANELNAAYAADGYARVKGMSCIVTTFGVGELSALNGIAGSYAEHVGVLHVVGVPSVSSQAQQLLLHHTLGNGDFTVFHRMSSEISETTAVITDIKDAPKEIDRCIKVTYSKQRPVYLGLPANLVDLKVSASLLDTPIDLSMTPNDADAEDEVVETVLAMVSKAKNPVILADACCTRHDVKRETKKLIDLTQFPAFVTPMGKGSIDEDHPRFGGVYVGTLSDPEVKEAVESADLVLSVGALLSDFNTGSFSYSYKTKNIVEFHSDYTKVRNATFPGVQMKLVLQKLLSKVSDAASGYKPVPVPKGTRSNPGVESSTPLKQEWIWNHISDWLEEGDVVITETGTSAFGINQSRFPNSTYGISQVLWGSIGYSVGSCLGAAFAAEELDKNRRVILFVGDGSLQLTVQEISTMVRWGLKPYLFVLNNDGYTIERLIHGETAQYNDVQPWLHLNLLPTFGAKDYDSIRISTTGEFLKLTEDQAFSRNSKIRLIEVMLPVMDAPSTLVKQAQLTAATNAKQG

SEQ ID NO: 4221 - DNA, 1695 bp, Saccharomyces kluyveri
  CDS (1)..(1695)
atgtctgaaattaccctaggtcgttacttgttcgaaagattgaaccaagtcgaagtccaaaccatcttcggtttgccaggtgactttaacttgtccttgttggacaagatctacgaagtcccaggtatgagatgggctggtaacgctaacgaattgaacgctgcttacgctgctgacggttacgctagaatcaagggtatgtcctgtatcatcaccaccttcggtgtcggtgaattgtctgccttgaacggtattgccggttcttacgctgaacacgttggtgttttgcacgttgtcggtgttccatccgtctcttcccaagctaagcaattgttgttgcatcacaccttgggtaacggtgacttcactgtcttccacagaatgtctgccaacatctctgaaaccaccgcttgggttaccgacattgccactgccccagctgaaattgacagatgcatcagaaccacctacgtcacccaaagaccagtctacttgggtttgccagccaacttggttgacttgatggtcccagcttctttgttggacaccccaattgacttgtctctaaagccaaacgacccagaagccgaagctgaagttgtcaacactgtcttggaattgatcaaggacgctaagaacccagttatcttggctgatgcctgtgcttccagacacaacgtcaagtctgaaaccaagcaattgatcgacattactcaattcccagccttcgttaccccattgggtaagggttccatcgacgaacaacacccaagattcggtggtgtttacgtcggtaccttgtctaacgacgatgtcaaggaagccgttgaatctgctgacttgattctatctgtcggtgctttgttgtccgacttcaacaccggttctttctcttactcttacaagaccaagaacattgttgaattccactctgactacatcaagatcagaaacgctaccttcccaggtgtccaaatgaaattcgctttgcaaaagttgttgtctcaagtcggtgaagttgttaaggactacaagccagttgctgttccagcaaagccaactccaaacccagcttgtgacccatccaccccattgaagcaagaatgggtctggaaccaagtcggtagattcttgcaagaaggtgacgttgtcatcaccgaaaccggtacctccgctttcggtatcaaccaaactcatttccctaacaacacttacggtatctcccaagtcttatggggttctatcggtttcaccaccggtgcttgtttgggtgctgcttgcgctgctgaagaacttgacaagaacaagagagtcatcctattcattggtgacggttctttgcaattgactgttcaagaaatctccaccatgatcagatggggtctaaaaccatacttgttcgtcttgaacaacgacggttacaccattgaaagattgattcacggtgaaaacgctcaatacaacgaaattcaaccatggaagaacttggacctattgccaaccttcggtgctaaggactacgaaacctacagagtcgccactaccggtgaatgggacaagttggcccaagacgaggccttcaacaagaactccagaatcagaatggttgaagttatgctacctgttatggatgctccatctaacttggtcaagcaagcccaattgaccgctagcatcaacgctaagcaagaataa

SEQ ID NO: 4222 - protein, 564 aa, Saccharomyces kluyveri
MSEITLGRYLFERLNQVEVQTIFGLPGDFNLSLLDKIYEVPGMRWAGNANELNAAYAADGYARIKGMSCIITTFGVGELSALNGIAGSYAEHVGVLHVVGVPSVSSQAKQLLLHHTLGNGDFTVFHRMSANISETTAWVTDIATAPAEIDRCIRTTYVTQRPVYLGLPANLVDLMVPASLLDTPIDLSLKPNDPEAEAEVVNTVLELIKDAKNPVILADACASRHNVKSETKQLIDITQFPAFVTPLGKGSIDEQHPRFGGVYVGTLSNDDVKEAVESADLILSVGALLSDFNTGSFSYSYKTKNIVEFHSDYIKIRNATFPGVQMKFALQKLLSQVGEVVKDYKPVAVPAKPTPNPACDPSTPLKQEWVWNQVGRFLQEGDVVITETGTSAFGINQTHFPNNTYGISQVLWGSIGFTTGACLGAACAAEELDKNKRVILFIGDGSLQLTVQEISTMIRWGLKPYLFVLNNDGYTIERLIHGENAQYNEIQPWKNLDLLPTFGAKDYETYRVATTGEWDKLAQDEAFNKNSRIRMVEVMLPVMDAPSNLVKQAQLTASINAKQE

SEQ ID NO: 4223 - DNA, 1821 bp, Lotus corniculatus
  CDS (1)..(1821)
atggacgtaaagttaggttctctcgacacaaccaagccagcaagcaacgacgtcgtttcatgcgccaccgccaaccacaccacggcgatccagtcctcgatcccatcaacggcggtgtcctcctgcgacgccacgctcggccgccacctcgcgcgccgcctcgcgcagatcggcgtcaccgacgtgttctccgtccccggcgacttcaacctcacgctgctcgaccacctcatcgctgaaccgcagctcaacctcgtcggctgctgcaacgagctcaacgctgggtacgccgctgacggctacgctcgagcacgcggcgttggcgcttgcgtcgtgacgttcaccgtcggtggactcagcgtgctcaacgctattgctggagcttacagtgagaacttgcccctcatttgcatcgttggtgggccgaactccaacgactatggaaccagcaggatccttcatcataccattgggttgccggatttcacacaggagttgaggtgttttcagactgttacttgctttcaggctgtggtgaataatttggaggatgctcatgagcagattgatacagcaatctcaactgcactgaaagagagcaagcctgtgtatataagcattggctgtaacttgcctgggattcctcatcctactttcagccgtgatcctgttcctttttcattgtctgccaaattgagtaaccagatggggttggaggcagcagtagaggcaactgcggagttccttaacaaggcagtgaaaccagtacttgtgggtggtcctaaactgagggttgcaaaagcatctgatgcctttgttgaactagctgatgcaagtggttatgctcttgctgtgatgccatcagctaaagggcaagttccagagcaccatccccatttcattggaacttattggggtgctgtgagcactgcattctgtgctgagattgtggagtctgctgatgcgtatttgtttgctggtcccattttcaatgactacagctctgtggggtactcacttcttctcaagaaagagaaggcaatcattgtgcagcctgatcgcgttgtgattgccaatgggcctgcatttgggtgtgtgctgatgaaggacttcctcaaggcacttgcgaagcgtctcaaacacaacaatgctgcatatgaaaactaccacaggatattcgtccctgaagggaagcctttgaagtctgcaccgaaagaacctttgagggttaatgttatgttccagcatatacaaaagatgctgtctggtgaaacagctgtgattgctgagacaggggactcatggtttaactgccaaaagctgaaattgccaagagggtgtgggtatgagtttcaaatgcaatatggctcaattggatggtctgttggtgcaacccttggctatgcacaggcagtccctgagaagcgagtgattgcttgcattggtgatggaagctttcaggtgactgctcaggatgtatcgacaatgctgcggtgcggtcaaaacaccatcatcttcctgataaacaatggtggatacaccatcgaggttgaaattcatgatgggccatacaatgtgattaagaactggaactacactgggctgattgaagcaatccacaacggtgaagggaaatgctggacttccaaggtcttctgtgaagaggagctagttgaagcaattgcaactgcaacaggaccaaagaaagattgcttatgcttcattgaggtgattgttcacaaggatgataccagcaaagagttgcttgaatggggctccagggtctctgctgccaatggtcgtcctcccaatcctcagtaa

SEQ ID NO: 4224 - protein, 606 aa, Lotus corniculatus
MDVKLGSLDTTKPASNDVVSCATANHTTAIQSSIPSTAVSSCDATLGRHLARRLAQIGVTDVFSVPGDFNLTLLDHLIAEPQLNLVGCCNELNAGYAADGYARARGVGACVVTFTVGGLSVLNAIAGAYSENLPLICIVGGPNSNDYGTSRILHHTIGLPDFTQELRCFQTVTCFQAVVNNLEDAHEQIDTAISTALKESKPVYISIGCNLPGIPHPTFSRDPVPFSLSAKLSNQMGLEAAVEATAEFLNKAVKPVLVGGPKLRVAKASDAFVELADASGYALAVMPSAKGQVPEHHPHFIGTYWGAVSTAFCAEIVESADAYLFAGPIFNDYSSVGYSLLLKKEKAIIVQPDRVVIANGPAFGCVLMKDFLKALAKRLKHNNAAYENYHRIFVPEGKPLKSAPKEPLRVNVMFQHIQKMLSGETAVIAETGDSWFNCQKLKLPRGCGYEFQMQYGSIGWSVGATLGYAQAVPEKRVIACIGDGSFQVTAQDVSTMLRCGQNTIIFLINNGGYTIEVEIHDGPYNVIKNWNYTGLIEAIHNGEGKCWTSKVFCEEELVEAIATATGPKKDCLCFIEVIVHKDDTSKELLEWGSRVSAANGRPPNPQ

SEQ ID NO: 4225 - DNA, 1671 bp, Zymobacter palmae
  CDS (1)..(1671): transl_table=11
atgtataccgttggtatgtacttggcagaacgcctagcccagatcggcctgaaacaccactttgccgtggccggtgactacaacctggtgttgcttgatcagctcctgctgaacaaagacatggagcaggtctactgctgtaacgaacttaactgcggctttagcgccgaaggttacgctcgtgcacgtggtgccgccgctgccatcgtcacgttcagcgtaggtgctatctctgcaatgaacgccatcggtggcgcctatgcagaaaacctgccggtcatcctgatctctggctcaccgaacaccaatgactacggcacaggccacatcctgcaccacaccattggtactactgactataactatcagctggaaatggtaaaacacgttacctgcgcacgtgaaagcatcgtttctgccgaagaagcaccggcaaaaatcgaccacgtcatccgtacggctctacgtgaacgcaaaccggcttatctggaaatcgcatgcaacgtcgctggcgctgaatgtgttcgtccgggcccgatcaatagcctgctgcgtgaactcgaagttgaccagaccagtgtcactgccgctgtagatgccgccgtagaatggctgcaggaccgccagaacgtcgtcatgctggtcggtagcaaactgcgtgccgctgccgctgaaaaacaggctgttgccctagcggaccgcctgggctgcgctgtcacgatcatggctgccgaaaaaggcttcttcccggaagatcatccgaacttccgcggcctgtactggggtgaagtcagctccgaaggtgcacaggaactggttgaaaacgccgatgccatcctgtgtctggcaccggtattcaacgactatgctaccgttggctggaactcctggccgaaaggcgacaatgtcatggtcatggacaccgaccgcgtcactttcgcaggacagtccttcgaaggtctgtcattgagcaccttcgccgcagcactggctgagaaagcaccttctcgcccggcaacgactcaaggcactcaagcaccggtactgggtattgaggccgcagagcccaatgcaccgctgaccaatgacgaaatgacgcgtcagatccagtcgctgatcacttccgacactactctgacagcagaaacaggtgactcttggttcaacgcttctcgcatgccgattcctggcggtgctcgtgtcgaactggaaatgcaatggggtcatatcggttggtccgtaccttctgcattcggtaacgccgttggttctccggagcgtcgccacatcatgatggtcggtgatggctctttccagctgactgctcaagaagttgctcagatgatccgctatgaaatcccggtcatcatcttcctgatcaacaaccgcggttacgtcatcgaaatcgctatccatgacggcccttacaactacatcaaaaactggaactacgctggcctgatcgacgtcttcaatgacgaagatggtcatggcctgggtctgaaagcttctactggtgcagaactagaaggcgctatcaagaaagcactcgacaatcgtcgcggtccgacgctgatcgaatgtaacatcgctcaggacgactgcactgaaaccctgattgcttggggtaaacgtgtagcagctaccaactctcgcaaaccacaagcgtaa

SEQ ID NO: 4226 - protein, 556 aa, Zymobacter palmae
MYTVGMYLAERLAQIGLKHHFAVAGDYNLVLLDQLLLNKDMEQVYCCNELNCGFSAEGYARARGAAAAIVTFSVGAISAMNAIGGAYAENLPVILISGSPNTNDYGTGHILHHTIGTTDYNYQLEMVKHVTCARESIVSAEEAPAKIDHVIRTALRERKPAYLEIACNVAGAECVRPGPINSLLRELEVDQTSVTAAVDAAVEWLQDRQNVVMLVGSKLRAAAAEKQAVALADRLGCAVTIMAAEKGFFPEDHPNFRGLYWGEVSSEGAQELVENADAILCLAPVFNDYATVGWNSWPKGDNVMVMDTDRVTFAGQSFEGLSLSTFAAALAEKAPSRPATTQGTQAPVLGIEAAEPNAPLTNDEMTRQIQSLITSDTTLTAETGDSWFNASRMPIPGGARVELEMQWGHIGWSVPSAFGNAVGSPERRHIMMVGDGSFQLTAQEVAQMIRYEIPVIIFLINNRGYVIEIAIHDGPYNYIKNWNYAGLIDVFNDEDGHGLGLKASTGAELEGAIKKALDNRRGPTLIECNIAQDDCTETLIAWGKRVAATNSRKPQA

SEQ ID NO: 4227 - DNA, 1674 bp, Acetobacter pasteurianus
  CDS (1)..(1674): transl_table=11
gtgacctatactgttggcatgtatcttgcagaacgccttgtacagatcgggctgaagcatcacttcgccgtgggcggcgactacaatctcgttcttctggatcagttgctcctcaacaaggacatgaaacagatctattgctgcaatgagttgaactgtggcttcagcgcggaaggctacgcccgttctaacggggctgcggcagcggttgtcaccttcagcgttggcgccatttccgccatgaacgccctcggcggcgcctatgccgaaaacctgccggttatcctgatttccggcgcgcccaacagcaatgatcagggcacaggtcatatcctgcatcacacaatcggcaagacggattacagctaccagcttgaaatggcccgtcaggtcacctgtgccgccgaaagcattaccgacgctcactccgccccggccaagattgaccacgtcattcgcacggcgctgcgcgagcgtaagccggcctatctggacatcgcgtgcaacattgcctccgagccctgcgtgcggcctggccctgtcagcagcctgctgtccgagcctgaaatcgaccacacgagcctgaaggccgcagtggacgccacggttgccttgctgaaaaatcggccagcccccgtcatgctgctgggcagcaagctgcgggccgccaacgcactggccgcaaccgaaacgctggcagacaagctgcaatgcgcggtgaccatcatggcggccgcgaaaggctttttccccgaagaccacgcgggtttccgcggcctgtactggggcgaagtctcgaaccccggcgtgcaggaactggtggagacctccgacgcactgctgtgcatcgcccccgtattcaacgactattcaacagtcggctggtcgggcatgcccaagggccccaatgtgattctggctgagcccgaccgcgtaacggtcgatggccgcgcctatgacggctttaccctgcgcgccttcctgcaggctctggcggaaaaagcccccgcgcgcccggcctccgcacagaaaagcagcgtcccgacgtgctcgctcaccgcgacatccgatgaagccggtctgacgaatgacgaaatcgtccgtcatatcaacgccctgctgacatcaaacacgacgctggtggcagaaaccggcgattcatggttcaatgccatgcgcatgaccctggccggtgcgcgcgtggaactggaaatgcagtggggccatatcggctggtccgtgccctccgcgttcggcaatgccatgggctcgcaggaccgccagcatgtggtgatggtaggcgatggctccttccagcttaccgcgcaggaagtggctcagatggtgcgctacgaactgcccgtcattatctttctgatcaacaaccgtggctatgtcattgaaatcgccattcatgacggcccgtacaactatatcaagaactgggattacgccggcctgatggaagtcttcaacgccggagaaggccatggacttggcctgaaagccaccaccccgaaggaactgacagaagccatcgccagggcaaaagccaatacccgcggcccgacgctgatcgaatgccagatcgaccgcacggactgcacggatatgctggttcaatggggccgcaaggttgcctcaaccaacgcgcgcaagaccactctggcctga

SEQ ID NO: 4228 - protein, 557 aa, Acetobacter pasteurianus
MTYTVGMYLAERLVQIGLKHHFAVGGDYNLVLLDQLLLNKDMKQIYCCNELNCGFSAEGYARSNGAAAAVVTFSVGAISAMNALGGAYAENLPVILISGAPNSNDQGTGHILHHTIGKTDYSYQLEMARQVTCAAESITDAHSAPAKIDHVIRTALRERKPAYLDIACNIASEPCVRPGPVSSLLSEPEIDHTSLKAAVDATVALLKNRPAPVMLLGSKLRAANALAATETLADKLQCAVTIMAAAKGFFPEDHAGFRGLYWGEVSNPGVQELVETSDALLCIAPVFNDYSTVGWSGMPKGPNVILAEPDRVTVDGRAYDGFTLRAFLQALAEKAPARPASAQKSSVPTCSLTATSDEAGLTNDEIVRHINALLTSNTTLVAETGDSWFNAMRMTLAGARVELEMQWGHIGWSVPSAFGNAMGSQDRQHVVMVGDGSFQLTAQEVAQMVRYELPVIIFLINNRGYVIEIAIHDGPYNYIKNWDYAGLMEVFNAGEGHGLGLKATTPKELTEAIARAKANTRGPTLIECQIDRTDCTDMLVQWGRKVASTNARKTTLA

SEQ ID NO: 4229 - DNA, 1683 bp, Rhizopus oryzae
  CDS (1)..(1683)
atgccttctatccaaatcggtcaacatctccttaaccgtctcaaggaaattaacattgatgtagtctttggtgttcctggtgacttcaacatgcctttgctggatattattgaagacgacccaaaacttacgtggggtaacaatgctaatgaattgaatgcttcttatgcagctgatggttatgctcgtattcgtggtgcgggtgctgttgtcactacttttggtgttggtgaactctctgctgtgaatggtgttgctggttcttatgctgagatgcttcctgtgattcacattgtcggtacaccttctactaaatctcaagctgctggtgctatgcttcatcactctctgggtgatggtaactttgatgtgttcttcaacatgtcctccatgattgcctgtgcatctactcatctcaggaagcagactgctattgcagaaattgaccgtgtcatctctcaagctgttctttcaaaacgtactggttacatcggtatccctattgacttgatcaagaccgaagtcgaaattcctgaggaattaggtccttttcagaccacgcttcccaagaacaacccagaagtccaagcgattgccttgaaggtcgtcgccgaggccattcagtctgccaagcatcctgtgatcattgtcgatggctgtgtccttcgtcaccgctgtcagaaacccgtccaagagttcatcacccgttccggtttcccaacctatgtggctcccatgggcaagggcgccgtggatgagtccatcgagaatttccgtggttgttattcaggtaacgtgacactggaggctgtcaatgaagaaatcaaactggccgatttgattattgagattggttcgatcaagtctgattttaacacgggtaacttttcatactccctcgaccgttccaagacgatcaccttgcattcttttgctacggttgtgttttgtgcagagtaccaaaaggtatccatgatggaattcattcccctcttgaccgaggcccttccccaacaacctcgtacgttcaacttgggtccacgtgcaaagcctgtgccgatccaacccggcactgaaatcacccacaattacttttggcacaaggtacccgagtacatggaagaaaacgcgattgtctgtgcagagactggtacagccgaatttgcttcactcaacatggatggtcccaagggcacgacttatatcacacaaatcctttggggttctatcggtttcacggtaggtgcctctgtgggtgccgctatcgccgctcgtgatcgtcgtgtgtatctctttgtcggtgatggttccttccaattgacctgccaagaaatcgctgttttccttcgtcatggcctcacacctgtcatcttcttgctgaacaatgacggttacttgattgaaaaactcattcacggtcctgaacgtgcttacaataattaccaaatgtggaattacagcaagtctcttgactatttcggtgctcaccttgaacacaacaagtccatgggtgttcctcccgttggtttcgaaggcaaggtggccacacgtgatgaattcgaatcggccatgaagcaagttcaagccaatcctgacaagattcatttccttgaagtaattatgcctcaatttgacgcccctcgtgaacttgaattattggttgccaactctgaaaaccgataa

SEQ ID NO: 4230 - protein, 560 aa, Rhizopus oryzae
MPSIQIGQHLLNRLKEINIDVVFGVPGDFNMPLLDIIEDDPKLTWGNNANELNASYAADGYARIRGAGAVVTTFGVGELSAVNGVAGSYAEMLPVIHIVGTPSTKSQAAGAMLHHSLGDGNFDVFFNMSSMIACASTHLRKQTAIAEIDRVISQAVLSKRTGYIGIPIDLIKTEVEIPEELGPFQTTLPKNNPEVQAIALKVVAEAIQSAKHPVIIVDGCVLRHRCQKPVQEFITRSGFPTYVAPMGKGAVDESIENFRGCYSGNVTLEAVNEEIKLADLIIEIGSIKSDFNTGNFSYSLDRSKTITLHSFATVVFCAEYQKVSMMEFIPLLTEALPQQPRTFNLGPRAKPVPIQPGTEITHNYFWHKVPEYMEENAIVCAETGTAEFASLNMDGPKGTTYITQILWGSIGFTVGASVGAAIAARDRRVYLFVGDGSFQLTCQEIAVFLRHGLTPVIFLLNNDGYLIEKLIHGPERAYNNYQMWNYSKSLDYFGAHLEHNKSMGVPPVGFEGKVATRDEFESAMKQVQANPDKIHFLEVIMPQFDAPRELELLVANSENR

SEQ ID NO: 4231 - DNA, 1683 bp, Rhizopus oryzae
  CDS (1)..(1683)
atgccttctattaaaattggtcaacatctccttaaccgtcttaaggaaatcaacattgatgttgtctttggtgttcctggtgatttcaacatgcccttgttggatatcattgaagatgacccagagcttacctggggtaacaatgccaatgaattgaatgcgtcttatgcagctgatggttatgctcgtattcgtggtgcaggtgccgttgtcactacttttggtgtaggtgaactctctgctgtcaacggtattgctggttcatactctgagatgcttcccgtgattcacattgtcggtacaccttctactaaatcccaagctgccggtgccatgcttcaccactctttgggtgatggtaactttgatgtgttcttcaacatgtcctccatgattgcctgtgcctctgctcacctcaagaaacaaacggccattgcagaaattgaccgtgtgatctcccaagctgttctctccaagcgtacgggttacattggtatccctatcgatctgatcaagactgaggttgaagtgcctgagcccatacctgccctcaagaccgaattacccaagaacccagctgatgtccaagcgattgccttgagagtggtgacggatgcgatcgccaaagcccaattccctgtgattattgtcgatggctgtgtgcttcgtcagagatgccaaaaggcagtacaagcctttatcgaacgttctggtttccctacctacgttgctcctatgggtaagggtgccgtcgacgaatcctctgtgagttaccgtggctgctactcgggtaatgttacgttggaagcagtgaatgaagagatcaagcaagccgatttgatcatcgaagtgggttcaatcaagtctgatttcaacacgggtaacttttcatactctcttgaccgttccaagacaatcaccttgcactcctttgccaccattgtgttttgtgctgaataccaaaaggtctccatgctcgaattcgttcctctcttgacccaagcccttcccgaacaaccccgtcaattcaacctgggtccccgcccaagacccgtacctattcaacccggtaccgaaatcacccacaactacttttggcacaaggtacccgaattcatggatgaaaacgccattgtctgtgccgagactggtacagctgaatttgcttcactcaacatggatggacccaagggaacgacttacatcacccaattcctctggggttctatcggtttctctgtaggtgccgctgtaggtgctgcgatcgccgctcgtgatcgtcgtgtgtatctctttgtcggtgatggttccttccaattgacctgtcaagaaatctctggcttccttcgccatggtttgacacctgtggtcttcttgctgaacaatgacggttacttgattgaaaaactcattcacggtcctgaacgtgcttacaataattaccaaatgtggaattacagcaagtctcttgattatttcggtgctcaccttgaacacaacaagtccatgggtgttcctcccgttggcttcgaaggcaaggtagccacacgtgatgaatttgaatccgctatgagacaggttcaagccaatcctgacaagattcatttccttgaagtcatcatgcctcaatttgattctcctcgtgaacttgaactcttggttgccaactctgaaaaccgttaa

SEQ ID NO: 4232 - protein, 560 aa, Rhizopus oryzae
MPSIKIGQHLLNRLKEINIDVVFGVPGDFNMPLLDIIEDDPELTWGNNANELNASYAADGYARIRGAGAVVTTFGVGELSAVNGIAGSYSEMLPVIHIVGTPSTKSQAAGAMLHHSLGDGNFDVFFNMSSMIACASAHLKKQTAIAEIDRVISQAVLSKRTGYIGIPIDLIKTEVEVPEPIPALKTELPKNPADVQAIALRVVTDAIAKAQFPVIIVDGCVLRQRCQKAVQAFIERSGFPTYVAPMGKGAVDESSVSYRGCYSGNVTLEAVNEEIKQADLIIEVGSIKSDFNTGNFSYSLDRSKTITLHSFATIVFCAEYQKVSMLEFVPLLTQALPEQPRQFNLGPRPRPVPIQPGTEITHNYFWHKVPEFMDENAIVCAETGTAEFASLNMDGPKGTTYITQFLWGSIGFSVGAAVGAAIAARDRRVYLFVGDGSFQLTCQEISGFLRHGLTPVVFLLNNDGYLIEKLIHGPERAYNNYQMWNYSKSLDYFGAHLEHNKSMGVPPVGFEGKVATRDEFESAMRQVQANPDKIHFLEVIMPQFDSPRELELLVANSENR

SEQ ID NO: 4233 - DNA, 1818 bp, Zea mays
  CDS (1)..(1818)
atggacacccatatcggatccgtgaacggggcggcgtcgaaccagacggttggctgcccggcgtcggcgccggggtgcccgatggcgtccacgccggcgcagcccgcggcgaccctgtcggcgggggaggcgtcgctggggcgccacctcgcgcgtcgcctcgtgcaggtcggcgtcaacgatgtattcgcggttccgggggacttcaacctcacgctgctcgaccacctgatcgccgagcccggcctgcgcctcgtcggctgctgcaacgagctcaacgccgggtacgccgccgacgggtacgcgcgcgcgcgcggcgtcggggcctgcgccgtcacgttcacagtcggggggctcagcgtgctcaacgccatcgcgggcgcctacagcgagaacctgcccgtcatctgcatcgccggcgggcccaactccaacgactacgggaccaaccgcatcctccaccacaccatcggcctccccgacttctcgcaggagctccgctgcttccagaccgtcacctgccatcaggcggtggtgaacaatctggatgacgcgcacgagcagatcgacacggccattgccacggcactgagggagagcaagcccgtgtacctcagcatcagctgcaacctccctgggctgcctcatcctaccttcagccgcgacccagtgcccttcttcctcacccccaggagcaacaagatggggctagaggctgcagtggaggcaactgtcgaattcctgaacaaggcggtgaagccagtccttgtcgccggccccaaactgcgtgtggcaaaggcaggaaaggcatttgtcgatatggtagatgccagtggctatgcctatgccgtgatgccatcggccaagggtcttgtgccagagactcacccccacttcatcggcacctactggggcgccgtcagcaccgccttctgtgcggagattgttgagtccgcagatgcctacctctttgcaggccccattttcaatgactacagctctgttggctactcattcctcctcaagaaggaaaaggccatcatcgtccagcctgagcgtgtgatagtggggaatgggccggcattcggatgtgtgatgatgaaagagttcttgtctgaattggctaagagggttaataagaacaccactgcctatgagaattacaagaggatctttgtacctgagggccagccgctggaaagcgagccaaatgagccactgcgagtgaatgtgctcttcaagcacgtccagaagatgttgactggtgatagcgcggtgattgctgagactggtgactcctggttcaactgccagaagcttaagctgccagaaggctgtgggtatgaattccaaatgcagtatggttcgattggatggtcagtgggtgcattgctcggatatgctcagggtgcgaaccacaagcgtgtgattgccttcattggtgatgggagcttccaggttacagcacaggatgtgtcaactatgctgcgatgtgagcagaacagcataatcttcctgatcaacaacggtgggtacacgattgaggtggaaatccatgacgggccatacaacgtcatcaagaactggaactacactggctttgtggacgccatccacaatggcttgggcaagtgctggacctccaaggtgaagagcgaggaggagctgacggctgccattgagacagcgctaggggagaagaaggactgcctgtgcttcatcgaggtgatcgcgcacaaggacgacaccagcaaagagctgctggaatggggctctagggtttctgccgccaactcccggccaccaaatcctcagtag

SEQ ID NO: 4234 - protein, 605 aa, Zea mays
MDTHIGSVNGAASNQTVGCPASAPGCPMASTPAQPAATLSAGEASLGRHLARRLVQVGVNDVFAVPGDFNLTLLDHLIAEPGLRLVGCCNELNAGYAADGYARARGVGACAVTFTVGGLSVLNAIAGAYSENLPVICIAGGPNSNDYGTNRILHHTIGLPDFSQELRCFQTVTCHQAVVNNLDDAHEQIDTAIATALRESKPVYLSISCNLPGLPHPTFSRDPVPFFLTPRSNKMGLEAAVEATVEFLNKAVKPVLVAGPKLRVAKAGKAFVDMVDASGYAYAVMPSAKGLVPETHPHFIGTYWGAVSTAFCAEIVESADAYLFAGPIFNDYSSVGYSFLLKKEKAIIVQPERVIVGNGPAFGCVMMKEFLSELAKRVNKNTTAYENYKRIFVPEGQPLESEPNEPLRVNVLFKHVQKMLTGDSAVIAETGDSWFNCQKLKLPEGCGYEFQMQYGSIGWSVGALLGYAQGANHKRVIAFIGDGSFQVTAQDVSTMLRCEQNSIIFLINNGGYTIEVEIHDGPYNVIKNWNYTGFVDAIHNGLGKCWTSKVKSEEELTAAIETALGEKKDCLCFIEVIAHKDDTSKELLEWGSRVSAANSRPPNPQ

SEQ ID NO: 4235 - DNA, 1818 bp, Fragaria ananassa
  CDS (1)..(1818)
atggacaccaagattggctccatcgacgtctgcaaaaccgagaaccacgacgtcggttgtttaccaaacagcaccacttccaccgttcaagactcagtcccttccacctgcctgagctccgccgacgccaccctcggccgccacctggcacgccgcctcgttcaaatcggcatcaccgacgtcttcaccgtccccggcgacttcaacttgacccttctggaccacctcatcgccgagcccggcctcaccaacattggctgctgcaatgagctcaacgccgggtacgccgccgacggctacgcgcggtcgcgtggtgtcggcgcgtgcgtggtgactttcactgtgggtggactgagtgtgctgaacgcgatcgccggcgcgtatagtgagaatttaccggtgatttgtattgttggtgggcccaactctaatgattatgggactaaccggattcttcaccatactattgggtcgccggacttcagtcaagagctccggtgctttcagaccgtgacttgctttcaggctgtggtgaataatctggaggatgcacatgagttgattgataccgcaatttcgactgcgttgaaagaaagcaagcctgtgtatatcagcattggctgcaacttggcggggattcctcatcctactttcagccgtgaacctgttccgttttcattgtctccaaaattgagcaataagtggggactagaggctgcagtggaggctgctgcagagtttttgaacaaggcagtgaagccggttatggtgggcgggcccaaactgcgctctgcacatgctggtgatgcctttgttaaactggctgatgcttctggatttgctctggctgtgatgccatcagcaaaggggcaagtgccagagcaccatccccattttatcggaacatactggggcgctgtgagcactgccttttgtgctgagattgtggagtctgcagatgcatacttgtttgctgggccgattttcaatgattacagctctgttggatactcactccttctcaagaaagagaaggcaatcattgtgcagcctgatcgtgtgacaataggaaatggccctacatttggttgtgttcttatgaaggatttcctcgtaggcctagcaaagaagctgaagcataataacactgcttatgagaactaccgcaggatctttgtgcctgatggccaccctctgaaggctgcacccaaagaacctttgagggttaatgttctgttcaaacacattcagaagatgctgtcagctgaaaccgctgtgattgccgagacaggggactcatggtttaactgtcagaagctgaaattgccacccggctgcgggtatgagttccaaatgcaatatggatcaattggttggtcagttggagcaactcttgggtatgctcaggctgtacctgagaagcgagtgattgctttcattggtgatgggagcttccaggtgactgctcaagatgtgtccacgatgattcgaaatggacagaggaccatcattttcctgataaacaatggcggatacaccattgaagtggaaatccatgatggaccatacaatgtgatcaagaactggaactacactggactggttgatgcaatccacaatggggaaggcaagtgctggacaaccaaggttcgttgcgaagaggagctgattgaagcaatagagactgcaaatggacccaagaaggatagattatgcttcattgaggtgattgttcacaaggatgataccagcaaagagttgcttgagtgggggtctagggtttctgctgccaatagccgcccacctaatcctcagtaa

SEQ ID NO: 4236 - protein, 605 aa, Fragaria ananassa
MDTKIGSIDVCKTENHDVGCLPNSTTSTVQDSVPSTCLSSADATLGRHLARRLVQIGITDVFTVPGDFNLTLLDHLIAEPGLTNIGCCNELNAGYAADGYARSRGVGACVVTFTVGGLSVLNAIAGAYSENLPVICIVGGPNSNDYGTNRILHHTIGSPDFSQELRCFQTVTCFQAVVNNLEDAHELIDTAISTALKESKPVYISIGCNLAGIPHPTFSREPVPFSLSPKLSNKWGLEAAVEAAAEFLNKAVKPVMVGGPKLRSAHAGDAFVKLADASGFALAVMPSAKGQVPEHHPHFIGTYWGAVSTAFCAEIVESADAYLFAGPIFNDYSSVGYSLLLKKEKAIIVQPDRVTIGNGPTFGCVLMKDFLVGLAKKLKHNNTAYENYRRIFVPDGHPLKAAPKEPLRVNVLFKHIQKMLSAETAVIAETGDSWFNCQKLKLPPGCGYEFQMQYGSIGWSVGATLGYAQAVPEKRVIAFIGDGSFQVTAQDVSTMIRNGQRTIIFLINNGGYTIEVEIHDGPYNVIKNWNYTGLVDAIHNGEGKCWTTKVRCEEELIEAIETANGPKKDRLCFIEVIVHKDDTSKELLEWGSRVSAANSRPPNPQ

SEQ ID NO: 4237 - DNA, 1821 bp, Arabidopsis thaliana
  CDS (1)..(1821)
atggacaccaaaatcggatcgatcgatgattgcaagccgacgaacggcgacgtctgtagtccaacaaacggcaccgtcgcaacaatccacaactctgttccttcctccgctatcaccatcaactactgcgacgcgactctcggccgtcacttagctcgtcgtctcgtccaagccggcgttacggatgttttctctgttcccggagatttcaacctcactttgcttgatcacctcatggctgagccggacctcaacctaatcggatgttgtaacgagctaaacgccggttacgctgccgacggttacgctagatctcgtggagtcggcgcttgcgttgttaccttcaccgttggtggactcagcgttttaaacgcgatcgctggtgcttacagcgagaatcttcctcttatctgtatcgtcggaggtcctaactctaacgattatggcactaaccggattcttcatcacaccattggattacctgatttcagccaagagcttaggtgcttccaaacggtgacttgttatcaggcggtggtgaacaatttagatgatgctcatgaacagattgataaagcaatatcaacagctttgaaagagagcaagcctgtgtatataagtgtaagctgtaacttagcagcgattcctcatcatacatatagccgtgatcctgtccctttttctctagctccaagattgagcaacaagatgggtttagaagctgcggtggaagcaacattggagtttctgaataaggctgtgaagcaagttatggttggtggtcctaagttgcgtgtggctaaagcttgtgatgcctttgttgagctagctgatgcttcaggctatgctttggcgatgatgccttctgcgaaaggctttgtaccagagcaccatcctcatttcattggaacttattggggagcagtgagcactcctttttgctctgagattgtggaatctgcggatgcttacatttttgcaggtccaatcttcaacgactatagctctgttggttactcgcttctcctcaagaaagaaaaagccatcgttgtgcaacctgatcgtatcactgtggccaatggtcctacttttggttgcattttgatgagcgatttcttcagggaattgtctaagagggtgaagcgtaacgagactgcatatgagaactaccataggatctttgtccctgaaggtaagccattgaagtgtgaatcaagagagccattgagagttaacacaatgttccagcacattcagaagatgctctctagtgaaaccgctgtgattgctgctgaaaccggtgattcttggttcaattgccaaaaactaaagctgccaaaaaggtacgagtttcagatgcagtatggatcgattgggtggtctgttggtgcaactctaggatacgcacaggcatcaccagagaagcgagtgttggcattcatcggtgatgggagtttccaagtcacggttcaggacatatcaacaatgctgcgtaatggacagaagacgatcatcttcttgattaacaatggtggctacaccattgaagtagagattcatgacggtccttataacgtgattaagaactggaactacactggtctcgttgacgccattcataacggtgaaggcaattgctggactgcaaaggtgagatacgaagaggagttagtggaggcgattacgacagcgacgacggagaagaaagattgtctatgtttcatagaagtgattcttcacaagggtgaaacgagcaaagagttgcttgagtggggtcacgcgtctctgctgctaacagccgtcctccccaatcctcagtag

SEQ ID NO: 4238 - protein, 606 aa, Arabidopsis thaliana
MDTKIGSIDDCKPTNGDVCSPTNGTVATIHNSVPSSAITINYCDATLGRHLARRLVQAGVTDVFSVPGDFNLTLLDHLMAEPDLNLIGCCNELNAGYAADGYARSRGVGACVVTFTVGGLSVLNAIAGAYSENLPLICIVGGPNSNDYGTNRILHHTIGLPDFSQELRCFQTVTCYQAVVNNLDDAHEQIDKAISTALKESKPVYISVSCNLAAIPHHTYSRDPVPFSLAPRLSNKMGLEAAVEATLEFLNKAVKQVMVGGPKLRVAKACDAFVELADASGYALAMMPSAKGFVPEHHPHFIGTYWGAVSTPFCSEIVESADAYIFAGPIFNDYSSVGYSLLLKKEKAIVVQPDRITVANGPTFGCILMSDFFRELSKRVKRNETAYENYHRIFVPEGKPLKCESREPLRVNTMFQHIQKMLSSETAVIAAETGDSWFNCQKLKLPKRYEFQMQYGSIGWSVGATLGYAQASPEKRVLAFIGDGSFQVTVQDISTMLRNGQKTIIFLINNGGYTIEVEIHDGPYNVIKNWNYTGLVDAIHNGEGNCWTAKVRYEEELVEAITTATTEKKDCLCFIEVILHKGETSKELLEWGHASLLLTAVLPNPQ

SEQ ID NO: 4239 - DNA, 1824 bp, Arabidopsis thaliana
  CDS (1)..(1824)
atggacactaagatcggatctatcgacgcgtgtaacccgaccaaccacgatatcggcggtcctccaaacggcggagtctccaccgttcaaaacacaagtccacttcactccaccaccgtcagcccctgcgacgcgactcttggccgttacctagcaagacggttagtcgaaatcggcgtcaccgatgtcttctccgttcctggtgatttcaacctgacgcttctcgatcacctaatcgccgaaccaaacctcaagctgatcggttgctgcaacgagcttaacgccggatacgctgctgacggttacgctagatctcgcggtgttggtgcgtgcgtcgttacgttcaccgtcggtggattgagtgttctgaatgcgatcgccggtgcttacagtgagaatctgcccctgatttgcatcgtcggtggtccaaactccaacgattacggtaccaataggattcttcatcatacaattggtttacctgatttcactcaagagcttaggtgttttcaagctgttacttgttttcaagctgtgattaataacttagaagaggctcatgaacttatcgatactgcgatttcaactgctttgaaagaaagcaaacctgtttatatcagtatcagctgtaatttaccggcgattcctcttccgacgtttagtcgtcatcctgttccgttcatgcttccgatgaaggttagcaatcagattggtttagatgcggcggtggaggcagctgctgagttcttgaacaaagctgtgaagccagttcttgttggtgggccgaaaatgcgggttgcgaaagccgcggatgcttttgttgagcttgctgatgcttctggctatggtcttgctgtgatgccttctgctaaaggacaagtacctgagcatcacaagcattttatagggacgtattggggagctgtgagtacagctttttgtgctgaaatcgttgaatctgcggatgcttatctgtttgcaggtccgattttcaacgattacagttctgttgggtattctctgcttctcaagaaggagaaggcaatcatcgttcagcctgatcgggttactatcggtaacggacctgcgtttggatgtgtttttatgaaggattttctaagcgagttggctaaacgaattaagcacaacaacacttcttatgagaattatcacaggatctatgtcccagaaggaaagcctttgagagataacccgaatgagtctttgagggttaatgtactgttccaacacattcagaatatgctctcttctgagtctgctgtgcttgctgagacaggagattcctggttcaactgtcagaagctgaagctccctgaaggatgcggttacgaattccaaatgcagtacggatcaattggctggtcagtgggtgctactctaggctatgctcaagccatgccaaacaggcgtgtcattgcttgtattggagatggtagtttccaggtaaccgcacaggatgtatctccgatgatacggtgtgggcacaagaccataatcttcctcatcaacaacggaggctacaccattgaggtggaaattcacgatggtccttacaatgtcataaagaactggaactacacagcttttgttgaggccatacacaatggagaaggaaaatgctggactcccaaggtgagatgcgaggaggagttagtgaaagcaatcaacacggcaaccaatgaggaaaaagagagcttttgtttcattgaagtgatagtgcacaaagacgatacaagcaaggaacttttggagtggggctctagagtctctgctgctaatagtcgtcccccaaatccgcagtag

SEQ ID NO: 4240 - protein, 607 aa, Arabidopsis thaliana
MDTKIGSIDACNPTNHDIGGPPNGGVSTVQNTSPLHSTTVSPCDATLGRYLARRLVEIGVTDVFSVPGDFNLTLLDHLIAEPNLKLIGCCNELNAGYAADGYARSRGVGACVVTFTVGGLSVLNAIAGAYSENLPLICIVGGPNSNDYGTNRILHHTIGLPDFTQELRCFQAVTCFQAVINNLEEAHELIDTAISTALKESKPVYISISCNLPAIPLPTFSRHPVPFMLPMKVSNQIGLDAAVEAAAEFLNKAVKPVLVGGPKMRVAKAADAFVELADASGYGLAVMPSAKGQVPEHHKHFIGTYWGAVSTAFCAEIVESADAYLFAGPIFNDYSSVGYSLLLKKEKAIIVQPDRVTIGNGPAFGCVFMKDFLSELAKRIKHNNTSYENYHRIYVPEGKPLRDNPNESLRVNVLFQHIQNMLSSESAVLAETGDSWFNCQKLKLPEGCGYEFQMQYGSIGWSVGATLGYAQAMPNRRVIACIGDGSFQVTAQDVSPMIRCGHKTIIFLINNGGYTIEVEIHDGPYNVIKNWNYTAFVEAIHNGEGKCWTPKVRCEEELVKAINTATNEEKESFCFIEVIVHKDDTSKELLEWGSRVSAANSRPPNPQ

SEQ ID NO: 4241 - DNA, 1818 bp, Fragaria ananassa
  CDS (1)..(1818)
atggacaccaagattggctccatcgacgtctgcaaaaccgagaaccacgacgtcggttgtttaccaaacagcgccacctccaccgttcaaaactcagtcccttccacctccctcagctccgccgacgccaccctcggccgccacctggcacgccgcctcgttcaaatcggcgtcaccgacgtcttcaccgtccccggcgacttcaacttgacccttcttgaccacctcatcgccgagcccggcctcaccaacattggctgctgcaacgagctcaacgccgggtacgccgccgacggctacgcgcggtcgcgtggcgtcggcgcgtgcgtggtgactttcactgttggtggactgagtgtgctgaacgcgatcgccggcgcgtatagtgagaatttgccggtgatttgtattgttggtgggcccaactctaacgattatgggactaaccggattcttcaccatactattgggttgccggacttcagtcaagagctccggtgctttcagaccgtgacttgctttcaggctgtggtgaataatctggaggatgcacatgagatgattgatactgcaatttcgactgcgttgaaagaaagcaagcctgtgtatatcagcattggctgcaacttggctgggattcctcatcctactttcagccgtgaacctgttccattttcattgtctccaaaattgagcaataagtggggattagaggctgcagtggaggctgctgcagagttcttgaacaaggcagtgaagccagttatggtgggcgggcccaaactgcgctctgcacatgctggtgatgcctttgttgaactggctgatgcttctggatttgctctggctgtgatgccatcagcaaaggggcaagtgccagagcaccacccccatttcatcggaacgtactggggtgctgtgagcactgccttttgtgctgagattgtggagtctgcagatgcatacttgtttgctgggccgattttcaatgactacagctcagttgggtactcgctccttctcaagaaagagaaggcgatcattgtgcagccagatcgtgtgacgatagggaatggccctacatttggttgtgttctcatgaaggatttcctcttaggcctagcaaagaagctgaagcataacaacactgctcatgagaactaccgcaggatctttgtgcctgatggccaccctctgaaggctgcacccaaagaacctttgagggttaatgttctgttcaaacacattcagaatatgctgtcagctgaaaccgctgtgattgctgagacaggggactcatggtttaactgtcagaagctgaaattgccacccggctgcgggtatgagttccaaatgcaatatggatcaattggttggtcagttggagcaactcttgggtatgctcaggctgtacctgagaagcgagtgatttctttcattggtgatgggagcttccaggtgactgctcaagatgtgtccacaatgattcgaaatggacagagaaccattattttcctgataaacaatggtggatacaccattgaagtggaaatccatgatggaccatacaatgtgatcaagaactggaactacactggactggttgatgcaatccacaatggggaaggcaagtgctggacaaccaaggtgcgttgcgaagaggagctgattgaagcaatagagactgcaaatggacccaagaaggatagcttctgcttcattgaggtgattgttcacaaggatgataccagcaaagagttgcttgagtgggggtctagggtttctgctgccaacagccgcccacctaatcctcagtaa

SEQ ID NO: 4242 - protein, 605 aa, Fragaria ananassa
MDTKIGSIDVCKTENHDVGCLPNSATSTVQNSVPSTSLSSADATLGRHLARRLVQIGVTDVFTVPGDFNLTLLDHLIAEPGLTNIGCCNELNAGYAADGYARSRGVGACVVTFTVGGLSVLNAIAGAYSENLPVICIVGGPNSNDYGTNRILHHTIGLPDFSQELRCFQTVTCFQAVVNNLEDAHEMIDTAISTALKESKPVYISIGCNLAGIPHPTFSREPVPFSLSPKLSNKWGLEAAVEAAAEFLNKAVKPVMVGGPKLRSAHAGDAFVELADASGFALAVMPSAKGQVPEHHPHFIGTYWGAVSTAFCAEIVESADAYLFAGPIFNDYSSVGYSLLLKKEKAIIVQPDRVTIGNGPTFGCVLMKDFLLGLAKKLKHNNTAHENYRRIFVPDGHPLKAAPKEPLRVNVLFKHIQNMLSAETAVIAETGDSWFNCQKLKLPPGCGYEFQMQYGSIGWSVGATLGYAQAVPEKRVISFIGDGSFQVTAQDVSTMIRNGQRTIIFLINNGGYTIEVEIHDGPYNVIKNWNYTGLVDAIHNGEGKCWTTKVRCEEELIEAIETANGPKKDSFCFIEVIVHKDDTSKELLEWGSRVSAANSRPPNPQ

SEQ ID NO: 4243 - DNA, 1695 bp, Saccharomyces kluyveri
  CDS (1)..(1695)
atgtccgaaattactctaggtctctacttgtttgaaagactgaaccaagtcgatgttaaaaccattttcggtttgccaggtgactttaacttgtccttgttggacaagatctacgaagtcccaggtatgagatgggctggtaacgctaacgaattgaacgctgcttacgctgctgacggttacgctagagttaagggtatgtcctgtgtcatcaccaccttcggtgtcggtgaattgtctgccttgaacggtattgccggttcttacgctgaacacgttggtgttttgcacgttgtcggtgttccatccgtctcttcccaagctaagcaattgttgttgcatcacaccttccctaacggtgacttcaccgtcttccacagaatgtctgccaacatctctgaaaccaccgcttgggttaccgacattgccactgccccagctgaaattgacagatgcatcagaaccacctacgtcacccaaagaccagtctacttgggtttgccagccaccttggttgacttgatggtcccagcttctttgttggacaccccaattgacatgtctctaaagccaaacgacccagaagccgaagctgaagttgtcaacagcgtcttggaattgatcaaggaagctaagaacccaattatcttggccgatgcctgtgcttccagacacgacgtcaagcctgaaaccaagcaattgatcgacatcacccaattcccagccttcgttaccccattgggtaagggttccatcgacgaacaacacccaagattcggtggtgtttacgtcggtacctttgctaacgacgacgtcaaggaagccgttgaatctgctgacttgattctatctgtcggtgctttgttgtccgacttcaacaccggttctttctcttactcttacaagaccaagaacattgttgaattccactctgactacatcaagatcagaaacgctaccttcccaggtgtccaaatgaaattcgctttgcaaaagttgttgtctgaaatcggtgcagtcgttaaggactacaagccagttgctgttccaccaaagccaactccaaacccagcttgtgacccatccaccccattgaagcaagaatgggtctggaaccaagtcggtagattcttgcaagaaggtgacgttgtcatcactgaaaccggtacctccgctttcggtatcaaccaaactcatttcccaaacaacacttacggtatctcccaagtcttatggggttctatcggtttcaccaccggtgcttgtttgggtgctcgttgcgctgctgaagaacttgacaagaacaagagagtcatcctattcattggtgacggttctttgcaattgactgttcaagaaatctccaccatgatcagatggggtctaagaccatacttgttcgtcttgaacaacgacggttacaccattgaaagattgattcacggtgaaaacgctcaatacaacgaaattcaaccatggaagaacttggacctattgccaaccttcggtgctaaggactacgaaacccacagagtcgccactaccggtgaatgggacaagttggcccaagacgaggccttcaacaagaactccagaatcagaatggttgaagttatgttgcctgttatggatgctccatctaacttggtcaagcaagcccaattgactgctagcatcaacgctaagcaagattaa

SEQ ID NO: 4244 - protein, 564 aa, Saccharomyces kluyveri
MSEITLGLYLFERLNQVDVKTIFGLPGDFNLSLLDKIYEVPGMRWAGNANELNAAYAADGYARVKGMSCVITTFGVGELSALNGIAGSYAEHVGVLHVVGVPSVSSQAKQLLLHHTFPNGDFTVFHRMSANISETTAWVTDIATAPAEIDRCIRTTYVTQRPVYLGLPATLVDLMVPASLLDTPIDMSLKPNDPEAEAEVVNSVLELIKEAKNPIILADACASRHDVKPETKQLIDITQFPAFVTPLGKGSIDEQHPRFGGVYVGTFANDDVKEAVESADLILSVGALLSDFNTGSFSYSYKTKNIVEFHSDYIKIRNATFPGVQMKFALQKLLSEIGAVVKDYKPVAVPPKPTPNPACDPSTPLKQEWVWNQVGRFLQEGDVVITETGTSAFGINQTHFPNNTYGISQVLWGSIGFTTGACLGARCAAEELDKNKRVILFIGDGSLQLTVQEISTMIRWGLRPYLFVLNNDGYTIERLIHGENAQYNEIQPWKNLDLLPTFGAKDYETHRVATTGEWDKLAQDEAFNKNSRIRMVEVMLPVMDAPSNLVKQAQLTASINAKQD

SEQ ID NO: 4245 - DNA, 1692 bp, Zygosaccharomyces bisporus
  CDS (1)..(1692)
  misc_feature (674)..(674): n is a, g, c or t
atgtctgaaattactctaggccgctatttattcgagagattgagacaggttgacaccaacaccatcttcggtgtgccaggtgacttcaacttgtcactattggacaagatctacgaggtgcagggtctaagatgggctggtaatgctaatgagttgaacgccgcttacgctgctgacggttacgccagagttaagggtatggctgctttagtcaccaccttcggtgttggtgaattgtccgccttgaacggtattgctggttcctatgcggagcacgttggtgttttgcacattgagggtgtcccatccatctcttctcaagctaagcaattgctgcttcaccacactttaggtaacggtgatttcaccgttttccacaggatgtctgccaacatctctgagaccactgcttggttgactgacataaccactgctccagccgagatcgaccgctgcatcagagtgacctacctcactcaaagacctgtgtacttgggtctaccagctaacttgactgaccaaaaggtgcccgcttctctattgaacactccaattgacttatccttgaaggagaatgacccagaagctgaagctgaggttgtggaaactgttttggagttgatcaaggaagccaagaaccctatcatcttggccgatgcctgctgttcaagacncgacgtcaaggctgagacaaagaagttgatcgacatcactcaattcccatcttttgttactcctatgggtaagggctccatcgacgagcagaacccaagattcggtggtgtctacgtcggtactttgtcctctccagctgtcaagaaggctgttgagtctgctgacttggtcttgtctgtcggtgctctattgtctgacttcaacaccggttctttctcttactcttacaagaccaagaacgttgttgagttccactctgaccacatcaagatcagaaacgctactttcccaggtgtccagatgaaattcgtcttggaggaccttttgaagaaggtgccagctgctgtcaagggttacaacccaggcccagtcccacctgctccatctccaaatgccgaggttgccgcttctaccccattgaagcaggaatggctatggagacaagttggtaagttcctacaggagggtgacattgtcatcaccgaaaccggtacctctgccttcggtattaaccagagtcacttccctaaccgcacctacggtatttcccaggtcttgtggggttcgattggttacaccactggttctactctaggtgccgctttcgccgctgaagagatcgaccctaagaagagagttgttctattcattggtgacggttctttgcaattgaccgtccaggaaatctccaccatggtgagatggggtctaaagccatacttgtttgtcttgaacaacgacggttacaccatcgagagattgattcacggtgagaaggctcagtacaacgacatccagccatggaagaacttggagctattgcacgccttcggtgccactgactacgagacccacagagtcgccactgtcggtgactgggacaagctaaccactgactctaagttcaacgagaactccagaatcagaatgattgaggttatgctagagaccatggatgctccatcttctttggttgctcaggcacagttgactgctgccatcaacgccaagcagtaa

SEQ ID NO: 4246 - protein, 563 aa, Zygosaccharomyces bisporus
  misc_feature (225)..(225): The Xaa at location 225 stands for Arg, His, Leu, or Pro.
MSEITLGRYLFERLRQVDTNTIFGVPGDFNLSLLDKIYEVQGLRWAGNANELNAAYAADGYARVKGMAALVTTFGVGELSALNGIAGSYAEHVGVLHIEGVPSISSQAKQLLLHHTLGNGDFTVFHRMSANISETTAWLTDITTAPAEIDRCIRVTYLTQRPVYLGLPANLTDQKVPASLLNTPIDLSLKENDPEAEAEVVETVLELIKEAKNPIILADACCSRXDVKAETKKLIDITQFPSFVTPMGKGSIDEQNPRFGGVYVGTLSSPAVKKAVESADLVLSVGALLSDFNTGSFSYSYKTKNVVEFHSDHIKIRNATFPGVQMKFVLEDLLKKVPAAVKGYNPGPVPPAPSPNAEVAASTPLKQEWLWRQVGKFLQEGDIVITETGTSAFGINQSHFPNRTYGISQVLWGSIGYTTGSTLGAAFAAEEIDPKKRVVLFIGDGSLQLTVQEISTMVRWGLKPYLFVLNNDGYTIERLIHGEKAQYNDIQPWKNLELLHAFGATDYETHRVATVGDWDKLTTDSKFNENSRIRMIEVMLETMDAPSSLVAQAQLTAAINAKQ

SEQ ID NO: 4247 - DNA, 1683 bp, Mycobacterium bovis
  CDS (1)..(1683): transl_table=11
gtgacaccccagaagagcgatgcctgcagcgatcccgtctacaccgtcggcgactacctactcgaccggctcgccgaactcggcgtctctgagatcttcggcgttcccggcgactacaacctgcaattcctcgaccacatcgtggcccacccgaccatccggtgggtgggcagcgccaacgaactgaatgccgggtatgccgccgacgggtacgggcggctgcgtgggatgtcagcggtggtaacgacattcggggtcggcgagctctcggtgaccaatgcgatcgcgggcagttacgccgagcatgtgccagtggtgcacattgttggcggcccgaccaaagacgcccagggcactcgccgggcattgcatcattccctcggcgacggcgacttcgagcactttctccggatcagccgtgaaatcacctgtgcccaagccaatctcatgccggcaacggccggtagagaaatagatcgggtgctgtccgaggtacgggagcagaagcgtccaggatatatattgctgtccagcgacgtagcacgcttccccactgaaccgcccgctgcgccgttgccccgctaccccggcggcaccagcccgcgcgcgctgtcgctgttcaccaaggccgccatcgaactcattgccgaccaccagttgacggtgctcgccgatctgttggttcatcgcctgcaggccgtcaaagaactcgaggcgctgttggccgccgacgtggtgccgcacgccacgttgatgtgggggaagagcctgctcgacgagagctcgccgaacttcctgggaatctacgccggcgcggccagcgccgaacgggtgcgcgccgcgatcgaaggggcgccggtgctggtgaccgccggagtggtgttcaccgacatggtcagcggcttcttcagccagcggatcgacccggcccggaccatcgacatcgggcaataccagagcagcgtggccgaccaggtgttcgcaccactggaaatgagtgccgcgctgcaggcgctggccaccatcctgaccgggcgcggaatcagttcgccgccggtggtaccgccgcccgccgaaccgccgccggcgatgccggcgcgcgatgagccgctcacccagcagatggtgtgggaccgggtttgctcagcgctcacacccggaaacgtggtgctcgccgaccaggggacgtcgttctacggcatggcggaccaccggttgccgcaaggagtgacctttatcggccaacccttgtggggctcaatcggttacacgctgcccgcggcagtcggggccgcggttgcgcatccggaccgccgtacggtgctgttgatcggcgacggggccgcacaattgaccgtgcaggaactcggcacgttctcccgcgaagggctgtccccggtcatcgtggtggtcaacaacgatggttacacggtcgaacgggccatccacggcgagacggccccgtacaacgacatcgtgagctggaattggaccgagcttcccagcgcgctgggtgtgaccaatcacctcgcgttccgtgcccaaacctatggccaactcgacgacgccctcaccgtcgccgcggcacggcgggaccggatggtgctcgtcgaggtggtgttgccgcggctcgagatcccccgcctgcttggccaactcgtgggatccatggcgccgcagtga

SEQ ID NO: 4248 - protein, 560 aa, Mycobacterium bovis
MTPQKSDACSDPVYTVGDYLLDRLAELGVSEIFGVPGDYNLQFLDHIVAHPTIRWVGSANELNAGYAADGYGRLRGMSAVVTTFGVGELSVTNAIAGSYAEHVPVVHIVGGPTKDAQGTRRALHHSLGDGDFEHFLRISREITCAQANLMPATAGREIDRVLSEVREQKRPGYILLSSDVARFPTEPPAAPLPRYPGGTSPRALSLFTKAAIELIADHQLTVLADLLVHRLQAVKELEALLAADVVPHATLMWGKSLLDESSPNFLGIYAGAASAERVRAAIEGAPVLVTAGVVFTDMVSGFFSQRIDPARTIDIGQYQSSVADQVFAPLEMSAALQALATILTGRGISSPPVVPPPAEPPPAMPARDEPLTQQMVWDRVCSALTPGNVVLADQGTSFYGMADHRLPQGVTFIGQPLWGSIGYTLPAAVGAAVAHPDRRTVLLIGDGAAQLTVQELGTFSREGLSPVIVVVNNDGYTVERAIHGETAPYNDIVSWNWTELPSALGVTNHLAFRAQTYGQLDDALTVAAARRDRMVLVEVVLPRLEIPRLLGQLVGSMAPQ

SEQ ID NO: 4249 - DNA, 1710 bp, Mycobacterium leprae
  CDS (1)..(1710): transl_table=11
gtgaccgcccccaagattgaagccgtctataccgtcggcgcctacctgcttgaccgcctcgctgaactcggtgtcacagagatcttcggcgtacccggcgattacaccctggaatttctcgaccatatcgttgcccatccgaccatcagatgggtgggcaacgcaaacgaactgaacgccggatacgctgcagatgggtatggacgtttacgcggaatatccgctttagtgacgacattcggagttggcgaactctcggcagccaacgcgatagcgggtagctacgctgagcatgtgcccgtcgttcacattgtcggcgccccccctaaagacgcgcaaagcacccaccgagcgctacaccactcgctaggcgatggggacttcgagcacttcatccggattagcagcgaaataacttgctcccaagctaatctcacaacagctacagcatgcaaggagattgatcgggtactcagcgaagtgcggaagcacaaacgtcccggatacatactactgtccaccgacgtagctcgcttccctaccgaaccacccgccgccccattgccgggccataccgacggcaccagcccgcgtgcgctgtcgctgttcatcgatgccgccaccaaactcattgccgataagcggatgacggtgctggcggacttgctggtccatcggttgcaagtggtcaaagagctcgagacgttgctgacggccgacgtggtgccgtacgccacgttaatgtggggcaaaagtctgctcgacgagagctcacctaacttcctggggatctatgccggggctgctagcaccgaagcggtccgcgcggcgattgagcaggcacctgtgctggtgaccgccggggtggtttttaccgacatggtcagtggtttcttcagccagcggatcgacccagcccggaccatcgacgtcgggcagtaccagagcagtgtggccgataaggtcttcactccactggaaatgggtgacgcgcttgaggcattagcgtcaatcctggtgcgccgcggtgtcagctcgccaccagtggaattacctcctggcaacccaactgcggacacaccatcacccactcaacggctgacccaacagatcttgtgggacaggctctgtgcagcgctcacaccgggaaacgtggtactagccgatcagggaaccgcgttctatggcatggtggaacaccggttgccgcgaggagtgactttcatcggtcaacccctttggggttcaatcggttacacgctgcctgcagcactcggtgcggggttagcgcatcgcaaccgcaggacggtgttgctgctcggcgacggcgccgcgcaactgacgatccaggagctcggctccttctaccgcgaggggttgtcaccggtcattgtggtagtcaacaacgacggctatacaatcgaacgggcgatacatggagcaacagctccctacaataacattgccagatggcgttggaccgacatccccggtgcgctgggggtagccaatcattcgtccttccgtgcagaaacctacggtgagctcgacgaggccttcgccgtcgccgccgagcttaaggatcagatggttttcgtcgaagtcatcgtgcctaaactagatcttccaagcctattgactgcattgacccggccagcgcaggacagcaatcggatttttcagttgcccaacccaggatgggacaactga

SEQ ID NO: 4250 - protein, 569 aa, Mycobacterium leprae
MTAPKIEAVYTVGAYLLDRLAELGVTEIFGVPGDYTLEFLDHIVAHPTIRWVGNANELNAGYAADGYGRLRGISALVTTFGVGELSAANAIAGSYAEHVPVVHIVGAPPKDAQSTHRALHHSLGDGDFEHFIRISSEITCSQANLTTATACKEIDRVLSEVRKHKRPGYILLSTDVARFPTEPPAAPLPGHTDGTSPRALSLFIDAATKLIADKRMTVLADLLVHRLQVVKELETLLTADVVPYATLMWGKSLLDESSPNFLGIYAGAASTEAVRAAIEQAPVLVTAGVVFTDMVSGFFSQRIDPARTIDVGQYQSSVADKVFTPLEMGDALEALASILVRRGVSSPPVELPPGNPTADTPSPTQRLTQQILWDRLCAALTPGNVVLADQGTAFYGMVEHRLPRGVTFIGQPLWGSIGYTLPAALGAGLAHRNRRTVLLLGDGAAQLTIQELGSFYREGLSPVIVVVNNDGYTIERAIHGATAPYNNIARWRWTDIPGALGVANHSSFRAETYGELDEAFAVAAELKDQMVFVEVIVPKLDLPSLLTALTRPAQDSNRIFQLPNPGWDN

SEQ ID NO: 4251 - DNA, 1692 bp, Mycobacterium paratuberculosis
  CDS (1)..(1692): transl_table=11
gtgcctgtgactgatgctgcgaccgaacccgcatacaccgtcggtgactacctgttggaccgcctcgccgaactcggcgtctcggagatcttcggcgtcccgggtgattacaacctcgagttcctcgaccacatcgtcgcccaccccaggctgcgctgggtcggcaacgccaacgagctcaacgccggctacgccgcagacggatacggccggctgcgcggaatgtcggcgctggtaacgacattcggggtcggcgagctgtctgcggccaacgcggtggcgggcagttacgccgagcaggtgccggtggtgcacatcgtcggcggcccgtcgaaagacgcgcagggcaccagacgcgcgctgcaccattcgctgggcgacggggacttcgagcacttcttccgggtcagccgcgaaatcacttgcgctcaagcaaatctcatgcccgcgacggcgcgccgagagatcgaccgggtgctgtcggaggtgcgcgagcagaagcgacccggctacatcctgctgtccaccgacgtggcccgcttccccaccgagccacccgaggctgcgctgccccgctacaccggcggcaccagcccccgcgcgctggcgatgttcaccgaggccgccgcggcactgatcggcgagcaccggatcaccgtgctggccgacctgctggtgcaccgactgcaggcgatcaaggagctcgaggcgctgctggcggccgacgtggtgccgcacgccacgctgatgtggggcaagagtctgctcgatgagagctcaccgaacttcctgggcatctacgcgggctcggccagcgcgccggcggtgcgcaccgcgatcgaagaggcacccgtattggtcaccgccggggtggtgttcaccgacatggtcagcggcttcttcagccagcggatcgacccggcccggaccatcgacgtcggccagtaccaaagcagtgtggccggagaggtgttcgcgccgttggagatgggcgaagcgcttcaggcgctgaccgcgatcctcacacggcgcggggtctcctcgccgccggtggcctcgccgccggccgagccgctgccgccgcccccaccccgcgagcaaccgctgacccagaagatggtgtgggaccgggtatgcacggccctcacaccgggcaacgtggtgctggccgaccagggcacctccttctacggcatggcagaccaccggttgccgcagggagtcaccttcatcggccaaccgctttggggctcaatcggttacacgctgcccgccgcgctcggcgccgcggtggcgcacccggaccgccggacggtgctgctgatcggggacggcgccgcgcagctgaccgtccaagagctcggcacctttgcccgcgaagggctttcccccgtcatcgtggtggtcaacaacgacggctacaccgtcgagcgggcgatccacggcgagacggcgccctacaacgacatcgtcgggtggaagtggacggaggtccccaacgcgttgggcgtcaccgaacacctggcgttccgggtgcagacctacggcgaactcgatgacgcgttgaccgccgccgcgcggcaccaagaccggatggtgctggtcgaggtggtgctgccgcggctcgagatcccgcggctgctggtcgaactcgtgcgaccgacctcaccggacggcagcccgcgccgctag

SEQ ID NO: 4252 - protein, 563 aa, Mycobacterium paratuberculosis
MPVTDAATEPAYTVGDYLLDRLAELGVSEIFGVPGDYNLEFLDHIVAHPRLRWVGNANELNAGYAADGYGRLRGMSALVTTFGVGELSAANAVAGSYAEQVPVVHIVGGPSKDAQGTRRALHHSLGDGDFEHFFRVSREITCAQANLMPATARREIDRVLSEVREQKRPGYILLSTDVARFPTEPPEAALPRYTGGTSPRALAMFTEAAAALIGEHRITVLADLLVHRLQAIKELEALLAADVVPHATLMWGKSLLDESSPNFLGIYAGSASAPAVRTAIEEAPVLVTAGVVFTDMVSGFFSQRIDPARTIDVGQYQSSVAGEVFAPLEMGEALQALTAILTRRGVSSPPVASPPAEPLPPPPPREQPLTQKMVWDRVCTALTPGNVVLADQGTSFYGMADHRLPQGVTFIGQPLWGSIGYTLPAALGAAVAHPDRRTVLLIGDGAAQLTVQELGTFAREGLSPVIVVVNNDGYTVERAIHGETAPYNDIVGWKWTEVPNALGVTEHLAFRVQTYGELDDALTAAARHQDRMVLVEVVLPRLEIPRLLVELVRPTSPDGSPRR

SEQ ID NO: 4253 - DNA, 1668 bp, Mycobacterium smegmatis
  CDS (1)..(1668): transl_table=11
atgaccgatgacggctacacagtcggtgactacctcctggaccggctcgccgaactcggcgtgaccgaggtcttcggcgtccccggcgactatcagctggagttcctcgaccacgtcgtggcgcacccgcgcatcacgtgggtcggcggcgcgaacgaactcaacgcgggctacgcggccgacggctacggccggctgcggggcatggcggcgttggtcaccacgttcggcgtcggtgagctctcggcggccaacgccatcgcaggcagctacgccgagcacgtcccggtggtgcacatcgtcggcgcgccgtcgaaggattcgcaggccgcgcggcgcatcgtgcaccacacgctgggtgacggcgatttcgagcacttcctgcgcatgagccgcgagatcacctgcgcgcaggccaatctggtgcccgccacggcgacccgcgagatcgaccgcgtgctctcggaggtgcacgagcagaagcggcccggctatctgctgatcgcgaccgacgtcgcccgcttccccaccgaaccaccgaccgccccgctgccgcgccacagcgggggcaccagcccacgggcgctgtcgctgttcaccgaggccgcaacgcaactcatcggcgagcaccggttgaccgtgctggccgatttcctggtgcaccgcatgggatgcgtcgaggcgctcaacaagctgctgaccgccgacaccgtgccgcacgccacgctgatgtggggcaagagcctggtcgacgagagttcgccgaacttcctgggcatctacgccggtgcggccagtgagggctcggtgcgcgaggtgatcgaggacgcgcctgtgctggtgaccgcaggtgtgctgttcaccgacatggtcagcgggttcttcagccagcgcatcgacccggcacgcacgatcgacatcggggtcaaccagagcgtcgtcgccgggcaggtgttcgcgccgctggacatggctgccgcgctcgacgcgctcgcgtcgatcctcgccgaacgcggcatcgagtcgcccgcactgccgccggcccccgcaccgcagcggcccgcagcgccgccgcgtgacgcggtgcttacacaggaagcgttgtgggacaggctcgccgaggcgttgacgccgggcaacgtggtgctcgccgaccagggcacgtctttctacggcctggccgggcaccggctggcgtcgggcgtgacattcatcggtcagccgttgtgggcgtcgatcggctacacactgcccgccgcgctcggcgcgggtctggccgaccgcgaccggcgcacggtgctgctgatcggcgacggcgcagcgcagttgacggtgcaggaactcggcgcgttcggccgcgaggggctcacgcccgtggtggtggtcgtcaacaacaacggctacaccgtggagcgcgcgatccacggtgtcacggcccgctacaacgacatcacggcgtggcggtggaccgagttgccggccgcactcggtgtgcccgatgcgctgacgttccgctgcgccacctacggcgaactcgacgacgcgctgaccgtcgccgccgagacgcaggaccgcatggtgttcgtcgaggtgatgcttgagcgcatggacattccgccgctgctgggcgagctcgcacagtcggcgtcggccgccaacgccaaatag

SEQ ID NO: 4254 - protein, 555 aa, Mycobacterium smegmatis
MTDDGYTVGDYLLDRLAELGVTEVFGVPGDYQLEFLDHVVAHPRITWVGGANELNAGYAADGYGRLRGMAALVTTFGVGELSAANAIAGSYAEHVPVVHIVGAPSKDSQAARRIVHHTLGDGDFEHFLRMSREITCAQANLVPATATREIDRVLSEVHEQKRPGYLLIATDVARFPTEPPTAPLPRHSGGTSPRALSLFTEAATQLIGEHRLTVLADFLVHRMGCVEALNKLLTADTVPHATLMWGKSLVDESSPNFLGIYAGAASEGSVREVIEDAPVLVTAGVLFTDMVSGFFSQRIDPARTIDIGVNQSVVAGQVFAPLDMAAALDALASILAERGIESPALPPAPAPQRPAAPPRDAVLTQEALWDRLAEALTPGNVVLADQGTSFYGLAGHRLASGVTFIGQPLWASIGYTLPAALGAGLADRDRRTVLLIGDGAAQLTVQELGAFGREGLTPVVVVVNNNGYTVERAIHGVTARYNDITAWRWTELPAALGVPDALTFRCATYGELDDALTVAAETQDRMVFVEVMLERMDIPPLLGELAQSASAANAK

SEQ ID NO: 4255 - DNA, 1695 bp, Candida glabrata
  CDS (1)..(1695)
atgtctgagattactttgggtagatacttgttcgagagattgaaccaagtcgacgttaagaccatcttcggtttgccaggtgacttcaacttgtccctattggacaagatctacgaagttgaaggtatgagatgggctggtaacgctaacgaattgaacgctgcttacgctgctgacggttacgctagaatcaagggtatgtcctgtatcatcaccaccttcggtgtcggtgaattgtctgccttgaacggtattgccggttcttacgctgaacacgtcggtgtcttgcacgtcgtcggtgtcccatccatctcctctcaagctaagcaattgttgttgcaccacaccttgggtaacggtgacttcactgtcttccacagaatgtccgctaacatctctgagaccaccgctatggtcactgacatcgctaccgctccagctgagatcgacagatgtatcagaaccacctacatcacccaaagaccagtctacttgggtctaccagctaacttggtcgacctaaaggtcccagccaagcttttggaaaccccaattgacttgtccttgaagccaaacgacccagaagccgaaactgaagtcgttgacaccgtcttggaattgatcaaggctgctaagaacccagttatcttggctgatgcttgtgcttccagacacgacgtcaaggctgaaaccaagaagttgattgacgccactcaattcccatccttcgttaccccaatgggtaagggttccatcgacgaacaacacccaagattcggtggtgtctacgtcggtaccttgtccagaccagaagttaaggaagctgttgaatccgctgacttgatcttgtctgtcggtgctttgttgtccgatttcaacactggttctttctcttactcttacaagaccaagaacatcgtcgaattccactctgactacatcaagatcagaaacgctaccttcccaggtgtccaaatgaagttcgctttgcaaaagttgttgaacgccgtcccagaagctatcaagggttacaagccagtccctgtcccagctagagtcccagaaaacaagtcctgtgacccagctaccccattgaagcaagaatggatgtggaaccaagtttccaagttcttgcaagaaggtgatgttgttatcactgaaaccggtacctccgcttttggtatcaaccaaaccccattcccaaacaacgcttacggtatctcccaagttctatggggttccatcggtttcaccaccggtgcttgtttgggtgccgctttcgctgctgaagaaatcgacccaaagaagagagttatcttgttcattggtgacggttctttgcaattgactgtccaagaaatctccaccatgatcagatggggcttgaagccatacttgttcgtcttgaacaacgacggttacaccatcgaaagattgattcacggtgaaaaggctggttacaacgacatccaaaactgggaccacttggctctattgccaaccttcggtgctaaggactacgaaaaccacagagtcgccaccaccggtgaatgggacaagttgacccaagacaaggaattcaacaagaactccaagatcagaatgatcgaagttatgttgccagttatggacgctccaacttccttgattgaacaagctaagttgaccgcttccatcaacgctaagcaagaataa

SEQ ID NO: 4256 - protein, 564 aa, Candida glabrata
MSEITLGRYLFERLNQVDVKTIFGLPGDFNLSLLDKIYEVEGMRWAGNANELNAAYAADGYARIKGMSCIITTFGVGELSALNGIAGSYAEHVGVLHVVGVPSISSQAKQLLLHHTLGNGDFTVFHRMSANISETTAMVTDIATAPAEIDRCIRTTYITQRPVYLGLPANLVDLKVPAKLLETPIDLSLKPNDPEAETEVVDTVLELIKAAKNPVILADACASRHDVKAETKKLIDATQFPSFVTPMGKGSIDEQHPRFGGVYVGTLSRPEVKEAVESADLILSVGALLSDFNTGSFSYSYKTKNIVEFHSDYIKIRNATFPGVQMKFALQKLLNAVPEAIKGYKPVPVPARVPENKSCDPATPLKQEWMWNQVSKFLQEGDVVITETGTSAFGINQTPFPNNAYGISQVLWGSIGFTTGACLGAAFAAEEIDPKKRVILFIGDGSLQLTVQEISTMIRWGLKPYLFVLNNDGYTIERLIHGEKAGYNDIQNWDHLALLPTFGAKDYENHRVATTGEWDKLTQDKEFNKNSKIRMIEVMLPVMDAPTSLIEQAKLTASINAKQE

SEQ ID NO: 4257 - DNA, 1692 bp, Kluyveromyces lactis
  CDS (1)..(1692)
atgtctgaaattacattaggtcgttacttgttcgaaagattaaagcaagtcgaagttcaaaccatctttggtctaccaggtgatttcaacttgtccctattggacaatatctacgaagtcccaggtatgagatgggctggtaatgccaacgaattgaacgctgcttacgctgctgatggttacgccagattaaagggtatgtcctgtatcatcaccaccttcggtgtcggtgaattgtctgctttgaacggtattgccggttcttacgctgaacacgttggtgtcttgcacgttgtcggtgttccatccgtctcttctcaagctaagcaattgttgttgcaccacaccttgggtaacggtgacttcactgttttccacagaatgtcctccaacatttctgaaaccactgctatgatcaccgatatcaacactgccccagctgaaatcgacagatgtatcagaaccacttacgtttcccaaagaccagtctacttgggtttgccagctaacttggtcgacttgactgtcccagcttctttgttggacactccaattgatttgagcttgaagccaaatgacccagaagccgaagaagaagtcatcgaaaacgtcttgcaactgatcaaggaagctaagaacccagttatcttggctgatgcttgttgttccagacacgatgccaaggctgagaccaagaagttgatcgacttgactcaattcccagccttcgttaccccaatgggtaagggttccattgacgaaaagcacccaagattcggtggtgtctacgtcggtaccctatcttctccagctgtcaaggaagccgttgaatctgctgacttggttctatcggtcggtgctctattgtccgatttcaacactggttctttctcttactcttacaagaccaagaacattgtcgaattccactctgactacaccaagatcagaagcgctaccttcccaggtgtccaaatgaagttcgctttacaaaaattgttgactaaggttgccgatgctgctaagggttacaagccagttccagttccatctgaaccagaacacaacgaagctgtcgctgactccactccattgaagcaagaatgggtctggactcaagtcggtgaattcttgagagaaggtgatgttgttatcactgaaaccggtacctctgccttcggtatcaaccaaactcatttcccaaacaacacatacggtatctctcaagttttatggggttccattggtttcaccactggtgctaccttgggtgctgccttcgctgccgaagaaattgatccaaagaagagagttatcttattcattggtgacggttctttgcaattgactgttcaagaaatctccaccatgatcagatggggcttgaagccatacttgttcgtattgaacaacgacggttacaccattgaaagattgattcacggtgaaaccgctcaatacaactgtatccaaaactggcaacacttggaattattgccaactttcggtgccaaggactacgaagctgtcagagtttccaccactggtgaatggaacaagttgaccactgacgaaaagttccaagacaacaccagaatcagattgatcgaagttatgttgccaactatggatgctccatctaacttggttaagcaagctcaattgactgctgctaccaacgctaagaactaa

SEQ ID NO: 4258 - protein, 563 aa, Kluyveromyces lactis
MSEITLGRYLFERLKQVEVQTIFGLPGDFNLSLLDNIYEVPGMRWAGNANELNAAYAADGYARLKGMSCIITTFGVGELSALNGIAGSYAEHVGVLHVVGVPSVSSQAKQLLLHHTLGNGDFTVFHRMSSNISETTAMITDINTAPAEIDRCIRTTYVSQRPVYLGLPANLVDLTVPASLLDTPIDLSLKPNDPEAEEEVIENVLQLIKEAKNPVILADACCSRHDAKAETKKLIDLTQFPAFVTPMGKGSIDEKHPRFGGVYVGTLSSPAVKEAVESADLVLSVGALLSDFNTGSFSYSYKTKNIVEFHSDYTKIRSATFPGVQMKFALQKLLTKVADAAKGYKPVPVPSEPEHNEAVADSTPLKQEWVWTQVGEFLREGDVVITETGTSAFGINQTHFPNNTYGISQVLWGSIGFTTGATLGAAFAAEEIDPKKRVILFIGDGSLQLTVQEISTMIRWGLKPYLFVLNNDGYTIERLIHGETAQYNCIQNWQHLELLPTFGAKDYEAVRVSTTGEWNKLTTDEKFQDNTRIRLIEVMLPTMDAPSNLVKQAQLTAATNAKN

SEQ ID NO: 4259 - DNA, 1695 bp, Kluyveromyces marxianus
  CDS (1)..(1695)
atgtctgaaattactctaggtcgttacttgttcgaaagattaaagcaagtcgaggtccaaaccatcttcggtttgccaggtgacttcaacttgtccctattggacaagatctacgaagtcccaggtatgagatgggctggtaacgctaacgaattgaacgctgcttacgctgctgatggttacgccagattaaagggtatggcctgtgtcatcaccaccttcggtgttggtgaattgtctgccttgaacggtattgccggttcttacgctgaacacgttggtgttttgcacgttgttggtgttccatccatctcttcccaagctaagcaattgttgttgcaccacaccttgggtaacggtgacttcactgttttccacagaatgtcttccaacatttctgaaaccactgctatgatcactgacatcaacagtgctccatctgaaatcgacagatgtatcagaactacctacatctctcaaagaccagtttacttgggtttgccagctaacttggttgacctgaaggttccagcttctctattggaaaccccaattgacttgagcttgaagccaaacgacccagaagctgaaaacgaagttctagaaaccgttttggaattgatcaaggacgccaagaacccagttatcttggccgatgcttgttgttccagacacaacgttaaggctgaaaccaagaagttgattgacatcactcaattcccagccttcgttaccccaatgggtaagggttccattgacgaacaacacccaagattcggtggtgtctacgtcggtaccttgtcttctccagaagttaaggaagctgttgaatccgctgacttggttctatctgtcggtgctctattgtccgatttcaacaccggttctttctcttactcttacaagaccaagaacattgtcgaattccactccgactacatcaaggtcagaaacgccactttcccaggtgtccaaatgaagttcgtcttgcaaaagttgttgaccaaggtcaaggatgctgctaagggttacaagccagttccagttcctcacgctccaagagacaacaagccagttgctgactctactccattgaagcaagaatgggtctggactcaagtcggtaagttcctacaagaaggtgatgttgttctaactgaaaccggtacctccgctttcggtatcaaccaaacccacttcccaaatgacacctacggtatctcccaagtcttgtggggttccattggtttcaccggtggtgctactctaggtgctgctttcgctgctgaagaaatcgatccaaagaagagagttatcttgttcattggtgacggttctttgcaattgactgtccaagaaatctccaccatgatcagatggggtttgaagccatacttgttcgtcttgaacaacgatggttacaccattgaaagattgattcacggtgaaaccgctcaatacaactgtatccaatcttggaagcacttggacctattgccaaccttcggtgccaaggactacgaagccgtcagagtcgccaccactggtgaatggaacaagttgaccactgacaagaagttccaagaaaactctaagatcagattgatcgaagtcatgttgccagtcatggatgctccatccaacttggtcaagcaagctcaattgactgcttccatcaacgccaagcaagaatag

SEQ ID NO: 4260 - protein, 564 aa, Kluyveromyces marxianus
MSEITLGRYLFERLKQVEVQTIFGLPGDFNLSLLDKIYEVPGMRWAGNANELNAAYAADGYARLKGMACVITTFGVGELSALNGIAGSYAEHVGVLHVVGVPSISSQAKQLLLHHTLGNGDFTVFHRMSSNISETTAMITDINSAPSEIDRCIRTTYISQRPVYLGLPANLVDLKVPASLLETPIDLSLKPNDPEAENEVLETVLELIKDAKNPVILADACCSRHNVKAETKKLIDITQFPAFVTPMGKGSIDEQHPRFGGVYVGTLSSPEVKEAVESADLVLSVGALLSDFNTGSFSYSYKTKNIVEFHSDYIKVRNATFPGVQMKFVLQKLLTKVKDAAKGYKPVPVPHAPRDNKPVADSTPLKQEWVWTQVGKFLQEGDVVLTETGTSAFGINQTHFPNDTYGISQVLWGSIGFTGGATLGAAFAAEEIDPKKRVILFIGDGSLQLTVQEISTMIRWGLKPYLFVLNNDGYTIERLIHGETAQYNCIQSWKHLDLLPTFGAKDYEAVRVATTGEWNKLTTDKKFQENSKIRLIEVMLPVMDAPSNLVKQAQLTASINAKQE

SEQ ID NO: 4261 - DNA, 1833 bp, Zea mays
  CDS (1)..(1833)
atggagaccctcctggctggcaaccccgccaacggcgtggcgaagccgacgtgcaacggcgtcggcgccctgcccgtggccaactcccacgccatcatcgccacgccggcggcggctgcggcgacgctggccccggctggcgccacgctcggccggcacctggcgcgccgcctcgtgcagatcggcgcctccgacgtcttcgccgtcccgggggacttcaacctcaccctgctcgactacctcatcgccgagccgggcctgaccctcgtcggctgctgcaacgaactcaacgccgggtacgccgccgacgggtacgcgcggtcgcggggcgtcggcgcctgcgccgtcacgttcaccgtcggtgggctcagcgtgctcaacgccatcgccggcgcgtacagcgagaacctccccgtcgtctgcatcgtgggcgggcccaactccaacgactacggcaccaaccgcatccttcaccacaccatcggcctccctgacttctcccaggagctccgctgcttccagacgatcacctgctaccaggccatcatcaacaacctggacgacgcgcatgagcagatcgacacggccatcgcgacggcgctgagggagagcaagcccgtgtacatcagcgtcagctgcaacctggccggcctctcccacccgaccttcagccgggatccggtgcccatgttcatctcgccgaggctgagcaacaaggccaacctggagtacgccgtggaggcggcggccgacttcctcaacaaggcggtgaagccggtgatggtgggcgggcccaagatccgggtggccaaggccagggaggcgttcgccgccgtcgcggacgccagcgggtaccctttcgccgtcatgccggccgccaagggcctggtgccggagcaccacccgcgcttcatcggcacctactggggcgccgtcagcaccaccttctgcgccgagatcgtggagtccgccgacgcctacctcttcgccgggcccatcttcaacgactacagctccgtcggctactccctcctgctcaagcgggagaaggccgtcatcgtgcagcccgaccgcatggtggtcggcgacggcccggcgttcggctgcatcctcatgcccgagttcctccgcgcgctcgccaagcgcctcaggcgcaacaccacggcgtacgacaactaccgccgcatcttcgtccccgaccgcgagccgcccaacggcaagcccaacgagccgcttagggtcaacgtcctcttcaagcacatcaagggcatgctgtccggcgactccgcggtcgtcgccgagaccggcgactcgtggttcaactgccagaagctcaggctccccgagggctgcggctacgagttccagatgcagtacggctccatcgggtggtcggtcggcgcgacgctcgggtacgcccaggcggccaaggacaagcgtgtcatcgcgtgcatcggcgacggaagcttccaggtgacggcgcaggacgtgtccacgatgctccggtgcgggcagaagagcatcatcttcctcatcaacaacggcggctacaccatcgaggtggagatccacgacggcccgtacaacgtgatcaagaactgggactacacgggcttggtcaacgccatccataactccgagggcaactgctggaccatgaaggttcggacggaagagcagctcaaggaagcgatcgccacggttacgggcgccaagaaagactgcctctgcttcatcgaggtaatcgtgcacaaggacgacacgagcaaggagctcctcgagtgggggtccagggtctccgccgccaacagcaggccgcccaacccccagtga

SEQ ID NO: 4262 - protein, 610 aa, Zea mays
METLLAGNPANGVAKPTCNGVGALPVANSHAIIATPAAAAATLAPAGATLGRHLARRLVQIGASDVFAVPGDFNLTLLDYLIAEPGLTLVGCCNELNAGYAADGYARSRGVGACAVTFTVGGLSVLNAIAGAYSENLPVVCIVGGPNSNDYGTNRILHHTIGLPDFSQELRCFQTITCYQAIINNLDDAHEQIDTAIATALRESKPVYISVSCNLAGLSHPTFSRDPVPMFISPRLSNKANLEYAVEAAADFLNKAVKPVMVGGPKIRVAKAREAFAAVADASGYPFAVMPAAKGLVPEHHPRFIGTYWGAVSTTFCAEIVESADAYLFAGPIFNDYSSVGYSLLLKREKAVIVQPDRMVVGDGPAFGCILMPEFLRALAKRLRRNTTAYDNYRRIFVPDREPPNGKPNEPLRVNVLFKHIKGMLSGDSAVVAETGDSWFNCQKLRLPEGCGYEFQMQYGSIGWSVGATLGYAQAAKDKRVIACIGDGSFQVTAQDVSTMLRCGQKSIIFLINNGGYTIEVEIHDGPYNVIKNWDYTGLVNAIHNSEGNCWTMKVRTEEQLKEAIATVTGAKKDCLCFIEVIVHKDDTSKELLEWGSRVSAANSRPPNPQ

SEQ ID NO: 4263 - DNA, 2065 bp, Oryza sativa subsp. indica
  CDS (117)..(1934)
actcacagccaaaacctcgtacaatttcagctagccacaagcaacacaagtccaagacacgtcaagcgttcgcaccaagtcaaaccgcgcctcactgccaccttcgtttgcgcgccatggagcttgccctggttggcaacccttcgaatggcgtggcgaagccgtcgtgcaactccgtcggctcgctgcccgtcgtcagctccaacgccgtcatccacccgccggtgaccagcgcggcgggcgccacgctcggcaggcacctcgcgaggcgcctcgtgcagatcggcgccaccgacgtgttcgccgtccccggggacttcaacctcaccctgctcgactacctcatcgccgagcccgggctcaagctcatcggctgctgcaatgagctcaacgccgggtacgcggccgacggctacgcccgcgcccgcggcgtcggcgcctgcgccgtcacgttcaccgtcggtggcctcagcgtgctcaacgctatcgccggcgcctacagcgagaacctccccgtgatctgcatcgtcggcgggcccaactccaacgactacggcaccaaccgcatcctgcaccacaccatcggcctcccggacttctcacaggagctccgctgcttccagaccatcacctgctaccaggccgtcattaacaacctcgacgacgcgcacgagcagatcgacaccgccatcgcgacggcgctaagggagagcaagcccgtctacatcagcgtgggctgcaacctggcaggcctctcccacccaacgttcagtcgcgagccagtgccactattcatctcgccaaggctgagcaacaaggcgaacttggagtacgccgtcgaagccgcggcggacttcctgaacaaggcggtgaagccggtgatggtcggtgggccaaagatccgggtggccaaggcgaagaaggcgttcgccggcatcgcggagtcgagcgggtacccgatcgcggtgatgccgtccgcaaagggcctcgtgccggagcaccacccgcggttcatcggcacgtactggggcgccgtgagcaccaccttctgcgccgagatcgtcgagtccgccgacgcctacctcttcgccggcccaatcttcaacgactacagctccgtcggctactccctgctgctgaagcgggagaaggccgtcatcgtgcagcctgaccgcgtggtggtcggcaacggcccggcgttcggctgcatcctcatgacggagttcctcgacgcgctcgccaagcgcctcgaccgcaacacgacggcatacgacaactaccgccgcatcttcatccccgaccgcgagccgcccaatggccagcccgacgagccactcagggtcaacatcctcttcaagcacatcaaggagatgctgtctggcgacaccgccgtcatcgccgagaccggcgactcgtggttcaactgccagaagctcaggctccccgagggctgcgggtacgagttccagatgcagtacggctcaatcggttggtccgtcggcgccacgctcggatacgcccaggcggccaaggacaagcgcgtcatctcctgcatcggcgacggaagcttccagatgacggcgcaggacgtgtcgacgatgctgcggtgcgggcagaagagcatcatcttcctcatcaacaacggcgggtacaccatcgaggtggagatccacgacgggccgtacaacgtcatcaagaactgggactacaccggcctcatcgacgccatccacaactctgacggcaactgctggacaaagaaggtccggactgaggaggagctgatagaggcgatcgcgacggcgacgggcgccaagaaagactgcctctgcttcatcgagatcatcgtgcacaaagatgacacgagcaaagagcttctcgagtggggatccagggtctcggctgccaacagcaggccgcctaatccccagtgatcttgctgctcgtcttctcaggacgcacactcgaaattgctgggctgccaatgtctaagatgtgctgcttatcatcgtctgtgaattaattgtttaacgcttctgtttctgtatccattcaaaattttctc

SEQ ID NO: 4264 - protein, 605 aa, Oryza sativa subsp. indica
MELALVGNPSNGVAKPSCNSVGSLPVVSSNAVIHPPVTSAAGATLGRHLARRLVQIGATDVFAVPGDFNLTLLDYLIAEPGLKLIGCCNELNAGYAADGYARARGVGACAVTFTVGGLSVLNAIAGAYSENLPVICIVGGPNSNDYGTNRILHHTIGLPDFSQELRCFQTITCYQAVINNLDDAHEQIDTAIATALRESKPVYISVGCNLAGLSHPTFSREPVPLFISPRLSNKANLEYAVEAAADFLNKAVKPVMVGGPKIRVAKAKKAFAGIAESSGYPIAVMPSAKGLVPEHHPRFIGTYWGAVSTTFCAEIVESADAYLFAGPIFNDYSSVGYSLLLKREKAVIVQPDRVVVGNGPAFGCILMTEFLDALAKRLDRNTTAYDNYRRIFIPDREPPNGQPDEPLRVNILFKHIKEMLSGDTAVIAETGDSWFNCQKLRLPEGCGYEFQMQYGSIGWSVGATLGYAQAAKDKRVISCIGDGSFQMTAQDVSTMLRCGQKSIIFLINNGGYTIEVEIHDGPYNVIKNWDYTGLIDAIHNSDGNCWTKKVRTEEELIEAIATATGAKKDCLCFIEIIVHKDDTSKELLEWGSRVSAANSRPPNPQ

SEQ ID NO: 4265 - DNA, 1782 bp, Pisum sativum
  CDS (1)..(1782)
atggaaactgaaactgaaactccaaacggctcaacgccttgtccaacctcggctccatcggctatccctctccgtccttcctcatgtgacggcacgatgggacgccacttagctcggcggttggttgagatcggcgtccgcgatgtcttctctgttcccggagacttcaatttaactcttcttgaccatctgatcgctgagccggagcttaatcttgtcggctgctgtaacgagcttaacgctggttatgctgctgacggttacgggcgtgctaaaggcgtcggcgcgtgtgttgttactttcaccgttggtggacttagtatcctcaacgccatcgccggagcttacagtgagaaccttccggtgatttgtatagttggaggacctaattctaatgactatggtaccaaccgaatccttcatcacactattggattacctgatttttctcaggagcttcagtgctttcagacgatcacatgttttcaggctgtggtgaataacttggatgatgcacatgaacttattgatactgcaatttctactgctttgaaagaaagcaagcctgtttatataagcataggttgtaatcttcctgcaattcctcatccaacttttgctagggaccctgttccattttttcttgcaccaagggtaagcaatcaagcagggttagaagctgcggtggaagaagccgctgcttttttgaacaaagctgtgaagccagttattgtgggtggaccaaaactaagggttgcaaaagcacaaaaggctttcatggagtttgcagaagctagtggatatccaatagctgttatgccctctggtaaaggacttgtaccagaaaatcatccacatttcatcggaacatactggggtgctgttagtactagctattgtggggagatagtggagtctgctgatgcatatgttttcgttggtcccatcttcaacgactatagctccgttggttactcattgttgatcaaaaaggagaaatccttaatagtacagcctaatcgggtgaccattggcaatggtctttcattgggatgggttttcatggctgatttcttaactgcattggccaaaaaggtgaagactaacactacagctgtggagaattaccgtcgtatctatgttcctccaggcattcctcttaagcgagagaaagatgaacctcttagagttaatgtcctattcaagcacattcaggcactaattagtggagatactgctgtaatagctgaaactggagattcatggtttaactgtcagaagcttcgtcttcctgagaattgcggttatgaattccagatgcagtatggatcaatcggttggtcagtaggtgctactcttggatatgcacaggctgcaacagataagcgtgtcattgcgtgcataggcgatggaagttttcaggtgacagcacaagatatttcaacaatgatccgttgtggacaaagaagcatcatctttctgattaacaacggaggttatacaattgaagttgagattcacgatggcccgtataatgtgatcaagaattgggactataccggctttgtgagtgctatccataacggacaagggaaatgctggactgcgaaggtacgtacagaggaagatttgacagaagcaattgcaacagctactggagcagagaaagattcactatgttttatagaagtttttgcacataaggatgataccagcaaagagttgctagaatggggatctcgtgttgctgctgctaatagtcgtcctcctaatccccaatag

SEQ ID NO: 4266 - protein, 593 aa, Pisum sativum
METETETPNGSTPCPTSAPSAIPLRPSSCDGTMGRHLARRLVEIGVRDVFSVPGDFNLTLLDHLIAEPELNLVGCCNELNAGYAADGYGRAKGVGACVVTFTVGGLSILNAIAGAYSENLPVICIVGGPNSNDYGTNRILHHTIGLPDFSQELQCFQTITCFQAVVNNLDDAHELIDTAISTALKESKPVYISIGCNLPAIPHPTFARDPVPFFLAPRVSNQAGLEAAVEEAAAFLNKAVKPVIVGGPKLRVAKAQKAFMEFAEASGYPIAVMPSGKGLVPENHPHFIGTYWGAVSTSYCGEIVESADAYVFVGPIFNDYSSVGYSLLIKKEKSLIVQPNRVTIGNGLSLGWVFMADFLTALAKKVKTNTTAVENYRRIYVPPGIPLKREKDEPLRVNVLFKHIQALISGDTAVIAETGDSWFNCQKLRLPENCGYEFQMQYGSIGWSVGATLGYAQAATDKRVIACIGDGSFQVTAQDISTMIRCGQRSIIFLINNGGYTIEVEIHDGPYNVIKNWDYTGFVSAIHNGQGKCWTAKVRTEEDLTEAIATATGAEKDSLCFIEVFAHKDDTSKELLEWGSRVAAANSRPPNPQ

SEQ ID NO: 4267 - DNA, 1716 bp, Schizosaccharomyces pombe
  CDS (1)..(1716)
atgagtggggatattttagtcggtgaatatctattcaaaaggcttgaacaattaggggtcaagtccattcttggtgttccaggagatttcaatttagctctacttgacttaattgagaaagttggagatgagaaatttcgttgggttggcaataccaatgagttgaatggtgcttatgccgctgatggttatgctcgtgttaatggtctttcagccattgttacaacgttcggcgtgggagagctttccgctattaatggagtggcaggttcttatgcggagcatgtcccagtagttcatattgttggaatgccttccacaaaggtgcaagatactggagctttgcttcatcatactttaggagatggagactttcgcactttcatggatatgtttaagaaagtttctgcctacagtataatgatcgataacggaaacgatgcagctgaaaagatcgatgaagccttgtcgatttgttataaaaaggctaggcctgtttacattggtattccttctgatgctggctacttcaaagcatcttcatcaaatcttgggaaaagactaaagctcgaggaggatactaacgatccagcagttgagcaagaagtcatcaatcatatctcggaaatggttgtcaatgcaaagaaaccagtgattttaattgacgcttgtgctgtaagacatcgtgtcgttccagaagtacatgagctgattaaattgacccatttccctacatatgtaactcccatgggtaaatctgcaattgacgaaacttcgcaattttttgacggcgtttatgttggttcaatttcagatcctgaagttaaagacagaattgaatccactgatctgttgctatccatcggtgctctcaaatcagactttaacacgggttccttctcttaccacctcagccaaaagaatgccgttgagtttcattcagaccacatgcgcattcgatatgctctttatccaaatgtagccatgaagtatattcttcgcaaactgttgaaagtacttgatgcttctatgtgtcattccaaggctgctcctaccattggctacaacatcaagcctaagcatgcggaaggatattcttccaacgagattactcattgctggttttggcctaaatttagtgaatttttgaagccccgagatgttttgatcaccgagactggaactgcaaactttggtgtccttgattgcaggtttccaaaggatgtaacagccatttcccaggtattatggggatctattggatactccgttggtgcaatgtttggtgctgttttggccgtccacgattctaaagagcccgatcgtcgtaccattcttgtagtaggtgatggatccttacaactgacgattacagagatttcaacctgcattcgccataacctcaaaccaattattttcataattaacaacgacggttacaccattgagcgtttaattcatggtttgcatgctagctataacgaaattaacactaaatggggctaccaacagattcccaagtttttcggagctgctgaaaaccacttccgcacttactgtgttaaaactcctactgacgttgaaaagttgtttagcgacaaggagtttgcaaatgcagatgtcattcaagtagttgagcttgtaatgcctatgttggatgcacctcgtgtcctagttgagcaagccaagttgacgtctaagatcaataagcaatga

SEQ ID NO: 4268 - protein, 571 aa, Schizosaccharomyces pombe
MSGDILVGEYLFKRLEQLGVKSILGVPGDFNLALLDLIEKVGDEKFRWVGNTNELNGAYAADGYARVNGLSAIVTTFGVGELSAINGVAGSYAEHVPVVHIVGMPSTKVQDTGALLHHTLGDGDFRTFMDMFKKVSAYSIMIDNGNDAAEKIDEALSICYKKARPVYIGIPSDAGYFKASSSNLGKRLKLEEDTNDPAVEQEVINHISEMVVNAKKPVILIDACAVRHRVVPEVHELIKLTHFPTYVTPMGKSAIDETSQFFDGVYVGSISDPEVKDRIESTDLLLSIGALKSDFNTGSFSYHLSQKNAVEFHSDHMRIRYALYPNVAMKYILRKLLKVLDASMCHSKAAPTIGYNIKPKHAEGYSSNEITHCWFWPKFSEFLKPRDVLITETGTANFGVLDCRFPKDVTAISQVLWGSIGYSVGAMFGAVLAVHDSKEPDRRTILVVGDGSLQLTITEISTCIRHNLKPIIFIINNDGYTIERLIHGLHASYNEINTKWGYQQIPKFFGAAENHFRTYCVKTPTDVEKLFSDKEFANADVIQVVELVMPMLDAPRVLVEQAKLTSKINKQ

SEQ ID NO: 4269 - DNA, 1692 bp, Saccharomyces cerevisiae
  CDS (1)..(1692)
atgtctgaaattactttgggtaaatatttgttcgaaagattaaagcaagtcaacgttaacaccgttttcggtttgccaggtgacttcaacttgtccttgttggacaagatctacgaagttgaaggtatgagatgggctggtaacgccaacgaattgaacgctgcttacgccgctgatggttacgctcgtatcaagggtatgtcttgtatcatcaccaccttcggtgtcggtgaattgtctgctttgaacggtattgccggttcttacgctgaacacgtcggtgttttgcacgttgttggtgtcccatccatctctgctcaagctaagcaattgttgttgcaccacaccttgggtaacggtgacttcactgttttccacagaatgtctgccaacatttctgaaaccactgctatgatcactgacattgctaccgccccagctgaaattgacagatgtatcagaaccacttacgtcacccaaagaccagtctacttaggtttgccagctaacttggtcgacttgaacgtcccagctaagttgttgcaaactccaattgacatgtctttgaagccaaacgatgctgaatccgaaaaggaagtcattgacaccatcttggctttggtcaaggatgctaagaacccagttatcttggctgatgcttgttgttccagacacgacgtcaaggctgaaactaagaagttgattgacttgactcaattcccagctttcgtcaccccaatgggtaagggttccattgacgaacaacacccaagatacggtggtgtttacgtcggtaccttgtccaagccagaagttaaggaagccgttgaatctgctgacttgattttgtctgtcggtgctttgttgtctgatttcaacaccggttctttctcttactcttacaagaccaagaacattgtcgaattccactccgaccacatgaagatcagaaacgccactttcccaggtgtccaaatgaaattcgttttgcaaaagttgttgaccactattgctgacgccgctaagggttacaagccagttgctgtcccagctagaactccagctaacgctgctgtcccagcttctaccccattgaagcaagaatggatgtggaaccaattgggtaacttcttgcaagaaggtgatgttgtcattgctgaaaccggtacctccgctttcggtatcaaccaaaccactttcccaaacaacacctacggtatctctcaagtcttatggggttccattggtttcaccactggtgctaccttgggtgctgctttcgctgctgaagaaattgatccaaagaagagagttatcttattcattggtgacggttctttgcaattgactgttcaagaaatctccaccatgatcagatggggcttgaagccatacttgttcgtcttgaacaacgatggttacaccattgaaaagttgattcacggtccaaaggctcaatacaacgaaattcaaggttgggaccacctatccttgttgccaactttcggtgctaaggactatgaaacccacagagtcgctaccaccggtgaatgggacaagttgacccaagacaagtctttcaacgacaactctaagatcagaatgattgaaatcatgttgccagtcttcgatgctccacaaaacttggttgaacaagctaagttgactgctgctaccaacgctaagcaataa

SEQ ID NO: 4270 - protein, 563 aa, Saccharomyces cerevisiae
MSEITLGKYLFERLKQVNVNTVFGLPGDFNLSLLDKIYEVEGMRWAGNANELNAAYAADGYARIKGMSCIITTFGVGELSALNGIAGSYAEHVGVLHVVGVPSISAQAKQLLLHHTLGNGDFTVFHRMSANISETTAMITDIATAPAEIDRCIRTTYVTQRPVYLGLPANLVDLNVPAKLLQTPIDMSLKPNDAESEKEVIDTILALVKDAKNPVILADACCSRHDVKAETKKLIDLTQFPAFVTPMGKGSIDEQHPRYGGVYVGTLSKPEVKEAVESADLILSVGALLSDFNTGSFSYSYKTKNIVEFHSDHMKIRNATFPGVQMKFVLQKLLTTIADAAKGYKPVAVPARTPANAAVPASTPLKQEWMWNQLGNFLQEGDVVIAETGTSAFGINQTTFPNNTYGISQVLWGSIGFTTGATLGAAFAAEEIDPKKRVILFIGDGSLQLTVQEISTMIRWGLKPYLFVLNNDGYTIEKLIHGPKAQYNEIQGWDHLSLLPTFGAKDYETHRVATTGEWDKLTQDKSFNDNSKIRMIEIMLPVFDAPQNLVEQAKLTAATNAKQ

SEQ ID NO: 4271 - DNA, 1785 bp, Schizosaccharomyces pombe
  CDS (1)..(1785)
atgactaaggacgctgaatctactatgaccgttggtacctatctcgcccagagattggtcgaaatcggtatcaagaaccactttgttgttcctggtgactacaaccttcgtcttttggacttcttggagtactatcccggtttgtctgagattggttgctgtaacgagttgaactgtgccttcgctgctgagggttacgctcgttctaacggtattgcttgcgccgtcgtcacctactccgtcggtgccttgaccgctttcgatggtattggaggtgcctacgctgagaaccttcccgtcattttggtctctggttcccccaacaccaatgaccttagctctggtcatttgttgcaccacactcttggtactcatgactttgaataccaaatggagattgccaagaagctcacttgtgccgctgttgccatcaagagagctgaggatgctcccgttatgattgaccatgccatccgtcaagctatcctccaacacaagcctgtctacattgaaatccccaccaacatggctaaccaaccttgccctgtccccggtcccattagcgctgtcatctcccctgagatcagtgataaggagtcccttgagaaggccactgacattgctgctgaattaatcagcaagaaggagaaacccattcttttagctggtcccaagctccgtgctgctggtgccgaatctgccttcgttaagttggccgaagctttgaactgtgccgctttcatcatgcccgctgctaagggtttctactctgaggagcacaagaactatgctggtgtctactggggtgaagttagcagctccgagaccaccaaggctgtttatgagagctccgaccttgtcatcggtgctggtgtccttttcaacgattacagcactgtcggttggagagctgctcccaaccccaacatcttgttgaactctgactacactagcgtttccatccctggttacgttttctcccgtgtctacatggccgaattcttggagcttcttgccaagaaggtttccaagaagcccgctactcttgaggcttacaacaaggctcgccctcaaaccgttgttcccaaggctgccgagcctaaggctgctttgaaccgtgttgaggttatgcgtcaaatccaaggtttggtcgatagcaacaccactttgtatgctgagactggtgactcctggttcaacggtcttcaaatgaagttacccgctggtgccaagtttgaggttgagatgcaatggggtcacattggttggtctgttccttctgctatgggttatgctgtcgctgcccctgagagaagaaccattgtcatggttggtgacggttctttccaacttactggtcaagagatctctcaaatgatccgccacaagctccccgttctcattttcttgcttaacaaccgtggttacaccattgagattcaaatccacgatggtccttacaaccgtatccaaaactgggacttcgctgctttctgcgagtctttgaacggtgaaaccggtaaggctaagggtcttcatgctaagactggtgaagagcttaccagcgccatcaaggttgctcttcaaaacaaggagggtcctactttgattgagtgtgccatcgacaccgatgactgcacccaagagttggttgactggggtaaggctgttgctccgccaacgcccgtcctcctaccgctgataactagattaaaacggacgttgtttggtaagaatatgttacatttagattacaagaattatttggatattagaaatacatga

SEQ ID NO: 4272 - protein, 594 aa, Schizosaccharomyces pombe
MTKDAESTMTVGTYLAQRLVEIGIKNHFVVPGDYNLRLLDFLEYYPGLSEIGCCNELNCAFAAEGYARSNGIACAVVTYSVGALTAFDGIGGAYAENLPVILVSGSPNTNDLSSGHLLHHTLGTHDFEYQMEIAKKLTCAAVAIKRAEDAPVMIDHAIRQAILQHKPVYIEIPTNMANQPCPVPGPISAVISPEISDKESLEKATDIAAELISKKEKPILLAGPKLRAAGAESAFVKLAEALNCAAFIMPAAKGFYSEEHKNYAGVYWGEVSSSETTKAVYESSDLVIGAGVLFNDYSTVGWRAAPNPNILLNSDYTSVSIPGYVFSRVYMAEFLELLAKKVSKKPATLEAYNKARPQTVVPKAAEPKAALNRVEVMRQIQGLVDSNTTLYAETGDSWFNGLQMKLPAGAKFEVEMQWGHIGWSVPSAMGYAVAAPERRTIVMVGDGSFQLTGQEISQMIRHKLPVLIFLLNNRGYTIEIQIHDGPYNRIQNWDFAAFCESLNGETGKAKGLHAKTGEELTSAIKVALQNKEGPTLIECAIDTDDCTQELVDWGKAVAPPTPVLLPLITRLKRTLFGKNMLHLDYKNYLDIRNT

SEQ ID NO: 4273 - DNA, 1845 bp, Nicotiana tabacum
  CDS (1)..(1845)
atggacggctcagtagccaaaggcacttcctgtatccaagattctcaatcttcttctgttatcgcgaacactgacgccaccctcgggcgccatttggcacgtaggctagttgaaattggaattcaagatgttttctcagtgcctggtgatttcaatctcacacttcttgatcacctcattgctgaaccaaggcttaagaatattggctgttgcaatgaacttaatgctggatatgctgctgatggctatgcacgagctcgcggagttggtgcgtgtgttgtcacgtttactgttggtgggctcagtgtgcttaatgcaatagctggtgcttatagtgaaaacctcccagttatttgcattgtgggaggtcctaatactaatgattatggaactaatcgaattctccatcataccattggattgcctgatttcagccaagaattaagatgttttcagactgttacatgttatcaggcggttgtaaataacttggatgatgcacatgaacaaattgatagagccatttccactgctctaaaagaaagcaaaccagtatacatcagtataagttgcaatttgccagccattcctcatccaactttcagcagggatcccatcccattttctctttcacctaggctaagtaacaagaggggattggaagctgcagtggatgcagcagttacctttctaagcaaggcagtgaaaccagttatgattggagggccaaagttaagagtagccaaagcttgtgatgcttttgttgaattggctgattcttccggttatgcaatggcagtgatgcttcagccaaaagggctagtggcagaacaacatcctcacttcattggaacttactggggtgcagtaggcacgtcctattgcgcggaaattgttgaatcagctgatgcttacttgtttgctggcccaatctttaacgactacagctctgttggatattcacttctgatcaagaaagagaaatcgatcatcgtgcagcctgatagagttgtaattggcaatggaccagcttttggttgtgtcctaatgaaagatttcctatctgaactagcaaagaaaataaagaaaaacgaaactgcatatgaaaactatcgtcggatatttgtgcctgaaggaacacctctaaaatcagagcctaatgaaccactaagagtaaatgttctgttccagcatatacagaagatgctttcagatgaaacagcagtgattgctgagacaggggattcttggttcaattgccagaagcttaagttaccagaaggatgtgggtatgtgactaataacagcttatcagcctggtatccattttatttacagacattagaagaaaaaagttcgtgttgcaggtatgaattccagatgcaatatggctccattggttggtctgttggtgctaccttgggctatgcgcaatctgtacctaaaaaacgtgtcatatcttgcatcggtgatggaagttttcaggttactgcacaagatgtgtcaacaatgatccgttgtgagcaaaagaacataattttcttgattaataatggtggttacacgattgaggttgaaatccatgacgggccatacaatgtgatcaagaactggaactacactggcttagtggatgctattcataatggtgaaggcaattgctggaccatgaaggtaaggactgaagaggagctcactgaagcaatagcaactgcaactggagagaagaaggattgtttatgcttcattgaagttattgttcacaaggatgatactagcaaagagctgctcgaatggggttccagggtctgttctgctaatggccgtccaccaaaccctcaatga

SEQ ID NO: 4274 - protein, 614 aa, Nicotiana tabacum
MDGSVAKGTSCIQDSQSSSVIANTDATLGRHLARRLVEIGIQDVFSVPGDFNLTLLDHLIAEPRLKNIGCCNELNAGYAADGYARARGVGACVVTFTVGGLSVLNAIAGAYSENLPVICIVGGPNTNDYGTNRILHHTIGLPDFSQELRCFQTVTCYQAVVNNLDDAHEQIDRAISTALKESKPVYISISCNLPAIPHPTFSRDPIPFSLSPRLSNKRGLEAAVDAAVTFLSKAVKPVMIGGPKLRVAKACDAFVELADSSGYAMAVMLQPKGLVAEQHPHFIGTYWGAVGTSYCAEIVESADAYLFAGPIFNDYSSVGYSLLIKKEKSIIVQPDRVVIGNGPAFGCVLMKDFLSELAKKIKKNETAYENYRRIFVPEGTPLKSEPNEPLRVNVLFQHIQKMLSDETAVIAETGDSWFNCQKLKLPEGCGYVTNNSLSAWYPFYLQTLEEKSSCCRYEFQMQYGSIGWSVGATLGYAQSVPKKRVISCIGDGSFQVTAQDVSTMIRCEQKNIIFLINNGGYTIEVEIHDGPYNVIKNWNYTGLVDAIHNGEGNCWTMKVRTEEELTEAIATATGEKKDCLCFIEVIVHKDDTSKELLEWGSRVCSANGRPPNPQ

SEQ ID NO: 4275 - DNA, 1719 bp, Schizosaccharomyces pombe
  CDS (1)..(1719)
atgaaagataatcagcaagcagttcagttacaacagccaacaacaattggacactacttggccgttcggttagcacaagctggcgtaaagcatcattttgtggttcccggtgactataatcttgggttacttgacaagctacaatacaacaattatcttgaagaggtaaactgtgcaaatgagcttaactgtgcttttgctgccgaaggatatgcacgtgccaacggtatcgctgcgtgtgttgttacctatagtgtaggagctttcaccgcgtttgatgggattggaggtgcatacgctgaagaccttcctgtaattttgattagtggatctccaaacacaaacgatataggatcgtctcatttattgcatcatactttgggaacccatgactttagctatcaatatgagatggccaagaaaattacttgtgctgcggtatctattcaaaggccgactgaggcacctcgactaattgactatgcaattaaaatggctttattgaaaaagaagcctgtttacattgaagttcctacgaatgttgcttctcaaccttgtgcagcgccgggaccagccagcttgattaccgagcctgaaaccagcaatcaagaatatttgcaaatggccgttgacattagcgccaaaatcgtaaatggaaagcaaaagcccgtattgttggccggacctaaacttcgaagctttaaagctgagagcgcattcttggagttggcgaattcgttgaactgctctgttgcagtcatgccaaacgccaaaagctttttccctgaatctcatccaaattatgcgggaatttattggggacaggcaagcacactaggtgctgaatccattatcaactggtcggattgtatcatttgcgctggaacaacatttactgattatagctcaaatggatggacttcgctaccaccgaaggccaatgtgttacatgttgatgttgatcgtgtaactgtttctgatgccgaatttggtggagttttgttaagggatttccttcatgaactagcaaaaaaggtgaaagcaaacaatgcaagtgttgttgagtacaaacgtatacggccagaatcacttgaaatacctatggaaaaccccaaggctgcactcaatcgaaaagagattattcgccaggttcaaaacctcgttaatcaggaaacaactctattcgttgatactggtgattcttggtttggaggaatgagaataactctgccagaaaaagcgagatttgaaatagaaatgcaatggggtcacattggatggtccgtgccatctgcatttggatacgctatcggagcacctaagcgcaatgtggtagttttcgttggagatggatcatttcaagaaactgtacaagaagtgtcgcaaatggttcgactaaatttaccaatcatcatgtttttaatcaacaacagaggatatactattgaagttgaaattcacgatggtccttataaccgtattaaaaactgggattatgcagcaattgttgaagcattcaatgctggagaaggtcatgccaaaggattccgtgttggaaatggacatgagctagctgaagcaattcgacaagctaaagaaaattcccaagggccaaccctcattgagtgcaatattgaccaagacgactgtagtaaagaactaatcaactggggtcataacgttggagcagctaacggaaagccacctgctaaagagtaa

SEQ ID NO: 4276 - protein, 572 aa, Schizosaccharomyces pombe
MKDNQQAVQLQQPTTIGHYLAVRLAQAGVKHHFVVPGDYNLGLLDKLQYNNYLEEVNCANELNCAFAAEGYARANGIAACVVTYSVGAFTAFDGIGGAYAEDLPVILISGSPNTNDIGSSHLLHHTLGTHDFSYQYEMAKKITCAAVSIQRPTEAPRLIDYAIKMALLKKKPVYIEVPTNVASQPCAAPGPASLITEPETSNQEYLQMAVDISAKIVNGKQKPVLLAGPKLRSFKAESAFLELANSLNCSVAVMPNAKSFFPESHPNYAGIYWGQASTLGAESIINWSDCIICAGTTFTDYSSNGWTSLPPKANVLHVDVDRVTVSDAEFGGVLLRDFLHELAKKVKANNASVVEYKRIRPESLEIPMENPKAALNRKEIIRQVQNLVNQETTLFVDTGDSWFGGMRITLPEKARFEIEMQWGHIGWSVPSAFGYAIGAPKRNVVVFVGDGSFQETVQEVSQMVRLNLPIIMFLINNRGYTIEVEIHDGPYNRIKNWDYAAIVEAFNAGEGHAKGFRVGNGHELAEAIRQAKENSQGPTLIECNIDQDDCSKELINWGHNVGAANGKPPAKE

SEQ ID NO: 4277 - DNA, 1713 bp, Schizosaccharomyces pombe
  CDS (1)..(1713)
atgtcttccgaaaaagtcctcgttggtgaataccttttcacccgtttgctgcaattgggcatcaaatccatcctcggtgtacccggcgactttaacttggctttgctcgatttgattgagaaagtgggcgacgaaacgtttcgctgggtcggtaatgaaaacgagctaaacggtgcttatgccgctgatgcttatgctcgtgttaagggcatttctgccatcgtcaccacttttggcgtcggtgaactttccgcactcaacggtttcgccggcgcatactctgaacgtattcctgtcgttcacattgtcggtgttcccaacaccaaggctcaagccactcgtccccttcttcatcacacactgggaaatggtgactttaaagtcttccagcgtatgtcctccgagttgtctgccgatgtcgccttcctggatagcggtgactctgccggtcgtctcatcgacaacctgttggaaacgtgcgttcgcacttcaagacccgtttatctggccgttccttcggacgccggctacttctacacggatgcttctcccttgaagactccattggttttccctgttcccgaaaacaacaaggagattgagcacgaggtggtttctgagattctcgaattgatcgaaaaatccaagaacccttctatcctcgttgacgcttgtgtttcccgcttccacattcaacaggaaacccaagactttattgatgcgacccatttccccacttacgttactcccatgggtaagactgcgatcaatgagtcatccccctactttgatggcgtctacattggctccttgaccgagccttccatcaaagaacgtgccgaatctactgacttgcttctcatcatcggtggtcttcgctccgatttcaactcgggcacctttacttatgctacccctgcatctcaaaccatcgaatttcattccgactacaccaaaattcgttctggcgtttacgagggcatttcgatgaaacatttgttgcccaagctcaccgctgccattgacaaaaagtccgttcaggcaaaggcccgtcctgttcactttgagccaccaaaggctgttgctgctgagggttacgccgaaggaaccattacccacaaatggttctggcctacgtttgcctcttttcttcgtgagtccgatgtagtgactaccgagacaggtacctccaactttggtattttggattgcattttccccaaaggctgccaaaatctctcacaggtattatggggctcaattggttggtcggttggcgctatgtttggtgctacgttgggcatcaaggattccgatgctcctcaccgtcgttccatattgattgttggtgacggttcccttcatttaactgttcaggaaatttctgctaccatccgtaacggtctcacccctatcatatttgtaattaacaataagggatatacaattgaacgtctcattcacggtcttcacgctgtttacaacgacatcaacactgaatgggactatcaaaaccttcttaaaggctatggtgccaaaaattctcgctcctataacattcattcagaaaaggagctcctcgatctctttaaagatgaggaatttggaaaagctgatgtaattcagctcgttgaagttcatatgcctgtcttggatgctcctcgtgttttgattgagcaagccaaacttaccgcttctcttaacaagcagtaa

SEQ ID NO: 4278 - protein, 570 aa, Schizosaccharomyces pombe
MSSEKVLVGEYLFTRLLQLGIKSILGVPGDFNLALLDLIEKVGDETFRWVGNENELNGAYAADAYARVKGISAIVTTFGVGELSALNGFAGAYSERIPVVHIVGVPNTKAQATRPLLHHTLGNGDFKVFQRMSSELSADVAFLDSGDSAGRLIDNLLETCVRTSRPVYLAVPSDAGYFYTDASPLKTPLVFPVPENNKEIEHEVVSEILELIEKSKNPSILVDACVSRFHIQQETQDFIDATHFPTYVTPMGKTAINESSPYFDGVYIGSLTEPSIKERAESTDLLLIIGGLRSDFNSGTFTYATPASQTIEFHSDYTKIRSGVYEGISMKHLLPKLTAAIDKKSVQAKARPVHFEPPKAVAAEGYAEGTITHKWFWPTFASFLRESDVVTTETGTSNFGILDCIFPKGCQNLSQVLWGSIGWSVGAMFGATLGIKDSDAPHRRSILIVGDGSLHLTVQEISATIRNGLTPIIFVINNKGYTIERLIHGLHAVYNDINTEWDYQNLLKGYGAKNSRSYNIHSEKELLDLFKDEEFGKADVIQLVEVHMPVLDAPRVLIEQAKLTASLNKQ

SEQ ID NO: 4279 - DNA, 1692 bp, Saccharomyces cerevisiae
  CDS (1)..(1692)
atgtctgaaataaccttaggtaaatatttatttgaaagattgagccaagtcaactgtaacaccgtcttcggtttgccaggtgactttaacttgtctcttttggataagctttatgaagtcaaaggtatgagatgggctggtaacgctaacgaattgaacgctgcctatgctgctgatggttacgctcgtatcaagggtatgtcctgtattattaccaccttcggtgttggtgaattgtctgctttgaatggtattgccggttcttacgctgaacatgtcggtgttttgcacgttgttggtgttccatccatctcttctcaagctaagcaattgttgttgcatcataccttgggtaacggtgacttcactgttttccacagaatgtctgccaacatttctgaaaccactgccatgatcactgatattgctaacgctccagctgaaattgacagatgtatcagaaccacctacactacccaaagaccagtctacttgggtttgccagctaacttggttgacttgaacgtcccagccaagttattggaaactccaattgacttgtctttgaagccaaacgacgctgaagctgaagctgaagttgttagaactgttgttgaattgatcaaggatgctaagaacccagttatcttggctgatgcttgtgcttctagacatgatgtcaaggctgaaactaagaagttgatggacttgactcaattcccagtttacgtcaccccaatgggtaagggtgctattgacgaacaacacccaagatacggtggtgtttacgttggtaccttgtctagaccagaagttaagaaggctgtagaatctgctgatttgatattgtctatcggtgctttgttgtctgatttcaataccggttctttctcttactcctacaagaccaaaaatatcgttgaattccactctgaccacatcaagatcagaaacgccaccttcccaggtgttcaaatgaaatttgccttgcaaaaattgttggatgctattccagaagtcgtcaaggactacaaacctgttgctgtcccagctagagttccaattaccaagtctactccagctaacactccaatgaagcaagaatggatgtggaaccatttgggtaacttcttgagagaaggtgatattgttattgctgaaaccggtacttccgccttcggtattaaccaaactactttcccaacagatgtatacgctatcgtccaagtcttgtggggttccattggtttcacagtcggcgctctattgggtgctactatggccgctgaagaacttgatccaaagaagagagttattttattcattggtgacggttctctacaattgactgttcaagaaatctctaccatgattagatggggtttgaagccatacatttttgtcttgaataacaacggttacaccattgaaaaattgattcacggtcctcatgccgaatataatgaaattcaaggttgggaccacttggccttattgccaacttttggtgctagaaactacgaaacccacagagttgctaccactggtgaatgggaaaagttgactcaagacaaggacttccaagacaactctaagattagaatgattgaagttatgttgccagtctttgatgctccacaaaacttggttaaacaagctcaattgactgccgctactaacgctaaacaataa

SEQ ID NO: 4280 - protein, 563 aa, Saccharomyces cerevisiae
MSEITLGKYLFERLSQVNCNTVFGLPGDFNLSLLDKLYEVKGMRWAGNANELNAAYAADGYARIKGMSCIITTFGVGELSALNGIAGSYAEHVGVLHVVGVPSISSQAKQLLLHHTLGNGDFTVFHRMSANISETTAMITDIANAPAEIDRCIRTTYTTQRPVYLGLPANLVDLNVPAKLLETPIDLSLKPNDAEAEAEVVRTVVELIKDAKNPVILADACASRHDVKAETKKLMDLTQFPVYVTPMGKGAIDEQHPRYGGVYVGTLSRPEVKKAVESADLILSIGALLSDFNTGSFSYSYKTKNIVEFHSDHIKIRNATFPGVQMKFALQKLLDAIPEVVKDYKPVAVPARVPITKSTPANTPMKQEWMWNHLGNFLREGDIVIAETGTSAFGINQTTFPTDVYAIVQVLWGSIGFTVGALLGATMAAEELDPKKRVILFIGDGSLQLTVQEISTMIRWGLKPYIFVLNNNGYTIEKLIHGPHAEYNEIQGWDHLALLPTFGARNYETHRVATTGEWEKLTQDKDFQDNSKIRMIEVMLPVFDAPQNLVKQAQLTAATNAKQ

SEQ ID NO: 4281 - DNA, 1692 bp, Saccharomyces cerevisiae
  CDS (1)..(1692)
atgtctgaaattactcttggaaaatacttatttgaaagattgaagcaagttaatgttaacaccatttttgggctaccaggcgacttcaacttgtccctattggacaagatttacgaggtagatggattgagatgggctggtaatgcaaatgagctgaacgccgcctatgccgccgatggttacgcacgcatcaagggtttatctgtgctggtaactacttttggcgtaggtgaattatccgccttgaatggtattgcaggatcgtatgcagaacacgtcggtgtactgcatgttgttggtgtcccctctatctccgctcaggctaagcaattgttgttgcatcataccttgggtaacggtgattttaccgtttttcacagaatgtccgccaatatctcagaaactacatcaatgattacagacattgctacagccccttcagaaatcgataggttgatcaggacaacatttataacacaaaggcctagctacttggggttgccagcgaatttggtagatctaaaggttcctggttctcttttggaaaaaccgattgatctatcattaaaacctaacgatcccgaagctgaaaaggaagttattgataccgtactagaattgatccagaattcgaaaaaccctgttatactatcggatgcctgtgcttctaggcacaacgttaaaaaagaaacccagaagttaattgatttgacgcaattcccagcttttgtgacacctctaggtaaagggtcaatagatgaacagcatcccagatatggcggtgtttatgtgggaacgctgtccaaacaagacgtgaaacaggccgttgagtcggctgatttgatcctttcggtcggtgctttgctctctgattttaacacaggttcgttttcctactcctacaagactaaaaatgtagtggagtttcattccgattacgtaaaggtgaagaacgctacgttcctcggtgtacaaatgaaatttgcactacaaaacttactgaaggttattcccgatgttgttaagggctacaagagcgttcccgtaccaaccaaaactcccgcaaacaaaggtgtacctgctagcacgcccttgaaacaagagtggttgtggaacgaattgtccaaattcttgcaagaaggtgatgttatcatttccgagaccggcacgtctgccttcggtatcaatcaaactatctttcctaaggacgcctacggtatctcgcaggtgttgtgggggtccatcggttttacaacaggagcaactttaggtgctgcctttgccgctgaggagattgaccccaacaagagagtcatcttattcataggtgacgggtctttgcagttaaccgtccaagaaatctccaccatgatcagatgggggttaaagccgtatctttttgtccttaacaacgacggctacactatcgaaaagctgattcatgggcctcacgcagagtacaacgaaatccagacctgggatcacctcgccctgttgcccgcatttggtgcgaaaaagtacgaaaatcacaagatcgccactacgggtgagtgggatgccttaaccactgattcagagttccagaaaaactcggtgatcagactaattgaactgaaactgcccgtctttgatgctccggaaagtttgatcaaacaagcgcaattgactgccgctacaaatgccaaacaataa

SEQ ID NO: 4282 - protein, 563 aa, Saccharomyces cerevisiae
MSEITLGKYLFERLKQVNVNTIFGLPGDFNLSLLDKIYEVDGLRWAGNANELNAAYAADGYARIKGLSVLVTTFGVGELSALNGIAGSYAEHVGVLHVVGVPSISAQAKQLLLHHTLGNGDFTVFHRMSANISETTSMITDIATAPSEIDRLIRTTFITQRPSYLGLPANLVDLKVPGSLLEKPIDLSLKPNDPEAEKEVIDTVLELIQNSKNPVILSDACASRHNVKKETQKLIDLTQFPAFVTPLGKGSIDEQHPRYGGVYVGTLSKQDVKQAVESADLILSVGALLSDFNTGSFSYSYKTKNVVEFHSDYVKVKNATFLGVQMKFALQNLLKVIPDVVKGYKSVPVPTKTPANKGVPASTPLKQEWLWNELSKFLQEGDVIISETGTSAFGINQTIFPKDAYGISQVLWGSIGFTTGATLGAAFAAEEIDPNKRVILFIGDGSLQLTVQEISTMIRWGLKPYLFVLNNDGYTIEKLIHGPHAEYNEIQTWDHLALLPAFGAKKYENHKIATTGEWDALTTDSEFQKNSVIRLIELKLPVFDAPESLIKQAQLTAATNAKQ

SEQ ID NO: 4283 - DNA, 1710 bp, Aspergillus fumigatus
  CDS (1)..(1710)
atggccactgacattgctacaagggagcttcgcaagcctgttgatgttgctgagtatctatttcggcgtctccatgaggttggaattcgctcagtgcatggtgtacctggtgactataaccttgcggcgttggactatctgccaaaatgtggtcttcactgggtaggaaactgtaacgagctcaatgcaggttacgccgccgacgggtatgcccgggtgaacggaatcagtgcattgataacgacttttggcgttggtgagctgtcggcgatcaatgccattgctggtgcatactccgagttcgtacccattgtccatatcgttggccagccacacaccaggtctcagagggacggaatgctgcttcaccacactctgggcaatggggactacaatgtctttgcaagaatgaatgccggtgtctctacgactgtcggacgcctgaatgatacccacgaagtagcgacactcattgacaatgctatccgagaatgctggatccgaagccgaccagtctatatcactctgccgaccgatatggtcactaagaagattgagggagaacgactgaataccccgattgacctttctttgccagctaatgaccctgaaaaggaagactacgtggtggatgttgttctcaagtatcttcacgcagcccaaagaccggttatcttggtcgatgcttgcgccatccgtcacaaagtgctacaagaagttcatgatcttatggaggcctccggcctgccaactttcgttgcgccaatgggcaaaggagcagtcgacgaaacgcacaaaaactacggcggtgtttacgctggagacggctccaacactggtgtgcgagaacaggtggagtcttccgatctgattcttagcataggcgcgatcaagtcggacttcaacacggctggtttcacctaccgcattggtcagttgaataccatcgatttccacagtacatacgtgcgagtgcgatactccgagtatccagacatcaacatgaaaggggtcttgagaaaggtcattcagaagttggggcgtgtcaatgcccagccggtgccacacctcagcaacaatttgcccgacgatgagccgaagtcgggggatcagccaatcacgcacagatggttctggcccaagattggccagtggctgaaggagaacgacatcgtcatcacagagactggcactgcaaactttggcatctgggaaacgaggttccctgcaggtgtcaccgcaatcagtcaagtactctggggtagcattggttactcagtgggagcttgccagggagccgcactggccgccaaagagcagggcaatcgtcgaactattctctttgtcggagatggaagcattcagctcactttgcaggagatcagcaccatgatcaggaacaagctcaaccccatcattttcgtcatctgtaatgaaggatataccattgaacggtacatccatggatgggaagcgagctacaatgacatccagcagtgggactacaagagccttccggtggcattcggagcaggaaaggattataagggttatcgagttaagaccaaagacgacatgatcaagcttttcgagaacacagaattcgcttcagcgccgttcctgcagttggtggagctatacatgccgcgggaagatgcaccatcagctctgaagttgacagctgaagcagcagcctcgcgcaacaaatag

SEQ ID NO: 4284 - protein, 569 aa, Aspergillus fumigatus
MATDIATRELRKPVDVAEYLFRRLHEVGIRSVHGVPGDYNLAALDYLPKCGLHWVGNCNELNAGYAADGYARVNGISALITTFGVGELSAINAIAGAYSEFVPIVHIVGQPHTRSQRDGMLLHHTLGNGDYNVFARMNAGVSTTVGRLNDTHEVATLIDNAIRECWIRSRPVYITLPTDMVTKKIEGERLNTPIDLSLPANDPEKEDYVVDVVLKYLHAAQRPVILVDACAIRHKVLQEVHDLMEASGLPTFVAPMGKGAVDETHKNYGGVYAGDGSNTGVREQVESSDLILSIGAIKSDFNTAGFTYRIGQLNTIDFHSTYVRVRYSEYPDINMKGVLRKVIQKLGRVNAQPVPHLSNNLPDDEPKSGDQPITHRWFWPKIGQWLKENDIVITETGTANFGIWETRFPAGVTAISQVLWGSIGYSVGACQGAALAAKEQGNRRTILFVGDGSIQLTLQEISTMIRNKLNPIIFVICNEGYTIERYIHGWEASYNDIQQWDYKSLPVAFGAGKDYKGYRVKTKDDMIKLFENTEFASAPFLQLVELYMPREDAPSALKLTAEAAASRNK

SEQ ID NO: 4285 - DNA, 1713 bp, Aspergillus oryzae
  CDS (1)..(1713)
atggcgacagatatcgctacaagggatcttcgcaagcccatagatgtcgctgagtacctcttcaggcgacttcgtgaggttggcgttcgtgcagtacacggtgttcctggggactacaacttggtggctttggattacctgccaaaatgcgatcttcattgggtaggaaactgtaatgagcttaatgccggatacgctgctgatggatacgctcgaatcaatggaatgtctgctttagtcaccacctttggtgtgggtgagctatcggcgctcaatgctattgctggtgcatactccgaatttgtgcctatcgttcacattgttggtcaaccgcatacgaaatcacagaaagatggaatgctcctccaccacaccttgggcaacggcgacttcaacgtcttcaccagaatgagtgccgacatctcttgcacacttggatgtttgaactcaactcacgaagtggcgaccctcattgataatgctatccgagaatgttggattcgtagtcgaccggtttatatctctctccctaccgatatggtgacaaagaaaatcgagggagaacggctggatacccctctcgatcttagtctaccaccgaacgatcccgaaaaagaagattacgttgtggatgtggttctcaagtatctgcacgctgcaaagaaacccgttattcttgtcgatgcttgtgctatccgccatcgtgtgctcgatgaagttcatgagttcgtggaaaaatctgggctacccacattcgtggctccaatgggtaaaggagcagtggatgagactcacaagaactacggcggtgtttacgctggtactggatcaaacccaggtgttcgtgagcaagtcgaatcttcagacttgattctgagcatcggtgctatcaagtccgatttcaacacgactgggttctcttaccgtattggccaactcaacaccattgacttccatagtacatacgtgcgcgtccggtactccgaataccctgatatcaacatgaaaggcgtccttcaaaagattgttcaaagaatgggcaatctcaatgtcggaccagtctcgccgccgtcgaacctactgccggacaacgagaaggcatcaaccgaacaggcgattacccacgcatggctctggcctactgtcgggcagtggctgaaagaaaaggatgttgttatcacggaaaccggcactgccaatttcggtatctgggacactcggttcccggcaggtgttacagccattagtcaggttctttggggtagtatcggctattcagttggagcttgtcaaggtgctgcgttggccgcaaaagagcagggccgacggactgtacttttcgtgggtgacggaagtttccagctgacgctccaggaagtcagcaccatgataagaaataaccttaaccctatcatctttgtcatttgcaacgaaggatataccatcgaacggtacattcatggatgggaagctgtttacaatgacatccagccctgggacttcttgaacattcctgtggcattcggcgcgaaggacaagtacaaaggatacaaggtcacaacccgagacgagttgagggagcttttcgcaaatgaagaatttgcttcggcaccctgtctccagttggttgagctccacatgcctcgcgacgattgcccagccagtttgaaattgacagccgaatcggccgctgagcggaacaagtccctttaa

SEQ ID NO: 4286 - protein, 570 aa, Aspergillus oryzae
MATDIATRDLRKPIDVAEYLFRRLREVGVRAVHGVPGDYNLVALDYLPKCDLHWVGNCNELNAGYAADGYARINGMSALVTTFGVGELSALNAIAGAYSEFVPIVHIVGQPHTKSQKDGMLLHHTLGNGDFNVFTRMSADISCTLGCLNSTHEVATLIDNAIRECWIRSRPVYISLPTDMVTKKIEGERLDTPLDLSLPPNDPEKEDYVVDVVLKYLHAAKKPVILVDACAIRHRVLDEVHEFVEKSGLPTFVAPMGKGAVDETHKNYGGVYAGTGSNPGVREQVESSDLILSIGAIKSDFNTTGFSYRIGQLNTIDFHSTYVRVRYSEYPDINMKGVLQKIVQRMGNLNVGPVSPPSNLLPDNEKASTEQAITHAWLWPTVGQWLKEKDVVITETGTANFGIWDTRFPAGVTAISQVLWGSIGYSVGACQGAALAAKEQGRRTVLFVGDGSFQLTLQEVSTMIRNNLNPIIFVICNEGYTIERYIHGWEAVYNDIQPWDFLNIPVAFGAKDKYKGYKVTTRDELRELFANEEFASAPCLQLVELHMPRDDCPASLKLTAESAAERNKSL

SEQ ID NO: 4287 - DNA, 1734 bp, Aspergillus parasiticus
  CDS (1)..(1734)
atggaaggggaaactctacccctcgctcaatatctgttcaagcgtctgctccaattgggtgtagactctatcttcggagtacccggtgactacaacttgacacttctagatcatgtcgtgccttcgggactcaaatgggtgggaaactgcaacgagctaaatgcaggctacgctgcggatgggtactctcggatcaaagatattggtgcggtggtgaccacctttggcgttggcgagctgtctgccatcaatgccattgcaggagcctacgcagagaaagccccggtcgtgcatattgttgggacacccatgcgcgcctcgcaagagtcgcgcgcattgattcatcacaccttcaatgatggtgactatcagcgatttgacgctatacaggaacatgtcactgtagcacaggtcagcctgagcgaccatcgcacggcaccttccgagattgacaggattttgctgcaatgcttgctgcatagtcgacccgttcgtatcgctattcctgttgacatggtgcccgtgcttgttcctgtagcgggcttgtcgtcgaagattcagattccgcccgccgtgcgccagccacaggcggaggaagcagctcttaatgctgttctcaaacgaatctacagcagcaagaaaccgatgattctggtcgacggagagacaagatcgttcggcatgctccaaagagtaaatcactttatccagacgataggctggccaacttttacatctggatttggcaagggcctagttgatgaaacattacccaacgtctacggagtatgtacgcttcatcaaaaagccttcgtcgactcttgtgatttagtcctggttttcggaccacacttcagcaacaccaactcttacaactacttcttaaaaccagcggacgagaaatctgtcctgtttagtcccaactcgatccaggttaacaaagatgtctttcgcgaccttccagtcggatatttcattgagcagctcacacaacaactcgatatatccagaataccgacacataaacatgacctcgtccacccatcactcaggacactccctgaagtatcccctaccgatctagtcacacagaccgggggcttctggaagcgattctcaccttttctccgaactggagacattatccttggcgagaccggaacaccaggctacggtgtcaatgacttcatactacccccccaaacccgcctattcaaaccagccacctggctatcaatcggctacatgctcccagccgcactaggagcaagccacgcacagcgagatctagttgcctccgaccaataccacagtctatctaaccctcgcacgatcctatttatcggcgacggcagcttccaaatgaccgttcaagaacttagcactatcatccaccaaaaactcaatgtcatcatcttcttaatcaacaatgatggatacactatcgaaaggtgtattcatggccgcaaccaggcatataacgatgtcgctccatggcggtacctcaaagctgcagagttcttcggcgcagaccaggacggcgagtataaggcgtcgacatgggaagtccggacctgggcggatttggatcgtgtattgaatgattcacagctggctgatgggaagggtttgcggatggtggaagtttttatggagaggcttgatgcaccggatgtattgatgggtttgttaaataatcaagttttgagggagaatgcgcagagtaggctttga

SEQ ID NO: 4288 - protein, 577 aa, Aspergillus parasiticus
MEGETLPLAQYLFKRLLQLGVDSIFGVPGDYNLTLLDHVVPSGLKWVGNCNELNAGYAADGYSRIKDIGAVVTTFGVGELSAINAIAGAYAEKAPVVHIVGTPMRASQESRALIHHTFNDGDYQRFDAIQEHVTVAQVSLSDHRTAPSEIDRILLQCLLHSRPVRIAIPVDMVPVLVPVAGLSSKIQIPPAVRQPQAEEAALNAVLKRIYSSKKPMILVDGETRSFGMLQRVNHFIQTIGWPTFTSGFGKGLVDETLPNVYGVCTLHQKAFVDSCDLVLVFGPHFSNTNSYNYFLKPADEKSVLFSPNSIQVNKDVFRDLPVGYFIEQLTQQLDISRIPTHKHDLVHPSLRTLPEVSPTDLVTQTGGFWKRFSPFLRTGDIILGETGTPGYGVNDFILPPQTRLFKPATWLSIGYMLPAALGASHAQRDLVASDQYHSLSNPRTILFIGDGSFQMTVQELSTIIHQKLNVIIFLINNDGYTIERCIHGRNQAYNDVAPWRYLKAAEFFGADQDGEYKASTWEVRTWADLDRVLNDSQLADGKGLRMVEVFMERLDAPDVLMGLLNNQVLRENAQSRL

SEQ ID NO: 4289 - DNA, 1758 bp, Emericella nidulans
  CDS (1)..(1758)
atggccgacattgctacaagggagcttcgccaacctatcgacattgccgagtacctcttccgccgactacacgaagttggaattcggtcagtgcacggtgttcccggggattataacctcgctgcactcgattacttgcctaagtgtggacttcattgggtggggaactgcaatgaactcaatgcgggttatgcggccgatggctatgctcgagtcaacggaatcgctgctctagtcacaacattcggagttggtgagctctctgcgatcaatgccattgcgggagcctactcggaattcgttcctatcatccacattgtcggtcaacctcattcaaggtcccagaaagatgggttgctgctacatcatactcttggtaacggagattataacgtattttcgtcgatgaacaagggaatatctgtgactacagcgaacctgaacgatacttacgatgctgccaccctcatcgataatgctatccgtgaatgttggatccacagccgacctgtttatcttgccctacctactgatatgatcacgaagaagattgaaggcgaaaggctcaagactcccattgacctttcattgcccgccaatgatcctgagaaagaagattacgtggtcgatgtcgtgctcaagtatttgcacgcagctaagaaccctgttatcctagtcgacgcctgcgctattcgccaccgcgtgcttgaggaagtgcatgacttgatagaagtatctgggctgcctacttttgtagccccgatgggcaaaggcgcagttaatgaaactcatagatgttatggcggtgtttatgcaggaaccgggtcaaaccctggggttcgcgagcaggtggaatcttcagacctcatactcagtattggtgccatcaaatccgactttaacacggctgggttctcataccgcattggccagttgaatacgattgacttccacagcacctacgtgcgcgtgagatactctgaatatcctgacacgaacatgaagggagttttacgcaaggtcattcaacgactgggctttatcaaggctgaccctgtcccacacatatcgaacgcacttccggaacatgaaaaaaattcgagcgagcagagaatcactcatgcttggatgtggcccatggttgggcaatggctgaaggagaatgacattgtcattaccgagactggaacggcaaattttggaatctgggacactcgcttcccatctggagttacagccatcagccaggtcctttggggcagtattggttattcggttggcgcctgtcagggtgctgctctagctgcaaaggaacagggcaatcgccgaacggtgttgtgggtgggcgacggcagcctgcaacttactctgcaggaaatcagcaccatgatcaggaataatctcaacccaattatcttcgtcatctgcaacgagggttataccatcgagcggttcatccacggatgggatgaaagctacaacgacatccagacctgggatatcaagggcctccctgttgcgtttggcggcaagggcagatacaagggttacaaagttacgaccagggacgagctcaccaagctgttcgctagcgaagagttctcctccgctccatgcttgcaggtgagtctttgtgacctcactcattacttatcagatgctaattttgagcagttggttgaggttcatatgcctcgtgaagacgctcccgcctccctcaaaatcacagctgaggccgctgcgtctagaaacaaataa

SEQ ID NO: 4290 - protein, 585 aa, Emericella nidulans
MADIATRELRQPIDIAEYLFRRLHEVGIRSVHGVPGDYNLAALDYLPKCGLHWVGNCNELNAGYAADGYARVNGIAALVTTFGVGELSAINAIAGAYSEFVPIIHIVGQPHSRSQKDGLLLHHTLGNGDYNVFSSMNKGISVTTANLNDTYDAATLIDNAIRECWIHSRPVYLALPTDMITKKIEGERLKTPIDLSLPANDPEKEDYVVDVVLKYLHAAKNPVILVDACAIRHRVLEEVHDLIEVSGLPTFVAPMGKGAVNETHRCYGGVYAGTGSNPGVREQVESSDLILSIGAIKSDFNTAGFSYRIGQLNTIDFHSTYVRVRYSEYPDTNMKGVLRKVIQRLGFIKADPVPHISNALPEHEKNSSEQRITHAWMWPMVGQWLKENDIVITETGTANFGIWDTRFPSGVTAISQVLWGSIGYSVGACQGAALAAKEQGNRRTVLWVGDGSLQLTLQEISTMIRNNLNPIIFVICNEGYTIERFIHGWDESYNDIQTWDIKGLPVAFGGKGRYKGYKVTTRDELTKLFASEEFSSAPCLQVSLCDLTHYLSDANFEQLVEVHMPREDAPASLKITAEAAASRNK

SEQ ID NO: 4291 - DNA, 1695 bp, Hanseniaspora uvarum
  CDS (1)..(1695)
atgtctgaaattactttgggtagatacgtcttcgaaagaattaaacaagtcggtgttaacaccatcttcggtttaccaggtgactttaacttatctctattagataagatctacgaagttgaaggtttaagatgggctgcttccttaaatgaattaaacgctgcttacgccgctgatggttactccagaatcaaaggtttaggtgttatcatcaccaccttcggtgtcggtgaattatctgccttaaacggtattgccggtgcctacgctgaacacgttggtgttttacatattgttggtgttccatccttagcctcccaagctaagcaattattattacaccacaccttaggtaacggtgacttcgatgttttccacagaatgtctgctaacatctccgaaaccactgctatgatcactgatttagctgctgccccagctgaaattgacagatgtatcagaactgcttacattgctcaaagaccagtttacttaggtttaccagctaacttggttgacttaaacgtcccagctaagttattagaaaccaagatcgacttagccttaaaggccaacgatgctgaagctgaaaacgaagttgttgaaaccatcttagctttagttgctgatgccaagaacccagttatcttatctgatgcttgtgcttccagacacaatgtcaaggctgaagtcaaacaattaattgatgccactcaatttccagccttcgttactccattaggtaaaggttccattgatgaaaagcacccaagattcggtggtgtttacgtcggtactttatcttctccagaagttaagcaatctgttgaatctgctgatttaatcttatctgtcggtgctttgttatctgatttcaacactggttctttctcttactcctaccaaaccaagaacattgttgaattccactccgattacatcaagatcaagaatgcttctttcccaggtgttcaaatgaaattcgtcttagaaaagttgattgctaaggttggtgctaagattgccaactactctccagtcccagttccagctggtttaccaaagaacgctccagttgctgactctactccattagcccaagaatggttatggaacgaattaggtgaattcttagaagaaggtgatattgttgttactgaaactggtacctccgcttttggtatcaaccaaaccagattcccaactgatgcttacggtatttcccaagttctatggggttccattggttactccgttggtgccatggttggtgctacctttgccgctgaagaattagacaaggccaagagagttatcttattcgttggtgatggttctttacaattaactgtccaagaaattgcttgtttgatcagatggggtttgaagccatacatcttcgttttaaacaacaacggttacaccatcgaaaagttaattcacggtccaaccgctcaatacaacatgatccaaaactggaagcaacttagatatcttaccaacttcggtgctactgactacgaagctattccagtcaagactgttggtgaatggaagaagttaactgctgatccagccttcaagaagaactctactatcagattaattgaagtcttcttaccagaaatggatgctccatcttctttagttgctcaagctaacttaactgctgctatcaacgccaagcaagattaa

SEQ ID NO: 4292 - protein, 564 aa, Hanseniaspora uvarum
MSEITLGRYVFERIKQVGVNTIFGLPGDFNLSLLDKIYEVEGLRWAASLNELNAAYAADGYSRIKGLGVIITTFGVGELSALNGIAGAYAEHVGVLHIVGVPSLASQAKQLLLHHTLGNGDFDVFHRMSANISETTAMITDLAAAPAEIDRCIRTAYIAQRPVYLGLPANLVDLNVPAKLLETKIDLALKANDAEAENEVVETILALVADAKNPVILSDACASRHNVKAEVKQLIDATQFPAFVTPLGKGSIDEKHPRFGGVYVGTLSSPEVKQSVESADLILSVGALLSDFNTGSFSYSYQTKNIVEFHSDYIKIKNASFPGVQMKFVLEKLIAKVGAKIANYSPVPVPAGLPKNAPVADSTPLAQEWLWNELGEFLEEGDIVVTETGTSAFGINQTRFPTDAYGISQVLWGSIGYSVGAMVGATFAAEELDKAKRVILFVGDGSLQLTVQEIACLIRWGLKPYIFVLNNNGYTIEKLIHGPTAQYNMIQNWKQLRYLTNFGATDYEAIPVKTVGEWKKLTADPAFKKNSTIRLIEVFLPEMDAPSSLVAQANLTAAINAKQD

SEQ ID NO: 4293 - DNA, 1713 bp, Neurospora crassa
  CDS (1)..(1713)
atggtagcccaacaacaaggaaagttcacggtgggcgactacctcgccgagcgtcttgctcaggtcggcgtccgccaccactttgtcgtccccggcgactacaacctcatcctcctcgacaagctacaagctcacccggatctcaaagaggttggttgcgccaacgagctcaactgctctcttgccgccgaaggctatgcccgtgccaacggcatctccgcctgcgttgtcacttacagcgttggtgccctctcggccttcaacggcaccggcagtgcctacgcagagaacctccccttggtcctcatcagcggctcgcccaacaccaacgaccccagtcaatatcacatccttcaccataccctcggccacccggactacacctaccagtatgagatggccaagaagattacctgctgcgctgtggccattccccgcgccatcgatgcaccccgcctgatcgaccgtgccctccgcgccgccatccttgcccggaagccctgctacatcgagatccccaccaacctcgccggagctacctgcgtgcgccccggccccatcagcgccatcaccgaccccatcaccagcgacaagagcgctcttgaggccgccgccaagtgcgctgccgagtatctcgacggcaagctcaagcccgtcatcctggttggccccaaagctggccgtgccggttccgagaaagagctcatcgagttcgccgaggccatgggctgtgctgttgccctgcaacctgccgccaagggcatgttccccgaagaccacaagcagttcgtcggcatcttctggggacaagttagctccgatgccgcagacgccatggtgcactgggccgacgccatgatttgcgtcggcgccgtctttaacgactacagcacggtcggatggactgccgtgcccaacatcccgctcatgaccgtcgatatggatcatgtcaccttccccggcgcacacttcagccgcgtccggatgtgcgaattcctcagccacctggccacccaggtcaccttcaacgactccaccatgatcgagtacaagcgcctcaagcccgaccccccgcacgtgcacacggccgaacgcgaggagccgctctcgcgcaaggagatctcgcgacaggtgcaggagatgttgacagacaagaccagcctgttcgtcgacacgggcgactcgtggttcaacggcatccagctgaagcttcctcctggcgccaagttcgagatcgagatgcaatggggccacatcggctggtcgatccctgcggcctttggctacgccttgcgccaccctgacaggcacaccattgtgctggtcggcgacggatctttccaggtgacggcccaggaggtgtcgcagatggtgcgcttcaaggtacccatcaccatcatgctcatcaacaaccgcggctacacgatcgaggtcgagatccacgacggttcctacaacaagatcaagaactgggactacgccatgttggtggaggccttcaacagcaccgacggccacgcaaagggcctgctggccaacacggccggcgagctcgctgacgctatcaaggtggctgagagccacaaggagggtcctacgctgatcgagtgcacgattgatcaggatgactgcagtaaggagctcatcacctggggtcattacgtggctgctgcgaatgcgaggcctccccgcaacatgtcggtgcaggagtaa

SEQ ID NO: 4294 - protein, 570 aa, Neurospora crassa
MVAQQQGKFTVGDYLAERLAQVGVRHHFVVPGDYNLILLDKLQAHPDLKEVGCANELNCSLAAEGYARANGISACVVTYSVGALSAFNGTGSAYAENLPLVLISGSPNTNDPSQYHILHHTLGHPDYTYQYEMAKKITCCAVAIPRAIDAPRLIDRALRAAILARKPCYIEIPTNLAGATCVRPGPISAITDPITSDKSALEAAAKCAAEYLDGKLKPVILVGPKAGRAGSEKELIEFAEAMGCAVALQPAAKGMFPEDHKQFVGIFWGQVSSDAADAMVHWADAMICVGAVFNDYSTVGWTAVPNIPLMTVDMDHVTFPGAHFSRVRMCEFLSHLATQVTFNDSTMIEYKRLKPDPPHVHTAEREEPLSRKEISRQVQEMLTDKTSLFVDTGDSWFNGIQLKLPPGAKFEIEMQWGHIGWSIPAAFGYALRHPDRHTIVLVGDGSFQVTAQEVSQMVRFKVPITIMLINNRGYTIEVEIHDGSYNKIKNWDYAMLVEAFNSTDGHAKGLLANTAGELADAIKVAESHKEGPTLIECTIDQDDCSKELITWGHYVAAANARPPRNMSVQE

SEQ ID NO: 4295 - DNA, 1707 bp, Zymomonas mobilis
  CDS (1)..(1707): transl_table=11
atgagttatactgtcggtacctatttagcggagcggcttgtccagattggtctcaagcatcacttcgcagtcgcgggcgactacaacctcgtccttcttgacaacctgcttttgaacaaaaacatggagcaggtttattgctgtaacgaactgaactgcggtttcagtgcagaaggttatgctcgtgccaaaggcgcagcagcagccgtcgttacctacagcgtcggtgcgctttccgcatttgatgctatcggtggcgcctatgcagaaaaccttccggttatcctgatctccggtgctccgaacaacaatgatcacgctgctggtcacgtgttgcatcacgctcttggcaaaaccgactatcactatcagttggaaatggccaagaacatcacggccgccgctgaagcgatttacaccccggaagaagctccggctaaaatcgatcacgtgattaaaactgctcttcgtgagaagaagccggtttatctcgaaatcgcttgcaacattgcttccatgccctgcgccgctcctggaccggcaagcgcattgttcaatgacgaagccagcgacgaagcttctttgaatgcagcggttgaagaaaccctgaaattcatcgccaaccgcgacaaagttgccgtcctcgtcggcagcaagctgcgcgcagctggtgctgaagaagctgctgtcaaatttgctgatgctctcggtggcgcagttgctaccatggctgctgcaaaaagcttctttccagaagaaaacccgcattacatcggcacctcatggggtgaagtcagctatccgggcgttgaaaagacgatgaaagaagccgatgcggttatcgctctggctcctgtcttcaacgactactccaccactggttggacggatattcctgatcctaagaaactggttctcgctgaaccgcgttctgtcgtcgttaacggcattcgcttccccagcgtccatctgaaagactatctgacccgtttggctcagaaagtttccaagaaaaccggtgcattggacttcttcaaatccctcaatgcaggtgaactgaagaaagccgctccggctgatccgagtgctccgttggtcaacgcagaaatcgcccgccaagtcgaagctcttctgaccccgaacacgacggttattgctgaaaccggtgactcttggttcaatgctcagcgcatgaagctcccgaacggtgctcgcgttgaatatgaaatgcagtggggtcacattggttggtccgttcctgccgccttcggttatgccgtcggtgctccggaacgtcgcaacatcctcatggttggtgatggttccttccagctgacggctcaggaagtcgctcagatggttcgcctgaaactgccggttatcatcttcttgatcaataactatggttacaccatcgaagttatgatccatgatggtccgtacaacaacatcaagaactgggattatgccggtctgatggaagtgttcaacggtaacggtggttatgacagcggtgctggtaaaggcctgaaggctaaaaccggtggcgaactggcagaagctatcaaggttgctctggcaaacaccgacggcccaaccctgatcgaatgcttcatcggtcgtgaagactgcactgaagaattggtcaaatggggtaagcgcgttgctgccgccaacagccgtaagcctgttaacaagctcctctag

SEQ ID NO: 4296 - protein, 568 aa, Zymomonas mobilis
MSYTVGTYLAERLVQIGLKHHFAVAGDYNLVLLDNLLLNKNMEQVYCCNELNCGFSAEGYARAKGAAAAVVTYSVGALSAFDAIGGAYAENLPVILISGAPNNNDHAAGHVLHHALGKTDYHYQLEMAKNITAAAEAIYTPEEAPAKIDHVIKTALREKKPVYLEIACNIASMPCAAPGPASALFNDEASDEASLNAAVEETLKFIANRDKVAVLVGSKLRAAGAEEAAVKFADALGGAVATMAAAKSFFPEENPHYIGTSWGEVSYPGVEKTMKEADAVIALAPVFNDYSTTGWTDIPDPKKLVLAEPRSVVVNGIRFPSVHLKDYLTRLAQKVSKKTGALDFFKSLNAGELKKAAPADPSAPLVNAEIARQVEALLTPNTTVIAETGDSWFNAQRMKLPNGARVEYEMQWGHIGWSVPAAFGYAVGAPERRNILMVGDGSFQLTAQEVAQMVRLKLPVIIFLINNYGYTIEVMIHDGPYNNIKNWDYAGLMEVFNGNGGYDSGAGKGLKAKTGGELAEAIKVALANTDGPTLIECFIGREDCTEELVKWGKRVAAANSRKPVNKLL

SEQ ID NO: 4297 - DNA, 1794 bp, Oryza sativa
  CDS (1)..(1794)
atggacaccacgatcggctcggtgccgacggcctccgatgcggcggcgcctgcccccgcggcgaactccgcgccgagggaggccacgctggggcggcacctcgcgcggcggctggcggaggtcggggcgcgcgacgtgttcacggtgccgggggacttcaacctcacgctgctcgacgagctcgaggcggaggcgggggcggggcacggcggggtgcggctcgtcgggtgctgcaacgagctcaacgcggcgtacgccgccgacgggtacgcccgcgcgcgcggcggcggggtcggggcgtgcgccgtcacgttcaccgtcggtggcctcagcgccatcaacgccgtcgccggcgcgttcagcgagaacctccccgtggtgtgcatcgttgggggccccaacagcaacgactacgggagcaaccgcatcctgcatcacaccatcgggctgcctgatttcacgcaggagctcaggtgcttccagactgtcacttgctatcaggcggtggtgaacaacttggaggatgcacatgagcagattgatgctgccatctccactgcaataaaggagagcaagcctgtttacataagcatcagctgcaacctcccctctatcccacatcccacctttagccgccaccctgttcctttcttcctgtccccaagattatcaaaccagatgaacctggaggcagcagtggaaactgctgcagctttcctgaacaaagcagtcaagccagtcctcgttggtggaccaaaaatgagggtggccaaagcatgcaaatccttcgtagagctggctgatgcctgtggttatcctgttgcggtcatgccttctgcaaagggtcttgtgccagagcaccatcctaggtttattggcacgtactggggtgctgtgagcactccattttgtgctgagatcgtcgagtcagctgatgcatatctatttgctggcccaatatttaatgactacagctcggttggatactcactacttctcaagaaggagaaggccatcatcgtccagccagaccgggtggtgataggtcatgggcctgcgtttgggtgtgttctgatgaaggacttcctgcatgcactttcagcacggctgaagaaaaacacggctgcatatgagaactatcgtcggatttatgtgcctccgggtgaacctcctttgtctgagcctggagagccattgagagtgaatgtacttttccagcatattcagaaaatgttgtcagccaactcggctgtcattgctgagactggagactcttggtttaattgccagaagctaaagctaccagagggctgtgggtacgaatttcaaatgcaatatggatcaattggttggtcggtaggtgcaactctgggatatgcaaaggctgctaaggataagcgagtcattgcttgcatcggagatggaagctttcaggtgacggcacaagaagtgtcgacaatgcttcgttgggggcagaaaagcatcatcttcctcataaacaatggagggtacaccatcgaggtggagatccatgacggtccttacaatgtcatcaagaattggaactacaccggtgtggtggaagcgttccataatggcgaggggaagtgctacacggcaaaggtccgaactgaggaggaactgaaggaagcaattgaagaagctcagggacctaagaaggattgcttgtgcttcatagaggtgattgtacacaaggatgacacaagtaaggagcttcttgagtggggctccagagtttctgctgcaaatagccgcccaccaaatcctcagtga

SEQ ID NO: 4298 - protein, 597 aa, Oryza sativa
MDTTIGSVPTASDAAAPAPAANSAPREATLGRHLARRLAEVGARDVFTVPGDFNLTLLDELEAEAGAGHGGVRLVGCCNELNAAYAADGYARARGGGVGACAVTFTVGGLSAINAVAGAFSENLPVVCIVGGPNSNDYGSNRILHHTIGLPDFTQELRCFQTVTCYQAVVNNLEDAHEQIDAAISTAIKESKPVYISISCNLPSIPHPTFSRHPVPFFLSPRLSNQMNLEAAVETAAAFLNKAVKPVLVGGPKMRVAKACKSFVELADACGYPVAVMPSAKGLVPEHHPRFIGTYWGAVSTPFCAEIVESADAYLFAGPIFNDYSSVGYSLLLKKEKAIIVQPDRVVIGHGPAFGCVLMKDFLHALSARLKKNTAAYENYRRIYVPPGEPPLSEPGEPLRVNVLFQHIQKMLSANSAVIAETGDSWFNCQKLKLPEGCGYEFQMQYGSIGWSVGATLGYAKAAKDKRVIACIGDGSFQVTAQEVSTMLRWGQKSIIFLINNGGYTIEVEIHDGPYNVIKNWNYTGVVEAFHNGEGKCYTAKVRTEEELKEAIEEAQGPKKDCLCFIEVIVHKDDTSKELLEWGSRVSAANSRPPNPQ

SEQ ID NO: 4299 - DNA, 1755 bp, Oryza sativa
  CDS (1)..(1755)
atggacaccacgatcggctcggtgccgacggcctccgatgcggcggcgcctgcccccgcggcgaactccgcgccgagggaggtcggggcgcgcgacgtgttcacggtgccgggggacttcaacctcacgctgctcgacgagctcgaggcggaggcgggggcggggcacggcggggtgcggctcgtcgggtgctgcaacgagctcaacgcggcgtacgccgccgacgggtacgcccgcgcgcgcggcggcggggtcggggcgtgcgccgtcacgttcaccgtcggtggcctcagcgccatcaacgccgtcgccggcgcgttcagcgagaacctccccgtggtgtgcatcgttgggggccccaacagcaacgactacgggagcaaccgcatcctgcatcacaccatcgggctgcctgatttcacgcaggagctcaggtgcttccagactgtcacttgctatcaggcggtggtgaacaacttggaggatgcacatgagcagattgatgctgccatctccactgcaataaaggagagcaagcctgtttacataagcatcagctgcaacctcccctctatcccacatcccacctttagccgccaccctgttcctttcttcctgtccccaagattatcaaaccagatgaacctggaggcagcagtggaaactgctgcagctttcctgaacaaagcagtcaagccagtcctcgttggtggaccaaaaatgagggtggccaaagcatgcaaatccttcgtagagctggctgatgcctgtggttatcctgttgcggtcatgccttctgcaaagggtcttgtgccagagcaccatcctaggtttattggcacgtactggggtgctgtgagcactccattttgtgctgagatcgtcgagtcagctgatgcatatctatttgctggcccaatatttaatgactacagctcggttggatactcactacttctcaagaaggagaaggccatcatcgtccagccagaccgggtggtgataggtcatgggcctgcgtttgggtgtgttctgatgaaggacttcctgcatgcactttcagcacggctgaagaaaaacacggctgcatatgagaactatcgtcggatttatgtgcctccgggtgaacctcctttgtctgagcctggagagccattgagagtgaatgtacttttccagcatattcagaaaatgttgtcagccaactcggctgtcattgctgagactggagactcttggtttaattgccagaagctaaagctaccagagggctgtgggtacgaatttcaaatgcaatatggatcaattggttggtcggtaggtgcaactctgggatatgcaaaggctgctaaggataagcgagtcattgcttgcatcggagatggaagctttcaggtgacggcacaagaagtgtcgacaatgcttcgttgggggcagaaaagcatcatcttcctcataaacaatggagggtacaccatcgaggtggagatccatgacggtccttacaatgtcatcaagaattggaactacaccggtgtggtggaagcgttccataatggcgaggggaagtgctacacggcaaaggtccgaactgaggaggaactgaaggaagcaattgaagaagctcagggacctaagaaggattgcttgtgcttcatagaggtgattgtacacaaggatgacacaagtaaggagcttcttgagtggggctccagagtttctgctgcaaatagccgcccaccaaatcctcagtga

SEQ ID NO: 4300 - protein, 584 aa, Oryza sativa
MDTTIGSVPTASDAAAPAPAANSAPREVGARDVFTVPGDFNLTLLDELEAEAGAGHGGVRLVGCCNELNAAYAADGYARARGGGVGACAVTFTVGGLSAINAVAGAFSENLPVVCIVGGPNSNDYGSNRILHHTIGLPDFTQELRCFQTVTCYQAVVNNLEDAHEQIDAAISTAIKESKPVYISISCNLPSIPHPTFSRHPVPFFLSPRLSNQMNLEAAVETAAAFLNKAVKPVLVGGPKMRVAKACKSFVELADACGYPVAVMPSAKGLVPEHHPRFIGTYWGAVSTPFCAEIVESADAYLFAGPIFNDYSSVGYSLLLKKEKAIIVQPDRVVIGHGPAFGCVLMKDFLHALSARLKKNTAAYENYRRIYVPPGEPPLSEPGEPLRVNVLFQHIQKMLSANSAVIAETGDSWFNCQKLKLPEGCGYEFQMQYGSIGWSVGATLGYAKAAKDKRVIACIGDGSFQVTAQEVSTMLRWGQKSIIFLINNGGYTIEVEIHDGPYNVIKNWNYTGVVEAFHNGEGKCYTAKVRTEEELKEAIEEAQGPKKDCLCFIEVIVHKDDTSKELLEWGSRVSAANSRPPNPQ

SEQ ID NO: 4301 - DNA, 1818 bp, Oryza sativa
  CDS (1)..(1818)
atggagacccatatcggatccgtggacggggcggcggcggcggcggacaacggcgcggtggggtgcccggcgtcggcggtggggtgcccgatgacctcggcgcgccccgcgcccgtgtcggccggcgaggcgtcgctgggacggcacctggcgaggcggctggtgcaggtgggcgtcagcgacgtgttcgccgtgcccggggacttcaacctcacgctgctcgaccacctgatcgccgagcccgggctgcgcctcgtcggctgctgtaacgagctcaacgccgggtacgcggccgacggctacgcccgcgcgcgcggcgtcggcgcctgcgccgtcacgttcaccgtcggcggactcagcgtgctcaacgccatcgccggcgcgtacagcgagaacctgccggtcatctgcatcgccggagggccgaactccaacgactacggcaccaaccgcatcctccaccacaccatcggcctcccggacttctcccaggagctccgctgcttccagaccgtcacttgccaccaggcggtggtgaccaatctggaggatgcgcacgagcagatcgacaccgccatcgcgacggcgctgcgggagagcaagcctgtgtacctcagcatcagctgcaatctcccagggctgcctcaccccacgtttagccgcgaccccgtccccttcttcctcgcccccaggttgagtaacaagatgggtctggaggctgcggtggaggccactgtcgagttcctgaacaaggcggtgaagccggtgctcgttggcggccccaagctgcgtgtggcaaaggcagggaaggccttcgtcgaccttgttgatgccagtggctacgcctacgcggtgatgccgtcggccaaggggctcgtgccagagacgcacccccacttcatcggcacctactggggtgccgtcagcacggccttctgtgccgagatcgtcgagtcggccgacgcctacctcttcgcagggccaatcttcaatgactacagctctgtcggctactccttcctcctcaagaaggacaaggccataattgtgcaaccggagcgtgtcatcgtcgggaatggcccggcgtttgggtgcgtcatgatgaaggagttcttatctgagctggctaagcgcgtcaacaagaacaccactgcttatgagaactacaagaggatcttcgtgcctgagggccagccgctggagagcgagccgaatgagccgctgcgcgttaatgtgctcttcaagcacgtccagaagatgctgaacagtgacagtgctgtgattgccgagactggtgactcctggttcaattgccagaagctgaagctccctgagggctgcgggtatgaattccaaatgcagtatggttccattggatggtcagtgggtgcattgctcggatatgctcagggcgctaaggacaagcgtgtgattgcctgtattggtgatgggagtttccaggtgacggcacaggatgtgtcaacaatgattcgctgtgcacagaacagcataatcttcctgatcaacaacggcgggtacaccattgaggtggagatccatgacggtccatacaacgtcatcaagaactggaactacactggccttgtggatgccatccacaatggagagggcaaatgctggacttctaaggtgaagtgcgaggaggagctgacggaggcgatcgggatggcgctgggggagaaggactgcctgtgcttcattgaggtgatcgcgcacaaggacgacaccagcaaagagctgctggaatggggatcgagggtttctgctgccaactccaggccaccaaatcctcagtag

SEQ ID NO: 4302 - protein, 605 aa, Oryza sativa
METHIGSVDGAAAAADNGAVGCPASAVGCPMTSARPAPVSAGEASLGRHLARRLVQVGVSDVFAVPGDFNLTLLDHLIAEPGLRLVGCCNELNAGYAADGYARARGVGACAVTFTVGGLSVLNAIAGAYSENLPVICIAGGPNSNDYGTNRILHHTIGLPDFSQELRCFQTVTCHQAVVTNLEDAHEQIDTAIATALRESKPVYLSISCNLPGLPHPTFSRDPVPFFLAPRLSNKMGLEAAVEATVEFLNKAVKPVLVGGPKLRVAKAGKAFVDLVDASGYAYAVMPSAKGLVPETHPHFIGTYWGAVSTAFCAEIVESADAYLFAGPIFNDYSSVGYSFLLKKDKAIIVQPERVIVGNGPAFGCVMMKEFLSELAKRVNKNTTAYENYKRIFVPEGQPLESEPNEPLRVNVLFKHVQKMLNSDSAVIAETGDSWFNCQKLKLPEGCGYEFQMQYGSIGWSVGALLGYAQGAKDKRVIACIGDGSFQVTAQDVSTMIRCAQNSIIFLINNGGYTIEVEIHDGPYNVIKNWNYTGLVDAIHNGEGKCWTSKVKCEEELTEAIGMALGEKDCLCFIEVIAHKDDTSKELLEWGSRVSAANSRPPNPQ

SEQ ID NO: 4303 - DNA, 1659 bp, Oryza sativa
  CDS (1)..(1659)
atggagacccatatcggatccgtggacggggcggcggcggcggcggacaacggcgcggtggggtgcccggcgtcggcggtggggtgcccgatgacctcggcgcgccccgcgcccgtgtcggccggcgaggcgtcgctgggacggcacctggcgaggcggctggtgcaggtgggcgtcagcgacgtgttcgccgtgcccggggacttcaacctcacgctgctcgaccacctgatcgccgagcccgggctgcgcctcgtcggctgctgtaacgagctcaacgccgggtacgcggccgacggctacgcccgcgcgcgcggcgtcggcgcctgcgccgtcacgttcaccgtcggcggactcagcgtgctcaacgccatcgccggcgcgtacagcgagaacctgccggtcatctgcatcgccggagggccgaactccaacgactacggcaccaaccgcatcctccaccacaccatcggcctcccggacttctcccaggagctccgctgcttccagaccgtcacttgccaccaggcggtggtgaccaatctggaggatgcgcacgagcagatcgacaccgccatcgcgacggcgctgcgggagagcaagcctgtgtacctcagcatcagctgcaatctcccagggctgcctcaccccacgtttagccgcgaccccgtccccttcttcctcgcccccaggttgagtaacaagatgggtctggaggctgcggtggaggccactgtcgagttcctgaacaaggcggtgaagccggtgctcgttggcggccccaagctgcgtgtggcaaaggcagggaaggccttcgtcgaccttgttgatgccagtggctacgcctacgcggtgatgccgtcggccaaggggctcgtgccagagacgcacccccacttcatcggcacctactggggtgccgtcagcacggccttctgtgccgagatcgtcgagtcggccgacgcctacctcttcgcagggccaatcttcaatgactacagctctgtcggctactccttcctcctcaagaaggacaaggccataattgtgcaaccggagcgtgtcatcgtcgggaatggcccggcgtttgggtgcgtcatgatgaaggagttcttatctgagctggctaagcgcgtcaacaagaacaccactgcttatgagaactacaagaggatcttcgtgcctgagggccagccgctggagagcgagccgaatgagccgctgcgcgttaatgtgctcttcaagcacgtccagaagatgctgaacagtgacagtgctgtgattgccgagactggtgactcctggttcaattgccagaagctgaagctccctgagggctgcgggtatgaattccaaatgcagtatggttccattggatggtcagtgggtgcattgctcggatatgctcagggcgctaaggacaagcgtgtgattgcctgtattggtgatgggagtttccaggtgacggcacaggatgtgtcaacaatgattcgctgtgcacagaacagcataatcttcctgatcaacaacggcgggtacaccattgaggtggagatccatgacggtccatacaacgtcatcaagaactggaactacactggccttgtggatgccatccacaatggagagggcaaatgctggacttctaaggtatgctaa

SEQ ID NO: 4304 - protein, 552 aa, Oryza sativa
METHIGSVDGAAAAADNGAVGCPASAVGCPMTSARPAPVSAGEASLGRHLARRLVQVGVSDVFAVPGDFNLTLLDHLIAEPGLRLVGCCNELNAGYAADGYARARGVGACAVTFTVGGLSVLNAIAGAYSENLPVICIAGGPNSNDYGTNRILHHTIGLPDFSQELRCFQTVTCHQAVVTNLEDAHEQIDTAIATALRESKPVYLSISCNLPGLPHPTFSRDPVPFFLAPRLSNKMGLEAAVEATVEFLNKAVKPVLVGGPKLRVAKAGKAFVDLVDASGYAYAVMPSAKGLVPETHPHFIGTYWGAVSTAFCAEIVESADAYLFAGPIFNDYSSVGYSFLLKKDKAIIVQPERVIVGNGPAFGCVMMKEFLSELAKRVNKNTTAYENYKRIFVPEGQPLESEPNEPLRVNVLFKHVQKMLNSDSAVIAETGDSWFNCQKLKLPEGCGYEFQMQYGSIGWSVGALLGYAQGAKDKRVIACIGDGSFQVTAQDVSTMIRCAQNSIIFLINNGGYTIEVEIHDGPYNVIKNWNYTGLVDAIHNGEGKCWTSKVC

SEQ ID NO: 4305 - DNA, 1836 bp, Oryza sativa
  CDS (1)..(1836)
atggagcttgccctggttggcaacccttcgaatggcgtggcgaagccgtcgtgcaactccgtcggctcgctgcccgtcgtcagctccaacgccgtcatcaacccgccggtgaccagcgcggcgggcgccacgctcggcaggcacctcgcgaggcgcctcgtgcagatcggcgccaccgacgtgttcgccgtccccggggacttcaacctcaccctgctcgactacctcatcgccgagcccgggctcaagctcatcggctgctgcaatgagctcaacgccgggtacgcggccgacggctacgcccgcgcccgcggcgtcggcgcctgcgccgtcacgttcaccgtcggtggcctcagcgtgctcaacgctatcgccggcgcctacagcgagaacctccccgtgatctgcatcgtcggcgggcccaactccaacgactacggcaccaaccgcatcctgcaccacaccatcggcctcccggacttctcacaggagctccgctgcttccagaccatcacctgctaccaggccgtcattaacaacctcgacgacgcgcacgagcagatcgacaccgccatcgcgacggcgctaagggagagcaagcccgtctacatcagcgtgggctgcaacctggcaggcctctcccacccaacgttcagtcgcgagccagtgccactattcatctcgccaaggctgagcaacaaggcgaacttggagtacgccgtcgaagccgcggcggacttcctgaacaaggcggtgaagccggtgatggtcggtgggccaaagatccgggtggccaaggcgaagaaggcgttcgccggcatcgcggagtcgagcgggtacccgttcgcggtgatgccgtccgcaaagggcctcgtgccggagcaccacccgcggttcatcggcacgtactggggcgccgtgagcaccaccttctgcgccgagatcgtcgagtccgccgacgcctacctcttcgccggcccaatcttcaacgactacagctccgtcggctactccctgctgctgaagcgggagaaggccgtcatcgtgcagcctgaccgcgtggtggtcggcaacggcccggcgttcggctgcatcctcatgacggagttcctcgacgcgctcgccaagcgcctcgaccgcaacacgacggcatacgacaactaccgccgcatcttcatccccgaccgcgagccgcccaatggccagcccgacgagccactcagggtcaacatcctcttcaagcacatcaaggagatgctgtctggcgacaccgccgtcatcgccgagaccggcgactcgtggttcaactgccagaagctcaggctccccgagggctgcgggctggtcattcccaacaggtacgagttccagatgcagtacggctcaatcggttggtccgtcggcgccacgctcggatacgcccaggcggccaaggacaagcgcgtcatctcctgcatcggcgacggaagcttccagatgacggcgcaggacgtgtcgacgatgctgcggtgcgggcagaagagcatcatcttcctcatcaacaacggcgggtacaccatcgaggtggagatccacgacgggccgtacaacgtcatcaagaactgggactacaccggcctcatcgacgccatccacaactctgacggcaactgctggacaaagaaggtccggactgaggaggagctgatagaggcgatcgcgacggcgacgggcgccaagaaagactgcctctgcttcatcgagatcatcgtgcacaaagatgacacgagcaaagagcttctcgagtggggatccagggtctcggctgccaacagcaggccgcctaatccccagtga

SEQ ID NO: 4306 - protein, 611 aa, Oryza sativa
MELALVGNPSNGVAKPSCNSVGSLPVVSSNAVINPPVTSAAGATLGRHLARRLVQIGATDVFAVPGDFNLTLLDYLIAEPGLKLIGCCNELNAGYAADGYARARGVGACAVTFTVGGLSVLNAIAGAYSENLPVICIVGGPNSNDYGTNRILHHTIGLPDFSQELRCFQTITCYQAVINNLDDAHEQIDTAIATALRESKPVYISVGCNLAGLSHPTFSREPVPLFISPRLSNKANLEYAVEAAADFLNKAVKPVMVGGPKIRVAKAKKAFAGIAESSGYPFAVMPSAKGLVPEHHPRFIGTYWGAVSTTFCAEIVESADAYLFAGPIFNDYSSVGYSLLLKREKAVIVQPDRVVVGNGPAFGCILMTEFLDALAKRLDRNTTAYDNYRRIFIPDREPPNGQPDEPLRVNILFKHIKEMLSGDTAVIAETGDSWFNCQKLRLPEGCGLVIPNRYEFQMQYGSIGWSVGATLGYAQAAKDKRVISCIGDGSFQMTAQDVSTMLRCGQKSIIFLINNGGYTIEVEIHDGPYNVIKNWDYTGLIDAIHNSDGNCWTKKVRTEEELIEAIATATGAKKDCLCFIEIIVHKDDTSKELLEWGSRVSAANSRPPNPQ

SEQ ID NO: 4307 - DNA, 1818 bp, Oryza sativa
  CDS (1)..(1818)
atggagcttgccctggttggcaacccttcgaatggcgtggcgaagccgtcgtgcaactccgtcggctcgctgcccgtcgtcagctccaacgccgtcatcaacccgccggtgaccagcgcggcgggcgccacgctcggcaggcacctcgcgaggcgcctcgtgcagatcggcgccaccgacgtgttcgccgtccccggggacttcaacctcaccctgctcgactacctcatcgccgagcccgggctcaagctcatcggctgctgcaatgagctcaacgccgggtacgcggccgacggctacgcccgcgcccgcggcgtcggcgcctgcgccgtcacgttcaccgtcggtggcctcagcgtgctcaacgctatcgccggcgcctacagcgagaacctccccgtgatctgcatcgtcggcgggcccaactccaacgactacggcaccaaccgcatcctgcaccacaccatcggcctcccggacttctcacaggagctccgctgcttccagaccatcacctgctaccaggccgtcattaacaacctcgacgacgcgcacgagcagatcgacaccgccatcgcgacggcgctaagggagagcaagcccgtctacatcagcgtgggctgcaacctggcaggcctctcccacccaacgttcagtcgcgagccagtgccactattcatctcgccaaggctgagcaacaaggcgaacttggagtacgccgtcgaagccgcggcggacttcctgaacaaggcggtgaagccggtgatggtcggtgggccaaagatccgggtggccaaggcgaagaaggcgttcgccggcatcgcggagtcgagcgggtacccgttcgcggtgatgccgtccgcaaagggcctcgtgccggagcaccacccgcggttcatcggcacgtactggggcgccgtgagcaccaccttctgcgccgagatcgtcgagtccgccgacgcctacctcttcgccggcccaatcttcaacgactacagctccgtcggctactccctgctgctgaagcgggagaaggccgtcatcgtgcagcctgaccgcgtggtggtcggcaacggcccggcgttcggctgcatcctcatgacggagttcctcgacgcgctcgccaagcgcctcgaccgcaacacgacggcatacgacaactaccgccgcatcttcatccccgaccgcgagccgcccaatggccagcccgacgagccactcagggtcaacatcctcttcaagcacatcaaggagatgctgtctggcgacaccgccgtcatcgccgagaccggcgactcgtggttcaactgccagaagctcaggctccccgagggctgcgggtacgagttccagatgcagtacggctcaatcggttggtccgtcggcgccacgctcggatacgcccaggcggccaaggacaagcgcgtcatctcctgcatcggcgacggaagcttccagatgacggcgcaggacgtgtcgacgatgctgcggtgcgggcagaagagcatcatcttcctcatcaacaacggcgggtacaccatcgaggtggagatccacgacgggccgtacaacgtcatcaagaactgggactacaccggcctcatcgacgccatccacaactctgacggcaactgctggacaaagaaggtccggactgaggaggagctgatagaggcgatcgcgacggcgacgggcgccaagaaagactgcctctgcttcatcgagatcatcgtgcacaaagatgacacgagcaaagagcttctcgagtggggatccagggtctcggctgccaacagcaggccgcctaatccccagtga

SEQ ID NO: 4308 - protein, 605 aa, Oryza sativa
MELALVGNPSNGVAKPSCNSVGSLPVVSSNAVINPPVTSAAGATLGRHLARRLVQIGATDVFAVPGDFNLTLLDYLIAEPGLKLIGCCNELNAGYAADGYARARGVGACAVTFTVGGLSVLNAIAGAYSENLPVICIVGGPNSNDYGTNRILHHTIGLPDFSQELRCFQTITCYQAVINNLDDAHEQIDTAIATALRESKPVYISVGCNLAGLSHPTFSREPVPLFISPRLSNKANLEYAVEAAADFLNKAVKPVMVGGPKIRVAKAKKAFAGIAESSGYPFAVMPSAKGLVPEHHPRFIGTYWGAVSTTFCAEIVESADAYLFAGPIFNDYSSVGYSLLLKREKAVIVQPDRVVVGNGPAFGCILMTEFLDALAKRLDRNTTAYDNYRRIFIPDREPPNGQPDEPLRVNILFKHIKEMLSGDTAVIAETGDSWFNCQKLRLPEGCGYEFQMQYGSIGWSVGATLGYAQAAKDKRVISCIGDGSFQMTAQDVSTMLRCGQKSIIFLINNGGYTIEVEIHDGPYNVIKNWDYTGLIDAIHNSDGNCWTKKVRTEEELIEAIATATGAKKDCLCFIEIIVHKDDTSKELLEWGSRVSAANSRPPNPQ

SEQ ID NO: 4309 - DNA, 1836 bp, Oryza sativa
  CDS (1)..(1836)
atggagcttgccctggttggcgacccttcgaatggcgtggcgaagccgtcgtgcgactccgtcggctcgctgcccgccgtcagctccaaggccgtcatccacccgccggtgaccagcgcggcgggcgccacgctcggcaggcacctcgcgaggcgcctcgtgcagatcggcgccaccgacgtgttcgccgtccccggggacttcaacctcaccctgctcgactacctcatcgccgagcccgggctcaagctcatcggctgctgcaacgagctcaacgccgggtacgcggccgacggctacgcccgcgcccgcggcgtcggcgcgtgcgccgtcacgttcaccgtcggtggcctcagcgtgctcaacgccatcgccggcgcctacagcgagaacctccccgtgatctgcatcgtcggcgggcccaactccaacgactacggcaccaaccgcatcctgcaccacaccatcggcctcccggacttctcacaggagctccgctgcttccagaccatcacctgctaccaggccgtcattaacaacctcgacgacgcgcacgagcagatcgacaccgccatagcgacggcactaagggagagcaagccagtgtacatcagcgtgggctgcaacctggcgggcctctctcacccgacgtttagccgcgagccagtgccgttgttcatctcgccaagattgagcaacaaggcgaacttggagcacgccgtcgaagccgcggcggacttcctgaacaaggcggtgaagccggtgatggtcggggggccaaagatccgggtggccaaggcgaagaaggcgttcgccggcatcgcggagtcgagcgggtacccgttcgcggtgatgccgtccgccaagggcctcgtgccggagcaccacccgcggttcatcggcacgtactggggcgccgtgagcaccaccttctgcgccgagatcgtcgagtccgccgacgcctacctcttcgccggcccgatcttcaacgactacagctccgtcggctactccctgctgctgaagcgggagaaggccgtcatcgtgcagcccgaccgcgtggtggtcggcaacggcccggcgttcggctgcatcctcatgactgagttcctcgacgcgctcgccaaacgcctcgaccgcaacacgacggcgtacgacaactaccgccgcatcttcatccccgaccgcgagccgcccaacggccagcccgacgagccactcagggtcaacatcctcttcaagcacatcaaggagttgctgtccggcgacaccgccgtcatcgccgagaccggtgactcgtggttcaactgccagaagctcaggctccccgagggctgcgggctggtcattcccaacaggtacgagttccagatgcagtacggctcgatcgggtggtccgtcggcgccacgctcggctacgcccaggcggccaaggacaagcgcgtcatctcctgcatcggtgacggtagcttccagatgacggcgcaggacgtgtcgacgatgttgcggtgcgggcagaagagcatcatcttcctcatcaataatggtgggtacaccatcgaggtggagatccacgacgggccgtacaacgtcatcaagaactgggactacaccggcctcatcgacgccatccacaactctgacggcaactgctggacaaagaaggtccggactgaggaggagctgatagaggcgatcgcgacggcaacgggcgccaagaaagattgcctctgcttcatcgagatcatcgtgcacaaggatgacacgagcaaagagcttctcgagtggggatccagggtatcggctgccaacagcaggccgccgaatccccagtga

SEQ ID NO: 4310 - protein, 611 aa, Oryza sativa
MELALVGDPSNGVAKPSCDSVGSLPAVSSKAVIHPPVTSAAGATLGRHLARRLVQIGATDVFAVPGDFNLTLLDYLIAEPGLKLIGCCNELNAGYAADGYARARGVGACAVTFTVGGLSVLNAIAGAYSENLPVICIVGGPNSNDYGTNRILHHTIGLPDFSQELRCFQTITCYQAVINNLDDAHEQIDTAIATALRESKPVYISVGCNLAGLSHPTFSREPVPLFISPRLSNKANLEHAVEAAADFLNKAVKPVMVGGPKIRVAKAKKAFAGIAESSGYPFAVMPSAKGLVPEHHPRFIGTYWGAVSTTFCAEIVESADAYLFAGPIFNDYSSVGYSLLLKREKAVIVQPDRVVVGNGPAFGCILMTEFLDALAKRLDRNTTAYDNYRRIFIPDREPPNGQPDEPLRVNILFKHIKELLSGDTAVIAETGDSWFNCQKLRLPEGCGLVIPNRYEFQMQYGSIGWSVGATLGYAQAAKDKRVISCIGDGSFQMTAQDVSTMLRCGQKSIIFLINNGGYTIEVEIHDGPYNVIKNWDYTGLIDAIHNSDGNCWTKKVRTEEELIEAIATATGAKKDCLCFIEIIVHKDDTSKELLEWGSRVSAANSRPPNPQ

SEQ ID NO: 4311 - DNA, 1818 bp, Oryza sativa
  CDS (1)..(1818)
atggagcttgccctggttggcgacccttcgaatggcgtggcgaagccgtcgtgcgactccgtcggctcgctgcccgccgtcagctccaaggccgtcatccacccgccggtgaccagcgcggcgggcgccacgctcggcaggcacctcgcgaggcgcctcgtgcagatcggcgccaccgacgtgttcgccgtccccggggacttcaacctcaccctgctcgactacctcatcgccgagcccgggctcaagctcatcggctgctgcaacgagctcaacgccgggtacgcggccgacggctacgcccgcgcccgcggcgtcggcgcgtgcgccgtcacgttcaccgtcggtggcctcagcgtgctcaacgccatcgccggcgcctacagcgagaacctccccgtgatctgcatcgtcggcgggcccaactccaacgactacggcaccaaccgcatcctgcaccacaccatcggcctcccggacttctcacaggagctccgctgcttccagaccatcacctgctaccaggccgtcattaacaacctcgacgacgcgcacgagcagatcgacaccgccatagcgacggcactaagggagagcaagccagtgtacatcagcgtgggctgcaacctggcgggcctctctcacccgacgtttagccgcgagccagtgccgttgttcatctcgccaagattgagcaacaaggcgaacttggagcacgccgtcgaagccgcggcggacttcctgaacaaggcggtgaagccggtgatggtcggggggccaaagatccgggtggccaaggcgaagaaggcgttcgccggcatcgcggagtcgagcgggtacccgttcgcggtgatgccgtccgccaagggcctcgtgccggagcaccacccgcggttcatcggcacgtactggggcgccgtgagcaccaccttctgcgccgagatcgtcgagtccgccgacgcctacctcttcgccggcccgatcttcaacgactacagctccgtcggctactccctgctgctgaagcgggagaaggccgtcatcgtgcagcccgaccgcgtggtggtcggcaacggcccggcgttcggctgcatcctcatgactgagttcctcgacgcgctcgccaaacgcctcgaccgcaacacgacggcgtacgacaactaccgccgcatcttcatccccgaccgcgagccgcccaacggccagcccgacgagccactcagggtcaacatcctcttcaagcacatcaaggagttgctgtccggcgacaccgccgtcatcgccgagaccggtgactcgtggttcaactgccagaagctcaggctccccgagggctgcgggtacgagttccagatgcagtacggctcgatcgggtggtccgtcggcgccacgctcggctacgcccaggcggccaaggacaagcgcgtcatctcctgcatcggtgacggtagcttccagatgacggcgcaggacgtgtcgacgatgttgcggtgcgggcagaagagcatcatcttcctcatcaataatggtgggtacaccatcgaggtggagatccacgacgggccgtacaacgtcatcaagaactgggactacaccggcctcatcgacgccatccacaactctgacggcaactgctggacaaagaaggtccggactgaggaggagctgatagaggcgatcgcgacggcaacgggcgccaagaaagattgcctctgcttcatcgagatcatcgtgcacaaggatgacacgagcaaagagcttctcgagtggggatccagggtatcggctgccaacagcaggccgccgaatccccagtga

SEQ ID NO: 4312 - protein, 605 aa, Oryza sativa
MELALVGDPSNGVAKPSCDSVGSLPAVSSKAVIHPPVTSAAGATLGRHLARRLVQIGATDVFAVPGDFNLTLLDYLIAEPGLKLIGCCNELNAGYAADGYARARGVGACAVTFTVGGLSVLNAIAGAYSENLPVICIVGGPNSNDYGTNRILHHTIGLPDFSQELRCFQTITCYQAVINNLDDAHEQIDTAIATALRESKPVYISVGCNLAGLSHPTFSREPVPLFISPRLSNKANLEHAVEAAADFLNKAVKPVMVGGPKIRVAKAKKAFAGIAESSGYPFAVMPSAKGLVPEHHPRFIGTYWGAVSTTFCAEIVESADAYLFAGPIFNDYSSVGYSLLLKREKAVIVQPDRVVVGNGPAFGCILMTEFLDALAKRLDRNTTAYDNYRRIFIPDREPPNGQPDEPLRVNILFKHIKELLSGDTAVIAETGDSWFNCQKLRLPEGCGYEFQMQYGSIGWSVGATLGYAQAAKDKRVISCIGDGSFQMTAQDVSTMLRCGQKSIIFLINNGGYTIEVEIHDGPYNVIKNWDYTGLIDAIHNSDGNCWTKKVRTEEELIEAIATATGAKKDCLCFIEIIVHKDDTSKELLEWGSRVSAANSRPPNPQ

SEQ ID NO: 4313 - DNA, 1764 bp, Oryza sativa
  CDS (1)..(1764)
atggagagcaacggcggaggaggaggatctcccaaggaggcagcggtggtggtgccgtcctccggcgacgccaccctgggcgggcacctggctcggcgcctcgtgcaggtgggcgtgagcgacgtgttcgccgtgccgggggacttcaacctgacgcttctggaccacctgatcgccgagcccgggctccgcgtggtgggctgctgcaacgagctgaacgccggatacgcggccgacgggtacgcgcgggcccgtggcgtgggcgcctgcgccgtgaccttcaccgtgggcgggctgagcgtgctgaacgccatcggcggggcgtacagcgagaacctgccgctgatctgcatcgtggggggccccaactccaacgactacggcaccaaccgcatcctccaccacaccatcggcctcccggacttctcccaggagctccgctgcttccaacccctcacctgctaccaggccgtcgtcaacaacctcgacgacgcccacgaccagatcgaccgcgccatctccaccgccatcagggagagcaagcccgtctacatcagcgtcagctgcaacctccccgccgtcccccaccccaccttctcccgcgacccggtgccctacttcctctccccgaggctctccaaccaggccagcctccacgccgcgctcgacgccaccctcgccttcctcgacaaggccgtcaagcccgtcctcgtcgcggggcccaagctccgcgtcgccaaggccggaggggccttcgtggacctcgccgacgccagcggccacgcggtggccgccatgccgtccgccaaggggctggtgccggagacgctgccgcgcttcatcgggacctactggggcgcggtcagcacggccttctgcgcggagatcgtggagtccgcggacgcctacctgttcgcggggcccatcttcaacgactacagctccgtggggtactcgtgcctgctgaagaaggagaaggcggtggtggtgcagcccgaccgcgtgaccgtcggcaatggccccgcgttcgggtgcgtgatgatgagggacttcctgtcggagctggccaagcgcgtccggaagaacacgacggcgttcgacaactacaagaggatcttcgtgccggagggacagctgccggagtgcgaggccggggaggcgctgcgggtgaacgtgctgttcaagcacatacagaggatgatcggtggcacggagatcggggcggtgatggcggagacgggggactcgtggttcaactgccagaagctgcggctgcccgagggttgcgggtacgagttccagatgcagtacggctccatcgggtggtcggtgggggcgctgctgggctacgcgcaggctgtccaaaaacgggtggtggcttgcatcggcgacggcagcttccaggtgacggcgcaggacgtgtcgacgatgctgcgttgcgggcagcggagcatcatcttcctcatcaacaacggcgggtacaccatcgaggtggagatccacgacgggccgtacaacgtgatcaagaactgggactacgtgggcctcgtcaacgccatccacaacggcgaggggcggtgctgggccacccgggtgcggtgcgaggaggagctggaggcggccatcgcgacggccacgggggacaaggcggacagcctctgcttcatcgaggtggtggcgcacaaggacgacaccagcaaggagctcctcgaatggggctccagagtctccgccgccaactccaggccgcccaacccgcagtag

SEQ ID NO: 4314 - protein, 587 aa, Oryza sativa
MESNGGGGGSPKEAAVVVPSSGDATLGGHLARRLVQVGVSDVFAVPGDFNLTLLDHLIAEPGLRVVGCCNELNAGYAADGYARARGVGACAVTFTVGGLSVLNAIGGAYSENLPLICIVGGPNSNDYGTNRILHHTIGLPDFSQELRCFQPLTCYQAVVNNLDDAHDQIDRAISTAIRESKPVYISVSCNLPAVPHPTFSRDPVPYFLSPRLSNQASLHAALDATLAFLDKAVKPVLVAGPKLRVAKAGGAFVDLADASGHAVAAMPSAKGLVPETLPRFIGTYWGAVSTAFCAEIVESADAYLFAGPIFNDYSSVGYSCLLKKEKAVVVQPDRVTVGNGPAFGCVMMRDFLSELAKRVRKNTTAFDNYKRIFVPEGQLPECEAGEALRVNVLFKHIQRMIGGTEIGAVMAETGDSWFNCQKLRLPEGCGYEFQMQYGSIGWSVGALLGYAQAVQKRVVACIGDGSFQVTAQDVSTMLRCGQRSIIFLINNGGYTIEVEIHDGPYNVIKNWDYVGLVNAIHNGEGRCWATRVRCEEELEAAIATATGDKADSLCFIEVVAHKDDTSKELLEWGSRVSAANSRPPNPQ

SEQ ID NO: 4315 - DNA, 1830 bp, Zea mays
  CDS (1)..(1830)
atggagaccctcctggctggcaaccccgccaacggcgtggcgaagccgacgtgcaatggcgtcggcgccctgcccgtggccaactcccacgccatcatcgccacgccgccggctgcggcgacgctggccccggctggcgccacgctcggccggcacctggcgcgccgcctcgtgcagatcggcgcctccgacgtcttcgccgtcccgggggacttcaacctcaccctgctcgactacctcatcgccgagccgggcctgaccctcgtcggctgctgcaacgaactcaacgccgggtacgccgccgacgggtacgcgcggtcgcggggcgtcggcgcctgcgccgtcacgttcaccgtcggtgggctcagcgtgctcaacgccatcgccggcgcgtacagcgagaacctccccgtcgtctgcatcgtgggcgggcccaactccaacgactacggcaccaaccgcatccttcaccacaccatcggcctccctgacttctcccaggagctccgctgcttccagacgatcacctgctaccaggccatcatcaacaacctggacgacgcgcatgagcagatcgacacggccatcgcgacggcgctgagggagagcaagcccgtgtacatcagcgtcagctgcaacctggccggcctctcccacccgaccttcagccgggatccggtgcccatgttcatctcgccgaggctgagcaacaaggccaacctggagtacgccgtggaggcggcggccgacttcctcaacaaggcggtgaagccggtgatggtgggcgggcccaagatccgggtggccaaggccagggaggcgttcgccgccgtcgcggacgccagcgggtaccctttcgccgtcatgccggccgccaagggcctggtgccggagcaccacccgcgcttcatcggcacctactggggcgccgtcagcaccaccttctgcgccgagatcgtggagtccgccgacgcctacctcttcgccgggcccatcttcaacgactacagctccgtcggctactccctcctgctcaagcgggagaaggccgtcatcgtgcagcccgaccgcatggtggtcggcgacggcccggcgttcggctgcatcctcatgcccgagttcctccgcgcgctcgccaagcgcctcaggcgcaacaccacggcgtacgacaactaccgccgcatcttcgtccccgaccgcgagccgcccaacggcaagcccaacgagccgcttagggtcaacgtcctcttcaagcacatcaagggcatgctgtccggcgactccgcggtcgtcgccgagaccggcgactcgtggttcaactgccagaagctcaggctccccgagggctgcggctacgagttccagatgcagtacggctccatcgggtggtcggtcggcgcgacgctcgggtacgcccaggcggccaaggacaagcgtgtcatcgcgtgcatcggcgacggaagcttccaggtgacggcgcaggacgtgtccacgatgctccggtgcgggcagaagagcatcatcttcctcatcaacaacggcggctacaccatcgaggtggagatccacgacggcccgtacaacgtgatcaagaactgggactacacgggcttggtcaacgccatccataactccgagggcaactgctggaccatgaaggttcggacggaagagcagctcaaggaagcgatcgccacggcgacgggcgccaagaaagactgcctctgcttcatcgaggtaatcgtgcacaaggacgacacgagcaaggagctcctcgagtgggggtccagggtctccgccgccaacagcaggccgcccaacccccagtga

SEQ ID NO: 4316 - protein, 609 aa, Zea mays
METLLAGNPANGVAKPTCNGVGALPVANSHAIIATPPAAATLAPAGATLGRHLARRLVQIGASDVFAVPGDFNLTLLDYLIAEPGLTLVGCCNELNAGYAADGYARSRGVGACAVTFTVGGLSVLNAIAGAYSENLPVVCIVGGPNSNDYGTNRILHHTIGLPDFSQELRCFQTITCYQAIINNLDDAHEQIDTAIATALRESKPVYISVSCNLAGLSHPTFSRDPVPMFISPRLSNKANLEYAVEAAADFLNKAVKPVMVGGPKIRVAKAREAFAAVADASGYPFAVMPAAKGLVPEHHPRFIGTYWGAVSTTFCAEIVESADAYLFAGPIFNDYSSVGYSLLLKREKAVIVQPDRMVVGDGPAFGCILMPEFLRALAKRLRRNTTAYDNYRRIFVPDREPPNGKPNEPLRVNVLFKHIKGMLSGDSAVVAETGDSWFNCQKLRLPEGCGYEFQMQYGSIGWSVGATLGYAQAAKDKRVIACIGDGSFQVTAQDVSTMLRCGQKSIIFLINNGGYTIEVEIHDGPYNVIKNWDYTGLVNAIHNSEGNCWTMKVRTEEQLKEAIATATGAKKDCLCFIEVIVHKDDTSKELLEWGSRVSAANSRPPNPQ

SEQ ID NO: 4317 - DNA, 1824 bp, Brassica napus
  CDS (1)..(1824)
atggacactgtgatcggatcaatcgacgcgtgcaacccagccaccggcgatatctgccgtccaccaaacggcgccgtctccaccgttcaaaactcgactcccgctcactccaccaccatcagcccctgcgacgcgaccctcggccgctacctagcgagacgcctcgtcgagatcggcgtcaccgacgtcttctccgtccccggcgacttcaaccttacgctcctcgaccacctcatcgccgagccgagcctcaagctcatcggctgctgcaacgagctcaacgccggctacgccgccgacggttacgccagatcccgcggcgtcggagcgtgcgtcgtcaccttcacggtcggcggattaagcgtcctgaacgcgatcgccggcgcttacagcgagaatctccctctgatctgcatcgtcggcggcccgaactcgaacgactacggcacgagtcggatccttcaccataccatcggcttacctgatttcactcaagagctcagatgcttccaagccgtcacgtgctatcaagctgtgatcaataacttggaagacgctcacgagcttatcgacaccgccatctccaccgctttgaaagagagcaagcctgtctacatcagcatcagctgcaacttgccggccattcctatgccgacgttcagtcgccaccctgttcccttctcgctggcgcctaaggtgagcaacctgatgggtttagacgcggcggtggaggcggctgctgagttcttgaacaaggccgtgaagccggctctcgttggcgggccgaagatgcgagttgccaaggctgcggacgctttcgttgagcttgctgatgcttctgggtatggtgtcgctgtgatgccatctgctaaggggcaggtgcctgagcatcataagcacttcattggcacgtattggggagctgtgagtactgcgttctgcgctgagattgttgagtctgctgatgcgtatctcttcgcgggtcctatctttaatgattacagctccgttgggtactctctgcttctcaagaaggagaaggcaatcatcgtgcagcctgatcgggttactatcggtaacggacctgcttttggatgtgtgttgatgaaggattttcttagcggtttagctaaacgaatcaaccataacaacaccgcttacgagaattaccacaggatctttgtccctgaaggaaagcctctgagagagaatcccaaggagcctttgagggttaatgtgctgtttcaacacattcagaatctgctctcttctgaaacagctgtgctcgctgagacgggggattcttggttcaactgtcagaagctgaaactccctgaaggatgtggttacgagttccaaatgcagtatgggtccattggttggtccgttggtgctactctaggctatgctcaagccataccaaacaagcgtgtcattgcttgtattggagacggtagtttccaggttaccgcacaggatgtgtcgaccatgataaggtgtgggcagaagactataatctttctcatcaacaatggagggtacaccattgaagtggagatccatgatggtccttacaatgtgataaagaactggaactacacggcttttgttgaggctattcacaatggagaaggtaaatgctggactgcaaaagtgaggtgcgaggatgagcttgtgaaagcgattagcacggcaacgaatgaggaaaaggagagcttttgtttcattgaggtgatagtgcataaagatgatacaagcaaggagcttttggagtggggatctagagtctctgctgctaacagtcgtcctccaaatcctcagtag

SEQ ID NO: 4318 - protein, 607 aa, Brassica napus
MDTVIGSIDACNPATGDICRPPNGAVSTVQNSTPAHSTTISPCDATLGRYLARRLVEIGVTDVFSVPGDFNLTLLDHLIAEPSLKLIGCCNELNAGYAADGYARSRGVGACVVTFTVGGLSVLNAIAGAYSENLPLICIVGGPNSNDYGTSRILHHTIGLPDFTQELRCFQAVTCYQAVINNLEDAHELIDTAISTALKESKPVYISISCNLPAIPMPTFSRHPVPFSLAPKVSNLMGLDAAVEAAAEFLNKAVKPALVGGPKMRVAKAADAFVELADASGYGVAVMPSAKGQVPEHHKHFIGTYWGAVSTAFCAEIVESADAYLFAGPIFNDYSSVGYSLLLKKEKAIIVQPDRVTIGNGPAFGCVLMKDFLSGLAKRINHNNTAYENYHRIFVPEGKPLRENPKEPLRVNVLFQHIQNLLSSETAVLAETGDSWFNCQKLKLPEGCGYEFQMQYGSIGWSVGATLGYAQAIPNKRVIACIGDGSFQVTAQDVSTMIRCGQKTIIFLINNGGYTIEVEIHDGPYNVIKNWNYTAFVEAIHNGEGKCWTAKVRCEDELVKAISTATNEEKESFCFIEVIVHKDDTSKELLEWGSRVSAANSRPPNPQ

SEQ ID NO: 4319 - DNA, 1782 bp, Zea mays
  CDS (1)..(1782)
atggacacggcgatcggctccgtcccggcagcctccgacgcggcgcgtctccccgcgccgtccgcgtccgccccgcgcgacgcgacgctgggccggcacctagcgcggcgcctggcggaggtgggcgcccgggacgtgttcacggtgccgggggacttcaacctcacgctcctcgacgagctggaggccgagccgggcggcgtccgcctcgtcggctgctgcaacgagctcaacgcggcgtacgcggccgacgggtacgcccgcgcgcgcgccggcggggtcggcgcctgcgccgtcaccttcaccgtcggcggcctcagcgccatcaacggcgtcgccggcgccttcagcgagaacctccccgtcgtgtgcatcgtcggcggacccaacagcaacgactacgggagtaacaggatcctgcaccataccatcggcttgcctgatttcacgcaggagctcaggtgcttccagaacgtcacgtgctatcaggctgtggtgaacaacttggaagatgcgcacgagcagatcgacactgccatctccacggcaatcaaggagagcaagcctgtttacattagcatcagctgcaacctcccttcgatcccacatcccaccttcagccgccatcctgtccctttcttcctctccccaaggctatcgaaccagatgaacctggaggctgcagtggaagccgccgcggctttcttgaacaaagccgtcaagccagtgcttgtaggtgggccaaagatgagggtgtccaaagcatgcgaagccttggcagagctggcagatgcctgcggctatcccgtcgccgtgatgccttctgcgaaggggctagtgccagagcaccactctaggttcattggcacgtactggggtgcggtgagcactccattctgtgctgagatcgtcgagtctgccgatgcctacctatttgctggccccgtattcaacgactacagctcggttgggtactcgctgctcctcaagaaggagaaggccatcattgtccaaccagagcgggtggtggtcgggcacggacccgcgtttgggtgtgttctgatgaaggatttccttcatgcccttgcaacccgtctgaagaagaacactgccgcgtatgagaactaccgtcgaatttatgtgcctttaggcgaaccacttccatctgaacctggcgagccgttgagagtgaacgtgctattcaagcatattcaggcaatgctgtctggcgacacggctgtcatcgcagagactggggactcgtggtttaactgccagaagctgaagctaccggaaggctgtggatacgaattccagatgcagtatggatcaattggctggtcagtgggcgcaactctaggatacgcacaggctgccaaggataaacgtgtcattgcctgcattggagacggcagctttcaggtgacggcacaagaagtgtcaacgatgctccggtgggggcagaacagcatcatcttcctgataaacaatggagggtacacaatcgaggtggagattcacgatggcccttataacgttatcaagaactggaactacaccggtctggtggaagcgttccacaatggcgagggcgcgtgctacacagcaaaggttcgaacagaggaggagctgacggaggcgctggaggcagctctaggacctaagaaggactgcttatgcttcatcgaggtcatcgtgcataaggatgacaccagcaaagagcttctcgagtggggatctagggtttctgcggcgaatagccgtccacctaatcctcagtga

SEQ ID NO: 4320 - protein, 593 aa, Zea mays
MDTAIGSVPAASDAARLPAPSASAPRDATLGRHLARRLAEVGARDVFTVPGDFNLTLLDELEAEPGGVRLVGCCNELNAAYAADGYARARAGGVGACAVTFTVGGLSAINGVAGAFSENLPVVCIVGGPNSNDYGSNRILHHTIGLPDFTQELRCFQNVTCYQAVVNNLEDAHEQIDTAISTAIKESKPVYISISCNLPSIPHPTFSRHPVPFFLSPRLSNQMNLEAAVEAAAAFLNKAVKPVLVGGPKMRVSKACEALAELADACGYPVAVMPSAKGLVPEHHSRFIGTYWGAVSTPFCAEIVESADAYLFAGPVFNDYSSVGYSLLLKKEKAIIVQPERVVVGHGPAFGCVLMKDFLHALATRLKKNTAAYENYRRIYVPLGEPLPSEPGEPLRVNVLFKHIQAMLSGDTAVIAETGDSWFNCQKLKLPEGCGYEFQMQYGSIGWSVGATLGYAQAAKDKRVIACIGDGSFQVTAQEVSTMLRWGQNSIIFLINNGGYTIEVEIHDGPYNVIKNWNYTGLVEAFHNGEGACYTAKVRTEEELTEALEAALGPKKDCLCFIEVIVHKDDTSKELLEWGSRVSAANSRPPNPQ

SEQ ID NO: 4321 - DNA, 1827 bp, Glycine max
  CDS (1)..(1827)
atggacaccaagataggttcactagacgcgcccaagcccaacagcaacgacgtcgtatcatgcaacctcaccagcagcgccgccatccagccctgcttgccggcgacggtgatcaacggcgccggctgtagtgactccaccttgggcggccacctggcccgccggctggtggaaatcggcgtcaccgacgtgttctccgttcccggggacttcaacctgacgctgctggaccacctcatcgcggagccggcgctgcacctggtcgggtgctgcaacgagctcaacgccgggtacgccgccgacggctacgcgcgcgccaggggagtcggcgcgtgcgtggtgacgttcaccgtcggcggcctcagcgtgctcaacgccatcgccggagcgtacagcgagaacttgccgctaatttgcatcgtcggtgggcccaactccaacgactacggcaccagtcggatcctccatcacaccatcgggttacccgatttcagccaggagttgaggtgcttccagaccattacttgcttccaggctgtggtgaataacttggaagatgctcatgagttgattgatacagcaatctcaactgcactgaaagaaagcaagccggtgtatataagcattagctgtaacttgcctgggattcctcaccccactttcagtcgtgatcctgttcctttttcgttatctccaagattgagtaacaagatggggttggaggctgcagtggaggcagcggcagaattccttaacaaggcagtgaaaccagtgctggtaggtggtcctaaactgagggtggcaacggcatctgatgcctttgttgaactggctgatgcgtgtggttatgcgcttgctgtgatgccatcggctaaagggcaggttccagagcaccatccccatttcatcggaacttattggggtgctgtgagcactgccttctgtgctgagattgtggagtctgcggatgcatacttgtttgctggtccaatttttaatgactacagctctgtggggtattcacttcttctcaagaaggagaaggcgatcattgtgcagcctgatcgggttgtgatcgcgaatggacctgcttttgggtgtgtgctgatgaaggatttcctcaaggcactcgcaaagcgcctcaagcacaacaatactgcatatgaaaattaccacaggatatttgtccctgatgggcatcctttgaaggctgcacccagagagcctttgagggttaatgttctgttccaacatatacaaaatatgctgtctggtgaaactgctgtaattgctgagacaggggactcctggtttaattgccaaaagctgaaattgccaaaggcatgtgggtatgagttccaaatgcaatatggttcaattggatggtctgttggtgctactctgggttatgctcaagccgttcctgagaagcgagtgattgcctgcattggtgatggaagttttcaggtgactgcccaagatgtatcgacaatgttacggtgcgggcaaaaaaccatcatctttctgatcaacaatggtggatacaccatcgaggttgaaattcatgatgggccgtacaatgtgattaagaactggaattacactgggttgattgatgcaatccacaatggtgaagggaaatgctggactgccaaggtgttctgtgaagaggagctagttgaagcaattgccacagccacaggacccaagaaagactccttatgcttcattgaggtgattgttcataaggatgacaccagtaaagaattgcttgaatggggctcaagggtttctgctgccaatagccgtcctcccaatcctcagtaa

SEQ ID NO: 4322 - protein, 608 aa, Glycine max
MDTKIGSLDAPKPNSNDVVSCNLTSSAAIQPCLPATVINGAGCSDSTLGGHLARRLVEIGVTDVFSVPGDFNLTLLDHLIAEPALHLVGCCNELNAGYAADGYARARGVGACVVTFTVGGLSVLNAIAGAYSENLPLICIVGGPNSNDYGTSRILHHTIGLPDFSQELRCFQTITCFQAVVNNLEDAHELIDTAISTALKESKPVYISISCNLPGIPHPTFSRDPVPFSLSPRLSNKMGLEAAVEAAAEFLNKAVKPVLVGGPKLRVATASDAFVELADACGYALAVMPSAKGQVPEHHPHFIGTYWGAVSTAFCAEIVESADAYLFAGPIFNDYSSVGYSLLLKKEKAIIVQPDRVVIANGPAFGCVLMKDFLKALAKRLKHNNTAYENYHRIFVPDGHPLKAAPREPLRVNVLFQHIQNMLSGETAVIAETGDSWFNCQKLKLPKACGYEFQMQYGSIGWSVGATLGYAQAVPEKRVIACIGDGSFQVTAQDVSTMLRCGQKTIIFLINNGGYTIEVEIHDGPYNVIKNWNYTGLIDAIHNGEGKCWTAKVFCEEELVEAIATATGPKKDSLCFIEVIVHKDDTSKELLEWGSRVSAANSRPPNPQ

SEQ ID NO: 4323 - DNA, 1818 bp, Triticum aestivum
  CDS (1)..(1818)
atggacacccacatcggctccgtcgacgggccgtcgccggcggcggtgaacggcgcggtcggctgcccggcgtccgcgccggggtgcccgatcatgtcctcccaccccgtggtctccgcaggcgaggcgtcgctggggcgccacctggcgcgccgcctcgtgcaggtcggcgtcagcgacgtcttcgccgtgcccggggacttcaacctcacgctgctcgaccacctcgtcgacgagcccgggctgcgcctcgtcggctgctgcaacgagctcaacgctggctacgcggccgacggctacgcgcgggcccgcggcgtcggcgcctgcgcggtcaccttcaccgtcggcggcctcagcgtgctcaacgccatcgccggcgcctacagcgagaacctgcccgtcatctgcatcgccggcgggcccaactccaacgactacggcaccaaccgcatcctccaccacaccatcggcatcccggacttctcacaggagctacgctgcttccagaccgtcacctgccaccaggcggtggtgaccaacctggacgacgcgcacgagcagatcgacacggccatcgcgacggcgctcagggagagcaagccggtgtacctcagcatcagctgcaacctccccgggctacctcaccccacctttacccgtgacccagtccccttcttcctcgcccccaggatgagcaacaagatggggctcgaggctgcagtggaggcaactgtcgagttcctgaacaaggcggtgaagccagtgcttgtcgccggccccaaattgcgcgtggcgaaggcggggaaggccttcgtcgacctcgtggacgccagtgggtatgcctatgctataatgccatcggccaagggctttgtgccagagacgcacccccacttcctcggcacctactggggcgccgtcagcaccgccttctgcgccgagattgtcgagtcggccgacgcctacctcttcgcaggccctatcttcaacgactacagctctgttggctactcgttcctgctcaagaaggacaaggccatcatcgtgcagcctgagcgtgtcatcgtcgggaacggcccggcattcggctgcgtcatgatgaaggagtacctgtctgcattggccaagcgggttcagaagaacaccaccgcctacgagaactacaagaggatcttcgtgcctgagggccatccgctgaagggcgaggcgaacgagccgctgcgtgtcaatgtgctcttcaagcacatccaggacatgctgacgggtgacagtgcagtgctcgctgagaccggtgactcctggttcaactgccagaagctcaagctgcccgagggctgcgggtatgaattccaaatgcagtatggctcgattggatggtcggtgggtgcattgctcgggtacgcgcaaggcgcaagcgataagcgtgttatagcctgcattggtgatgggagcttccaggtgacagcacaggatgtgtcgactatgctgcggtgcgaacagaacagcataatcttcctgatcaacaatggcgggtacaccatcgaggtggagatccacgacggaccttacaacgtcatcaagaactggaactacaccgcccttgtggaggccatccacaacggggagggcaaatgctggactgccaaggtgaagtgcgaggaggagctgacggcggcgatcgagatggcgctgggggagaaggaggactctctctgcttcatcgaggtgatcgcgcacaaggacgacaccagcaaagagcttctggaatggggctccagggtctctgctgccaactccaggccacccaatccccagtag

SEQ ID NO: 4324 - protein, 605 aa, Triticum aestivum
MDTHIGSVDGPSPAAVNGAVGCPASAPGCPIMSSHPVVSAGEASLGRHLARRLVQVGVSDVFAVPGDFNLTLLDHLVDEPGLRLVGCCNELNAGYAADGYARARGVGACAVTFTVGGLSVLNAIAGAYSENLPVICIAGGPNSNDYGTNRILHHTIGIPDFSQELRCFQTVTCHQAVVTNLDDAHEQIDTAIATALRESKPVYLSISCNLPGLPHPTFTRDPVPFFLAPRMSNKMGLEAAVEATVEFLNKAVKPVLVAGPKLRVAKAGKAFVDLVDASGYAYAIMPSAKGFVPETHPHFLGTYWGAVSTAFCAEIVESADAYLFAGPIFNDYSSVGYSFLLKKDKAIIVQPERVIVGNGPAFGCVMMKEYLSALAKRVQKNTTAYENYKRIFVPEGHPLKGEANEPLRVNVLFKHIQDMLTGDSAVLAETGDSWFNCQKLKLPEGCGYEFQMQYGSIGWSVGALLGYAQGASDKRVIACIGDGSFQVTAQDVSTMLRCEQNSIIFLINNGGYTIEVEIHDGPYNVIKNWNYTALVEAIHNGEGKCWTAKVKCEEELTAAIEMALGEKEDSLCFIEVIAHKDDTSKELLEWGSRVSAANSRPPNPQ

SEQ ID NO: 4325 - DNA, 20 bp, Artificial sequence
  primer
atggacaccaaaatcggatc

SEQ ID NO: 4326 - DNA, 20 bp, Artificial sequence
  primer
ctactgaggattgggaggac

SEQ ID NO: 4327 - protein, 744 aa, Artificial sequence
  consensus sequence
  Variant (2)..(3): Xaa in position 2 to 3 is any amino acid
  Variant (5)..(6): Xaa in position 5 to 6 is any amino acid
  Variant (9)..(15): Xaa in position 9 to 15 is any amino acid
  Variant (16)..(16): Xaa in position 16 is any or no amino acid
  Variant (18)..(18): Xaa in position 18 is any amino acid
  Variant (23)..(23): Xaa in position 23 is any amino acid
  Variant (26)..(27): Xaa in position 26 to 27 is any amino acid
  Variant (30)..(39): Xaa in position 30 to 39 is any amino acid
  Variant (40)..(46): Xaa in position 40 to 46 is any or no amino acid
  Variant (48)..(49): Xaa in position 48 to 49 is any amino acid
  Variant (55)..(55): Xaa in position 55 is any amino acid
  Variant (64)..(65): Xaa in position 64 to 65 is any amino acid
  Variant (66)..(72): Xaa in position 66 to 72 is any or no amino acid
  Variant (74)..(79): Xaa in position 74 to 79 is any amino acid
  Variant (82)..(82): Xaa in position 82 is any amino acid
  Variant (85)..(85): Xaa in position 85 is any amino acid
  Variant (88)..(89): Xaa in position 88 to 89 is any amino acid
  Variant (91)..(92): Xaa in position 91 to 92 is any amino acid
  Variant (95)..(95): Xaa in position 95 is any amino acid
  Variant (97)..(97): Xaa in position 97 is any amino acid
  Variant (99)..(100): Xaa in position 99 to 100 is any amino acid
  Variant (102)..(104): Xaa in position 102 to 104 is any amino acid
  Variant (106)..(106): Xaa in position 106 is any amino acid
  Variant (108)..(108): Xaa in position 108 is any amino acid
  Variant (110)..(118): Xaa in position 110 to 118 is any amino acid
  Variant (119)..(121): Xaa in position 119 to 121 is any or no amino acid
  Variant (126)..(126): Xaa in position 126 is any amino acid
  Variant (128)..(128): Xaa in position 128 is any amino acid
  Variant (129)..(130): Xaa in position 129 to 130 is any or no amino acid
  Variant (133)..(154): Xaa in position 133 to 154 is any amino acid
  Variant (156)..(157): Xaa in position 156 to 157 is any amino acid
  Variant (158)..(163): Xaa in position 158 to 163 is any or no amino acid
  Variant (166)..(176): Xaa in position 166 to 176 is any amino acid
  Variant (180)..(219): Xaa in position 180 to 219 is any amino acid
  Variant (220)..(266): Xaa in position 220 to 266 is any or no amino acid
  Variant (268)..(301): Xaa in position 268 to 301 is any amino acid
  Variant (304)..(306): Xaa in position 304 to 306 is any amino acid
  Variant (307)..(308): Xaa in position 307 to 308 is any or no amino acid
  Variant (310)..(310): Xaa in position 310 is any amino acid
  Variant (311)..(337): Xaa in position 311 to 337 is any or no amino acid
  Variant (339)..(340): Xaa in position 339 to 340 is any amino acid
  Variant (342)..(342): Xaa in position 342 is any amino acid
  Variant (344)..(344): Xaa in position 344 is any amino acid
  Variant (346)..(346): Xaa in position 346 is any amino acid
  Variant (348)..(349): Xaa in position 348 to 349 is any amino acid
  Variant (351)..(358): Xaa in position 351 to 358 is any amino acid
  Variant (359)..(359): Xaa in position 359 is any or no amino acid
  Variant (361)..(362): Xaa in position 361 to 362 is any amino acid
  Variant (364)..(368): Xaa in position 364 to 368 is any amino acid
  Variant (370)..(373): Xaa in position 370 to 373 is any amino acid
  Variant (375)..(407): Xaa in position 375 to 407 is any amino acid
  Variant (408)..(409): Xaa in position 408 to 409 is any or no amino acid
  Variant (411)..(413): Xaa in position 411 to 413 is any amino acid
  Variant (415)..(416): Xaa in position 415 to 416 is any amino acid
  Variant (418)..(457): Xaa in position 418 to 457 is any amino acid
  Variant (458)..(469): Xaa in position 458 to 469 is any or no amino acid
  Variant (471)..(478): Xaa in position 471 to 478 is any amino acid
  Variant (479)..(480): Xaa in position 479 to 480 is any or no amino acid
  Variant (484)..(486): Xaa in position 484 to 486 is any amino acid
  Variant (488)..(494): Xaa in position 488 to 494 is any amino acid
  Variant (496)..(500): Xaa in position 496 to 500 is any amino acid
  Variant (501)..(528): Xaa in position 501 to 528 is any or no amino acid
  Variant (530)..(532): Xaa in position 530 to 532 is any amino acid
  Variant (537)..(540): Xaa in position 537 to 540 is any amino acid
  Variant (542)..(543): Xaa in position 542 to 543 is any amino acid
  Variant (545)..(547): Xaa in position 545 to 547 is any amino acid
  Variant (549)..(557): Xaa in position 549 to 557 is any amino acid
  Variant (558)..(570): Xaa in position 558 to 570 is any or no amino acid
  Variant (575)..(575): Xaa in position 575 is any amino acid
  Variant (577)..(577): Xaa in position 577 is any amino acid
  Variant (579)..(579): Xaa in position 579 is any amino acid
  Variant (581)..(582): Xaa in position 581 to 582 is any amino acid
  Variant (586)..(586): Xaa in position 586 is any amino acid
  Variant (588)..(593): Xaa in position 588 to 593 is any amino acid
  Variant (594)..(594): Xaa in position 594 is any or no amino acid
  Variant (597)..(598): Xaa in position 597 to 598 is any amino acid
  Variant (601)..(601): Xaa in position 601 is any amino acid
  Variant (607)..(608): Xaa in position 607 to 608 is any amino acid
  Variant (611)..(613): Xaa in position 611 to 613 is any amino acid
  Variant (614)..(615): Xaa in position 614 to 615 is any or no amino acid
  Variant (618)..(618): Xaa in position 618 is any amino acid
  Variant (620)..(621): Xaa in position 620 to 621 is any amino acid
  Variant (622)..(622): Xaa in position 622 is any or no amino acid
  Variant (624)..(639): Xaa in position 624 to 639 is any amino acid
  Variant (640)..(657): Xaa in position 640 to 657 is any or no amino acid
  Variant (659)..(659): Xaa in position 659 is any amino acid
  Variant (660)..(663): Xaa in position 660 to 663 is any or no amino acid
  Variant (665)..(680): Xaa in position 665 to 680 is any amino acid
  Variant (681)..(699): Xaa in position 681 to 699 is any or no amino acid
  Variant (701)..(706): Xaa in position 701 to 706 is any amino acid
  Variant (708)..(711): Xaa in position 708 to 711 is any amino acid
  Variant (713)..(722): Xaa in position 713 to 722 is any amino acid
  Variant (723)..(743): Xaa in position 723 to 743 is any or no amino acid
GXXLXXRLXXXXXXXXFXVPGDXNLXXLDXXXXXXXXXXXXXXXXXGXXNELNAXYAADGYARXXXXXXXXXGXXXXXXTFXVGXLSXXNXXAGXYXEXXPXXXIXGXPXXXXXXXXXXXXLHHTXGXXXDFXXXXXXXXXXXXXXXXXXXXXXAXXXXXXXXIDXXXXXXXXXXXPVYXXXXXXXXXXXXXXXXXXXXXXXXXXXXXXXXXXXXXXXXXXXXXXXXXXXXXXXXXXXXXXXXXXXXXXXXXXXXXXXXXXXXXXXPXXXXXXXXXXXXXXXXXXXXXXXXXXXXXXXXXXKGXXXXXEXXXXXXXXXXXXXXXXXXXXXXXXXXXXHXXFXGXYXGXXSXXXXXXXXXEXXDXXXXXGXXXXDXXXXXXXXXXXXXXXXXXXXXXXXXXXXXXXXXXXMXXXLXXLXXXXXXXXXXXXXXXXXXXXXXXXXXXXXXXXXXXXXXXXXXXXXXXXXXXXLXXXXXXXXXXETGXXXFXXXXXXXPXXXXXXXXXXXXXXXXXXXXXXXXXXXXXXXXXQXXXGSIGXXXXAXXGXXXAXXXXXXXXXXXXXXXXXXXXXXGDGSXQXTXQXXSTMXRXXXXXXXIFXXNNXGYTIEXXIHXXXXXYNXIXXXWXXXXXXXXXXXXXXXXXXXXXXXXXXXXXXXXXXVXXXXXLXXXXXXXXXXXXXXXXXXXXXXXXXXXXXXXXXXXEXXXXXXDXXXXLXXXXXXXXXXXXXXXXXXXXXXXXXXXXXXXN

SEQ ID NO: 4328 - protein, 29 aa, Artificial sequence
  protein pattern
  Variant (5)..(5): Xaa in position 5 is Phe or Leu
  Variant (7)..(7): Xaa in position 7 is Leu, Met or Val
  Variant (9)..(9): Xaa in position 9 is Ala, Cys or Val
  Variant (10)..(10): Xaa in position 10 is Gln or Thr
  Variant (11)..(11): Xaa in position 11 is Asp or Glu
  Variant (12)..(12): Xaa in position 12 is Ile, Leu or Val
  Variant (13)..(13): Xaa in position 13 is Ala, Gly, Ser or Thr
  Variant (14)..(16): Xaa in position 14 to 16 is any amino acid
  Variant (17)..(17): Xaa in position 17 is His, Lys or Arg
  Variant (18)..(24): Xaa in position 18 to 24 is any amino acid
  Variant (25)..(25): Xaa in position 25 is Phe, Leu, Met or Val
  Variant (26)..(26): Xaa in position 26 is any amino acid
  Variant (27)..(27): Xaa in position 27 is Ile, Leu, Met or Val
  Variant (28)..(28): Xaa in position 28 is any amino acid
GDGSXQXTXXXXXXXXXXXXXXXXXXXXN

SEQ ID NO: 4329 - protein, 28 aa, Artificial sequence
  protein pattern
  Variant (2)..(2): Xaa in position 2 is any or no amino acid
  Variant (4)..(4): Xaa in position 4 is any or no amino acid
  Variant (7)..(7): Xaa in position 7 is Ala or Val
  Variant (8)..(8): Xaa in position 8 is Ala, Ile, Leu or Val
  Variant (10)..(10): Xaa in position 10 is Ala, Gly or Ser
  Variant (11)..(11): Xaa in position 11 is any amino acid
  Variant (14)..(14): Xaa in position 14 is Ala or Ser
  Variant (15)..(15): Xaa in position 15 is Phe or Tyr
  Variant (16)..(16): Xaa in position 16 is Ala or Ser
  Variant (18)..(18): Xaa in position 18 is any amino acid
  Variant (19)..(19): Xaa in position 19 is Ala, Ile, Leu or Val
  Variant (20)..(20): Xaa in position 20 is Gly or Pro
  Variant (21)..(22): Xaa in position 21 to 22 is Ile, Leu or Val
  Variant (23)..(23): Xaa in position 23 is any amino acid
  Variant (24)..(24): Xaa in position 24 is Ile or Val
  Variant (25)..(25): Xaa in position 25 is any amino acid
  Variant (27)..(27): Xaa in position 27 is any amino acid
GXGXLSXXNXXAGXXXEXXXXXXXXGXP

SEQ ID NO: 4330 - protein, 31 aa, Artificial sequence
  protein pattern
  Variant (2)..(3): Xaa in position 2 to 3 is any amino acid
  Variant (4)..(7): Xaa in position 4 to 7 is any or no amino acid
  Variant (9)..(9): Xaa in position 9 is any or no amino acid
  Variant (11)..(11): Xaa in position 11 is any amino acid
  Variant (12)..(12): Xaa in position 12 is Asp, Glu, Gly, Gln or Ser
  Variant (13)..(18): Xaa in position 13 to 18 is any amino acid
  Variant (20)..(20): Xaa in position 20 is Ala, Gly, Ser, Thr or Val
  Variant (21)..(21): Xaa in position 21 is Ile, Leu or Val
  Variant (25)..(25): Xaa in position 25 is Phe or Tyr
  Variant (26)..(26): Xaa in position 26 is any amino acid
  Variant (28)..(28): Xaa in position 28 is any amino acid
  Variant (29)..(29): Xaa in position 29 is Phe or Leu
  Variant (30)..(30): Xaa in position 30 is Leu or Met
LXXXXXXRXLXXXXXXXXFXXPGDXXLXXXD

SEQ ID NO: 4331 - protein, 17 aa, Artificial sequence
  protein pattern
  Variant (2)..(2): Xaa in position 2 is Cys, Asn or Ser
  Variant (3)..(3): Xaa in position 3 is Ala, Cys, Thr or Val
  Variant (6)..(6): Xaa in position 6 is Ile or Leu
  Variant (8)..(8): Xaa in position 8 is Ala or Gly
  Variant (9)..(9): Xaa in position 9 is Ala, Gly or Ser
  Variant (16)..(16): Xaa in position 16 is Ala, Gly or Ser
GXXNEXNXXYAADGYXR

SEQ ID NO: 4332 - protein, 16 aa, Artificial sequence
  protein pattern
  Variant (2)..(2): Xaa in position 2 is any amino acid
  Variant (3)..(4): Xaa in position 3 to 4 is any or no amino acid
  Variant (9)..(9): Xaa in position 9 is Phe, Trp or Tyr
  Variant (10)..(10): Xaa in position 10 is Ser or Thr
  Variant (11)..(11): Xaa in position 11 is any amino acid
  Variant (12)..(12): Xaa in position 12 is Gly or Pro
  Variant (14)..(15): Xaa in position 14 to 15 is any amino acid
QXXXGSIGXXXXAXXG

SEQ ID NO: 4333 - protein, 10 aa, Artificial sequence
  protein pattern
  Variant (2)..(2): Xaa in position 2 is Phe or Tyr
  Variant (6)..(7): Xaa in position 6 to 7 is any amino acid
  Variant (9)..(9): Xaa in position 9 is His or Lys
  Variant (10)..(10): Xaa in position 10 is Asp or Gly
GXTIEXXIXX

SEQ ID NO: 4334 - protein, 20 aa, Artificial sequence
  protein pattern
  Variant (2)..(2): Xaa in position 2 is Asp, Glu, Gly, Asn, Gln, Ser or Thr
  Variant (3)..(3): Xaa in position 3 is Ala, Ser, Thr or Val
  Variant (5)..(6): Xaa in position 5 to 6 is any amino acid
  Variant (7)..(7): Xaa in position 7 is Ile, Leu or Val
  Variant (8)..(8): Xaa in position 8 is any amino acid
  Variant (9)..(9): Xaa in position 9 is Ala, Ile, Leu or Val
  Variant (11)..(13): Xaa in position 11 to 13 is any amino acid
  Variant (14)..(14): Xaa in position 14 is Asn, Ser, Thr or Val
  Variant (16)..(18): Xaa in position 16 to 18 is any amino acid
  Variant (19)..(19): Xaa in position 19 is any or no amino acid
EXXDXXXXXGXXXXDXXXXG

SEQ ID NO: 4335 - protein, 18 aa, Artificial sequence
  protein pattern
  Variant (2)..(2): Xaa in position 2 is Gln or Thr
  Variant (4)..(4): Xaa in position 4 is Asp or Thr
  Variant (5)..(5): Xaa in position 5 is Ala, Pro or Ser
  Variant (6)..(6): Xaa in position 6 is any amino acid
  Variant (8)..(8): Xaa in position 8 is Gly or Asn
  Variant (9)..(14): Xaa in position 9 to 14 is any amino acid
  Variant (16)..(17): Xaa in position 16 to 17 is any amino acid
  Variant (18)..(18): Xaa in position 18 is Ala, Cys, Ser, Thr or Val
EXGXXXFXXXXXXXPXXX

SEQ ID NO: 4336 - protein, 15 aa, Artificial sequence
  protein pattern
  Variant (2)..(2): Xaa in position 2 is any amino acid
  Variant (3)..(3): Xaa in position 3 is Ala, Cys or Val
  Variant (4)..(4): Xaa in position 4 is Ile or Leu
  Variant (5)..(6): Xaa in position 5 to 6 is any amino acid
  Variant (7)..(7): Xaa in position 7 is Ala, Cys or Thr
  Variant (8)..(11): Xaa in position 8 to 11 is any amino acid
  Variant (12)..(12): Xaa in position 12 is Lys or Arg
  Variant (15)..(15): Xaa in position 15 is His or Tyr
DXXXXXXXXXXXPVX

SEQ ID NO: 4337 - DNA, 1599 bp, Arabidopsis thaliana
  CDS (1)..(1599)
atgagagaacggattattacattcgtttcgctgcttcttgtagctttgctttcgtttcccagtgttagctactgtgacgaccaaacgatcctgtatgaatcgtttgacgagccttttgatggtcgctgggtcgtttcagagaaagctgaataccaaggtgtgtggaagcacgagaagagtgaagggcatgatgattatggacttctagtgagtgagaaagctaagaagtacggaatagttaaagagcttgatgttgatgagcctctaaaccttaacgaaggaactgttgttcttcaatacgaggctcgtttccaagaagggcttgagtgtggtggtgcttacttaaagtatcttcgtcctcaagaagctggatgggttcctcaagggtttgataatgattctccttactctatcatgtttggacctgataagtgtggtgctaccaacaaggttcatttcatcttgaagcataagaatcccaagagtggcgagtttgttgagcaccatctcaagttccctccttctgttccgtttgacatgctttctcatgtctacactgcggtcttgaaatctgataatgaggtgaggattttggtcgatggtgaggagaagaagaagggtaatttactgtctgctgaagactttgagcctccgttgattccttccaagaccatccctgatccagaggacaagaagccagaagactgggatgagagagccaagattcctgatcctaatgctgtgaagcctgatgactgggatgaggatgcacccatggagattgaagatgaggaagctgagaaacccgaaggatggttggatgatgagcctgtagaggttgaagaccccgaggcaagcaagccagaagattgggatgacgaggaagatggtgagtgggaggctcctaaggtttccaacaccaagtgtgaggcagcacccggatgtggcgaatggaagagaccgatgaagaggaaccctgcttacaagggcaaatggagctcacctctcatagataacccagcttacaagggaatctggaaaccaagagacattccaaatcctgattattttgagcttgagaggccgaatttggagcccattgctgccattggtattgagatatggacaatgcaagacggtatcttatttgacaacatcttgatatctaaagacgagaaggttgctgaaacttacagacaaagcacttggaagcccaagtttgatgtggagaaagagaaacaaaaggcagaggatgaagctgctggtgaggcagatggtctcaagagttaccagaagaaggtgttcgacctcttgtacaaggttgcagacatttctttccttagtgcgtacaagtcaaagattatggaacttattgagaaagctgaaacacagccaaacttaaccatcggtgtgctcatttccatcgtgatcgtcttcctctctctcttcttcaagctcatatttggtggtgcaaaggctaaggtagaaaagaagaaaccggaaacagctgcagagacctcgacaagcgaggcaaagacagaggagaaagcagaagcggtggctgcaccacgaaagaggcagacgaggcgtgagagttag

SEQ ID NO: 4338 - protein, 532 aa, Arabidopsis thaliana
MRERIITFVSLLLVALLSFPSVSYCDDQTILYESFDEPFDGRWVVSEKAEYQGVWKHEKSEGHDDYGLLVSEKAKKYGIVKELDVDEPLNLNEGTVVLQYEARFQEGLECGGAYLKYLRPQEAGWVPQGFDNDSPYSIMFGPDKCGATNKVHFILKHKNPKSGEFVEHHLKFPPSVPFDMLSHVYTAVLKSDNEVRILVDGEEKKKGNLLSAEDFEPPLIPSKTIPDPEDKKPEDWDERAKIPDPNAVKPDDWDEDAPMEIEDEEAEKPEGWLDDEPVEVEDPEASKPEDWDDEEDGEWEAPKVSNTKCEAAPGCGEWKRPMKRNPAYKGKWSSPLIDNPAYKGIWKPRDIPNPDYFELERPNLEPIAAIGIEIWTMQDGILFDNILISKDEKVAETYRQSTWKPKFDVEKEKQKAEDEAAGEADGLKSYQKKVFDLLYKVADISFLSAYKSKIMELIEKAETQPNLTIGVLISIVIVFLSLFFKLIFGGAKAKVEKKKPETAAETSTSEAKTEEKAEAVAAPRKRQTRRES

SEQ ID NO: 4339 - DNA, 1856 bp, Zea mays subsp. mays
  CDS (2)..(1651)
  misc_feature (1488)..(1488): n is a, g, c or t
gatgatgggagggcgcgctctgctgctgctcctggtctcggcgctgctcgttcagatccgcgcctctgacccgctgctgtacgagccgtttgatgaggacttcgagggtagatggatcgtctccaagaaggatgaataccaaggtgtatggaagcatgccaagagtgatgggcatgaggactatggcctccttgttagtgacaaggcaaggaaatacgccataatcaaggagcttgatgagccagttaccttaaatgatgggacagtggtcctgcagtttgaagtgagacttcagaatggccttgaatgtggaggtgcctacattaagtacatccgccctcaggatgctggatgggatgccaaggagtttgataatgagactccatacactattatgtttggtccagataaatgtgggtcaaccaacaaggttcatttcatccttaagcacaagaatcctaagactggaaagtatgttgagcatcacctcaaattcccaccttctgtcccatacgacaagctctctcatgtctacacagctatcttgaagccagacaatgaggtcagaattttgatcgatggggaagaaaagaagaaggcaaacttcctttctgctgatgactttgagccagcacttatcccatccaagaccattcctgaccctgatgacaagaagccggaggactgggatgagagagctaaaatccctgatccagatgcagtgaagcctgatgattgggatgaggatgcccccatggaaattgtggatgaggaagccaccaagcctgagggatggttggatgatgaacccgaggagattgatgatcctgaggcagccaagcccgaggactgggacgatgaagaggatggtgaatgggaggcaccaaagattgacaaccccaagtgtgaagaggcacctggatgtggcgagtggaagaggccgatgaagcagaatcctgcttacaaaggcaagtggcatgcacctatgattgacaaccccaactacaagggaatctggaagcctcaggagatacccaaccctgagtactttgagcttgacaggcctgattttgatccaattgctgctattgggattgagatctggacaatgcaggatggcatcctgttcgacaatatcttgattgctgatgatgagaaagttgccacctccattctggagaagacatggaagcccaagtatgatgttgagaaggaaaaggagaaggctgaggaggctgctgctggtgcagatggtctttctgacttccagaagaagatttttgacgtcctgtacaagattgctgatattccgttcttggcaccctacaagaccaagattattgatgttatcgagaagggagagaagcagcccaacatcactattggcattttggtctccgttgtcatcgtgttcgttaccgttctcttcaagatcctttttggtggcaagaaaccagtggcacctgtgaaacctgcagctgagggcgnaagtaagcccaaggccgcggagacggacggtgctggaagcagtggtgacaaggatgagaaagaggatgaaaaggacgagacaggcccacgtcggaggacccgaagaggagacatagacctgtttttgacgtgttttagctcttctggcgtctgcttattttgagaactcttaatatttgtgagtgtataataggagcttatgtcacctctgcggcttcccccgctgctgatttgtttttaatggttagaccaggacccttcacgagcgtagaatttagttcttgttggtcatttatgtgctgtgcctgacggtgttcaatcagatagaggtgatggtttttttggtagatcaaatcaaggaatatttc

SEQ ID NO: 4340 - protein, 549 aa, Zea mays subsp. mays
  misc_feature (496)..(496): The Xaa at location 496 stands for Ala, Glu, Gly, or Val.
MMGGRALLLLLVSALLVQIRASDPLLYEPFDEDFEGRWIVSKKDEYQGVWKHAKSDGHEDYGLLVSDKARKYAIIKELDEPVTLNDGTVVLQFEVRLQNGLECGGAYIKYIRPQDAGWDAKEFDNETPYTIMFGPDKCGSTNKVHFILKHKNPKTGKYVEHHLKFPPSVPYDKLSHVYTAILKPDNEVRILIDGEEKKKANFLSADDFEPALIPSKTIPDPDDKKPEDWDERAKIPDPDAVKPDDWDEDAPMEIVDEEATKPEGWLDDEPEEIDDPEAAKPEDWDDEEDGEWEAPKIDNPKCEEAPGCGEWKRPMKQNPAYKGKWHAPMIDNPNYKGIWKPQEIPNPEYFELDRPDFDPIAAIGIEIWTMQDGILFDNILIADDEKVATSILEKTWKPKYDVEKEKEKAEEAAAGADGLSDFQKKIFDVLYKIADIPFLAPYKTKIIDVIEKGEKQPNITIGILVSVVIVFVTVLFKILFGGKKPVAPVKPAAEGXSKPKAAETDGAGSSGDKDEKEDEKDETGPRRRTRRGDIDLFLTCFSSSGVCLF

SEQ ID NO: 4341 - DNA, 1856 bp, Zea mays subsp. mays; identical to SEQ ID NO: 4339
  CDS (5)..(1651)
  misc_feature (1488)..(1488): n is a, g, c or t

SEQ ID NO: 4342 - protein, 548 aa, Zea mays subsp. mays
  misc_feature (495)..(495): The Xaa at location 495 stands for Ala, Glu, Gly, or Val.
MGGRALLLLLVSALLVQIRASDPLLYEPFDEDFEGRWIVSKKDEYQGVWKHAKSDGHEDYGLLVSDKARKYAIIKELDEPVTLNDGTVVLQFEVRLQNGLECGGAYIKYIRPQDAGWDAKEFDNETPYTIMFGPDKCGSTNKVHFILKHKNPKTGKYVEHHLKFPPSVPYDKLSHVYTAILKPDNEVRILIDGEEKKKANFLSADDFEPALIPSKTIPDPDDKKPEDWDERAKIPDPDAVKPDDWDEDAPMEIVDEEATKPEGWLDDEPEEIDDPEAAKPEDWDDEEDGEWEAPKIDNPKCEEAPGCGEWKRPMKQNPAYKGKWHAPMIDNPNYKGIWKPQEIPNPEYFELDRPDFDPIAAIGIEIWTMQDGILFDNILIADDEKVATSILEKTWKPKYDVEKEKEKAEEAAAGADGLSDFQKKIFDVLYKIADIPFLAPYKTKIIDVIEKGEKQPNITIGILVSVVIVFVTVLFKILFGGKKPVAPVKPAAEGXSKPKAAETDGAGSSGDKDEKEDEKDETGPRRRTRRGDIDLFLTCFSSSGVCLF

SEQ ID NO: 4343 - DNA, 2018 bp, Glycine max
  CDS (122)..(1753)
acatttctcactctcgtctcgaagatcgagatatctatttagatctcagaaaaacagtgtttcatttcaattcattcagtcttattattattagggtttggcgattcagagagaaagagaaatgggagaacgaaaaggaatcccaattgctctggggctcttggcgatgctcctcttcttcattgcttcttcctcttcctctcacctcgttcgtgcttccgatgacgccgacgacgcgatcttctacgagtcattcgacgaggattttgacggacggtggattgtgtccgacaacgaggattacaacggtgtctggaagcatgctaagagtgatgggcatgatgattatggacttcttattagtgaacaagcccggaaatatgctatagtcaaaaaacttgacgagcctgtcagtcttaaggatggaacagttgttcttcagtttgagactcgccttcagaatggcctcgaatgtggtggcgcatatattaaatatcttcgaccccaggagagcggatggaaaccaaaggaatttgataacgaatctccatattctatcatgtttggtcctgataagtgtggtgctacaaacaaggtgcacttcattttcaagcataagaatccaaagagtggggagtatgttgaacaccatctcaagtatcctccttctgtcccatctgacaaactaactcatgtatacactgcaattctgaagcccgataatgaattgcaaattttgattgatggtgaggagaagaaaaaggcaaatttcttgtcttctgaggactttgagcctcctcttatcccttccaagacaatccctgatcctgatgataagaaacctgaggactgggacgaaagagccaaaatcccggacccaagtgctgtgaagccagatgactgggatgaggatgcacccatggaaattttagatgaagaagcagagaaacctgaaggatggttggatgacgagccagaggaaattgatgacccagaggcgacaaaacccgaagactgggatgatgaggaggatggtgaatgggaagccccaaagattgaaaacccgaagtgtgaggcagcccctggttgtggtgaatggaagaggccaatgaagaggaatccagcttataagggaaagtggagtgctccttacatcgataaccccaattacaagggcatatggaagcctcgcgagattccaaaccctgaatactttgaactcgagaaacctgattttgagcccattgctgctcttggcattgagatttggacaatgcaggatggcatcctatttgacaatattctgatagctaacgatgataaagttgcagaatcctatcgggagaccacatggaagcccaagtttaccattgagaaagaaaaacagaaggctgaagatgaggctgcaactggttcagatggtattgcaggcttccagaagaaggtatttgacctcttgtacaagattgcagacattcccttcctgagcgaccacaaatctaagatatacgatctcattgagaaagctgagaaacagccaaatctcactattggaattcttgtagcggttgtggttgtcttcgtgtcaattttcttcaggctcatatttggtggcaagaaacctgcaaaggtggagaagaaaccagaacgcacagaagcttccaataaccaaggtggtgcagagaatgaagaaaacaaagagaaagaggaagcatctaatgctccgcgtcggaggccaaggcgagaagattgaaatggttgaatcttttaaatggcgccctgtcaactatcatcaccacagctacagataaattttgggctttagtttcattttaggtgcactctgttttcattcgtttccttttttccctttttttttaagaaaaagaaaagattatttgcttcaggggtgtagatcttctcctgtttttggagacttgagtgtttgagctagtagttgaagttgtacaattattttttgtctttatttttctattaatggatcctgtttttaacac

SEQ ID NO: 4344 - protein, 543 aa, Glycine max
MGERKGIPIALGLLAMLLFFIASSSSSHLVRASDDADDAIFYESFDEDFDGRWIVSDNEDYNGVWKHAKSDGHDDYGLLISEQARKYAIVKKLDEPVSLKDGTVVLQFETRLQNGLECGGAYIKYLRPQESGWKPKEFDNESPYSIMFGPDKCGATNKVHFIFKHKNPKSGEYVEHHLKYPPSVPSDKLTHVYTAILKPDNELQILIDGEEKKKANFLSSEDFEPPLIPSKTIPDPDDKKPEDWDERAKIPDPSAVKPDDWDEDAPMEILDEEAEKPEGWLDDEPEEIDDPEATKPEDWDDEEDGEWEAPKIENPKCEAAPGCGEWKRPMKRNPAYKGKWSAPYIDNPNYKGIWKPREIPNPEYFELEKPDFEPIAALGIEIWTMQDGILFDNILIANDDKVAESYRETTWKPKFTIEKEKQKAEDEAATGSDGIAGFQKKVFDLLYKIADIPFLSDHKSKIYDLIEKAEKQPNLTIGILVAVVVVFVSIFFRLIFGGKKPAKVEKKPERTEASNNQGGAENEENKEKEEASNAPRRRPRRED

SEQ ID NO: 4345 - DNA, 2018 bp, Glycine max; identical to SEQ ID NO: 4343
  CDS (167)..(1753)

SEQ ID NO: 4346 - protein, 528 aa, Glycine max
MLLFFIASSSSSHLVRASDDADDAIFYESFDEDFDGRWIVSDNEDYNGVWKHAKSDGHDDYGLLISEQARKYAIVKKLDEPVSLKDGTVVLQFETRLQNGLECGGAYIKYLRPQESGWKPKEFDNESPYSIMFGPDKCGATNKVHFIFKHKNPKSGEYVEHHLKYPPSVPSDKLTHVYTAILKPDNELQILIDGEEKKKANFLSSEDFEPPLIPSKTIPDPDDKKPEDWDERAKIPDPSAVKPDDWDEDAPMEILDEEAEKPEGWLDDEPEEIDDPEATKPEDWDDEEDGEWEAPKIENPKCEAAPGCGEWKRPMKRNPAYKGKWSAPYIDNPNYKGIWKPREIPNPEYFELEKPDFEPIAALGIEIWTMQDGILFDNILIANDDKVAESYRETTWKPKFTIEKEKQKAEDEAATGSDGIAGFQKKVFDLLYKIADIPFLSDHKSKIYDLIEKAEKQPNLTIGILVAVVVVFVSIFFRLIFGGKKPAKVEKKPERTEASNNQGGAENEENKEKEEASNAPRRRPRRED

SEQ ID NO: 4347 - DNA, 1899 bp, Zea mays subsp. mays
  CDS (119)..(1723)
ctccaccgcgcccacttcttatactgccagcgtctgctccctctcgcggaggcctcgctctggttggaaggtttggagaaactccccggctcgaggagatcgtgacattgagaggacgatgggagggcgcgcgctcctcctcctcctcctggtctcggcgttggtctttcagatccacgcctccgacccgctgctgtacgagccgttcgatgaggactttgaggggagatgggtcgtctccaagaaggatgaataccaaggtgtgtggaggcatgccaagagtgatggtcatgaggactatggcctccttgttagtgagaaggcaaggaaatacgccataatcaaggagcttgatgagccagttaccttgaaggatgggacagtggtcctgcagtttgaagtgagacttcagaatggccttgaatgcggaggtgcctacattaagtacatccgccctcaggatgctggatgggatgccaaggagtttgataatgagactccatacactattatgtttggtccagataagtgtggatcaaccaacaaggttcatttcatccttaagcacaagaatcctaagactggaaagtatgttgagcatcatctcaaattcccaccatctgtcccatatgacaagctctctcatgtctacacggctatcttgaagccagacaatgaggtcaaaattttggtagatggggaagaaaagaagaaggcgaacttcctttctgctgatgattttgagccagcacttatcccatccaagaccattcctgaccctgatgacaagaagccggaggactgggatgagagagctaaaattcctgatccagatgcagtaaagcctgatgactgggatgaggatgccccgatggaaattgtggatgatgaagccaccaagcctgagggatggttggatgatgaacctgaggagattgatgatcctgaggcagccaagcctgaggactgggacgatgaggaggatggtgaatgggaggcgccaaagattgacaaccccaagtgtgaagaggcacctggatgtggcgagtggaagaggccaatgaagcagaatcctgcttacaagggcaagtggcatgcacctatgattgacaaccccaactacaagggaatctggaagcctcaggagatccccaaccctgagtactttgagcttgacaagcctgactttgatccaattgctgctattgggattgagatctggacaatgcaggatggcatcctgtttgacaatatcttgattgctgacgatgagaaggttgccacctccattctggagaagacctggaagcccaagtatgatgttgagaaggaaaaggagaaggctgaggaggaggctgctgctggtgcagatggtctttctgagttccagaagaagatttttgacgtcctgtacaagattgctgatgttccgttcttggcaccctacaaaaccaagatcattgatgttatcgagaagggagagaagcagcccaacatcactattggcattctggtctccgttgtcgtcgtgttcgttaccgttctcttcaagatcctgtttggaggcaagaagccggtggcacctgtgaaacctgcagctgaggcgaagaagcccaaggccacagtgaccgacggtgctggaagcagtggcgacaaggatgagaaagaggacgaaaaggaggagacagcaggcccacgtcggaggacccgaagggagacatagagacctatttttgatgtgtttggatgttctggcgcctgcttattttgaggactcttaatatttctgagtgtataataggaacttgtgtcacctctgcggcttccctgctgcttatttgtttttacatggttagaccaggaaccttcacgagctgtagaatttagttcttgttggct

SEQ ID NO: 4348 - protein, 534 aa, Zea mays subsp. mays
MGGRALLLLLLVSALVFQIHASDPLLYEPFDEDFEGRWVVSKKDEYQGVWRHAKSDGHEDYGLLVSEKARKYAIIKELDEPVTLKDGTVVLQFEVRLQNGLECGGAYIKYIRPQDAGWDAKEFDNETPYTIMFGPDKCGSTNKVHFILKHKNPKTGKYVEHHLKFPPSVPYDKLSHVYTAILKPDNEVKILVDGEEKKKANFLSADDFEPALIPSKTIPDPDDKKPEDWDERAKIPDPDAVKPDDWDEDAPMEIVDDEATKPEGWLDDEPEEIDDPEAAKPEDWDDEEDGEWEAPKIDNPKCEEAPGCGEWKRPMKQNPAYKGKWHAPMIDNPNYKGIWKPQEIPNPEYFELDKPDFDPIAAIGIEIWTMQDGILFDNILIADDEKVATSILEKTWKPKYDVEKEKEKAEEEAAAGADGLSEFQKKIFDVLYKIADVPFLAPYKTKIIDVIEKGEKQPNITIGILVSVVVVFVTVLFKILFGGKKPVAPVKPAAEAKKPKATVTDGAGSSGDKDEKEDEKEETAGPRRRTRRET

SEQ ID NO: 4349 - DNA, 2798 bp, sorghum bicolor
  CDS (185)..(1786)
  misc_feature (2565)..(2565): n is a, g, c or t
gcccagatgaccggtattcctatcatggtgcttatcaagcctgattttggtctccttgctcattttggcattgagactgggacgatgctggacgccatcctgctctgggaggacgcttcgctctagttggaaggtttccagaaactccccccgcccccggctcgaggagatcgggacagagaggatgatgggagggcgcgcgctgctgctgctcctcgtctcggcgctgctcgttcagatccgcgcctccgatccgctgctgtacgagccgttcgacgaggacttcgaggggagatgggtcgtctccaagaaggacgagtaccaaggtgtgtggaagcatgccaagagtgatggccatgaagactatggcctccttgtcagtgagaaggcaaggaaatacgccataatcaaggagcttgatgagccagttactttgaaggatgggacagtggtcctgcagtttgaagtgaggcttcagaatggccttgaatgtggaggtgcctacattaagtacatccgccctcaggatgctggatgggatgccaaggagtttgataatgagactccatacacaattatgtttggtccagataagtgtgggtcaaccaacaaggttcatttcatccttaagcacaagaatcccaagactggaaagtatgttgagcatcacctcaaattcccaccttctgtcccatatgacaagctctctcatgtctacacggctatcttgaagccagacaatgaggtcagaattttggtcgacggggaagaaaagaagaaggcaaacttcctttctgctgatgattttgagccagcacttatcccatccaagaccattcctgaccctgatgacaagaagccagaggactgggatgagagagctaaaatccctgatccagatgcagtgaaacctgatgactgggatgaggatgcccccatggaaattgtggatgaggaagccaccaagcctgagggatggttggatgacgagcctgaggagattgatgatcctgaggcagccaagcccgaggactgggatgatgaggaggatggtgaatgggaggcgccaaagattgacaacccaaagtgtgaagaggcacctggatgcggtgagtggaagaggccaatgaagcagaatcctgcttacaagggcaagtggcatgcacctatgattgacaaccccaactacaaggggatctggaagcctcaggagatccccaaccctgagtactttgagcttgacaagcctgattttgatccaattgctgctattggtattgagatctggacaatgcaggatggcatcctgtttgacaatatcttgattgctgatgatgagaaggttgccacctccattctggagaagacctggaagcccaagtatgatgttgagaaggaaaaggagaaggctgaggaggctgctgctggtgcggatggtctttctgagttccagaagaagatttttgacgtcctgtacaagattgctgatgttccgttcttggcaccctacaagaccaagatcattgatgttatcgagaagggagagaagcagcccaacatcactattggcattttggtctccgttgtcatcgtgttcgttactgttctcttcaggatcctttttggtggcaagaagccagcggtacctgtgaaacccgcagctgaggcgaagaagcccaaagccacagagaccgacggtgctggaagcagtggtgacaaggatgagaaagaggacgaaaaggaggagacagcagccccacgtcggaggacccgcagggagacgtagagacctgtttttgatgtgtttggctgttctggcgcctgcttattttgagaactcttaatatttctgagtgtataataggaacttaagtcacctctgccgctccccctgctgctgatttgtttttacatggttagaccaggacccttcacgagctgtagaatttagttcttgttggtcatttgtgtgctgtgcctgacgggtataatcacttgttcaatcagatagaggtgatggttttttttgttctggtagatcaaatgaagaaatatttcatatgtttttttttgggagactgttcagttggatgaatgcctggttaaattcttgtttctggacgtcttaggatttaggatttggtgggtatgaatgcttgtcagcactcaccaggttgatgtcaatgttccatcgctaaggtcttgtttagttttcaaaatatttttggatttcctgtcacatgaaatcttaaaattttttggatttcttatcacatgtattgtaatttgcaaaacaatggaattcttggggcatatgaattgtaatttgtgagacgaattttataagtctccattcccagataaatatcatccttttgcatctgattgagctgtttctgtggctgtgcaagagaacattatttagttgtacacacaaacaaaaagtgggagtattttccagagtttagaagagggctgtttgtgagcactgaaggcagagaaaggcaaaaagctttagcagcggcaatgctctggtcaatggacccgcaggtgaccgtccatggngactgggtgtcagccgtggtgccgctgatgaagctgctgtgcctgacggtcatcggcctgctcctcgccaaccctcgggttcaggtcgtgcccagggccaccttcaagctgctgagcaagctcgtcttcgcgctctttcctccctggctcatcttcgtccacctcggcaagtcgggcaccataaacaacgtcctgcactggtggtcaatcctgtcaacgtgctcataagcact

SEQ ID NO: 4350 - protein, 533 aa, sorghum bicolor
MMGGRALLLLLVSALLVQIRASDPLLYEPFDEDFEGRWVVSKKDEYQGVWKHAKSDGHEDYGLLVSEKARKYAIIKELDEPVTLKDGTVVLQFEVRLQNGLECGGAYIKYIRPQDAGWDAKEFDNETPYTIMFGPDKCGSTNKVHFILKHKNPKTGKYVEHHLKFPPSVPYDKLSHVYTAILKPDNEVRILVDGEEKKKANFLSADDFEPALIPSKTIPDPDDKKPEDWDERAKIPDPDAVKPDDWDEDAPMEIVDEEATKPEGWLDDEPEEIDDPEAAKPEDWDDEEDGEWEAPKIDNPKCEEAPGCGEWKRPMKQNPAYKGKWHAPMIDNPNYKGIWKPQEIPNPEYFELDKPDFDPIAAIGIEIWTMQDGILFDNILIADDEKVATSILEKTWKPKYDVEKEKEKAEEAAAGADGLSEFQKKIFDVLYKIADVPFLAPYKTKIIDVIEKGEKQPNITIGILVSVVIVFVTVLFRILFGGKKPAVPVKPAAEAKKPKATETDGAGSSGDKDEKEDEKEETAAPRRRTRRET

SEQ ID NO: 4351 - DNA, 2089 bp, zea mays
  CDS (174)..(1772)
ccggccgggagatcgatcgatctccaccgttccttctccccgttcctaatgtcagccgtgcagcctctccactgcgcccacttcttatactcccaccttctgctccctctcacggacgcttcgctctagtcggaaggtttcgaggaactcccgggctcgaggagatcgggacgatgatgggagggcgcgctctgctgctgctcctggtctcggcgctgctcgttcagatccgcgcctctgacccgctgctgtacgagccgtttgatgaggacttcgagggtagatggatcgtctccaagaaggatgaataccaaggtgtatggaagcatgccaagagtgatgggcatgaggactatggcctccttgttagtgacaaggcaaggaaatacgccataatcaaggagcttgatgagccagttaccttaaatgatgggacagtggtcctgcagtttgaagtgagacttcagaatggccttgaatgtggaggtgcctacattaagtacatccgccctcaggatgctggatgggatgccaaggagtttgataatgagactccatacactattatgtttggtccagataaatgtgggtcaaccaacaaggttcatttcatccttaagcacaagaatcctaagactggaaagtatgttgagcatcacctcaaattcccaccttctgtcccatacgacaagctctctcatgtctacacagctatcttgaagccagacaatgaggtcagaattttgatcgatggggaagaaaagaagaaggcgaacttcctttctgctgatgactttgagccagcacttatcccatccaagaccattcctgaccctgatgacaagaagccggaggactgggatgagagagctaaaatccctgatccagatgcagtgaagcctgatgattgggatgaggatgcccccatggaaattgtggatgaggaagccaccaagcctgagggatggttggatgatgaacccgaggagattgatgatcctgaggcagccaagcccgaggactgggacgatgaagaggatggtgaatgggaggcaccaaagattgacaaccccaagtgtgaagaggcacctggatgtggcgagtggaagaggccgatgaagcagaatcctgcttacaaaggcaagtggcatgcacctatgattgacaaccccaactacaagggaatctggaagcctcaggagatacccaaccctgagtactttgagcttgacaggcctgattttgatccaattgctgctattgggattgagatctggacaatgcaggatggcatcctgttcgacaatatcttgattgctgatgatgagaaagttgccacctccattctcgagaagacatggaagcccaagtatgatgttgagaaggaaaaggagaaggctgaggaggctgctgctggtgcagatggtctttctgacttccagaagaagatttttgacgtcctgtacaagattgctgatattccgttcttggcaccctacaagaccaagattattgatgttatcgagaagggagagaaacagcccaacatcactattggcattttggtctccgttgtcatcgtgttcgttaccgttctcttcaagctcctttttggtggcaagaaaccagtggcacctgtgaaacctgcagctgaggcgaagaagcccaaggccgcggagacggacggtgctggaagcagtggtgacaaggatgagaaagaggatgaaaaggaggagacaggcccacgtcggaggacccgaagggagacatagacctgtttttgacgtgttttagctcttctggcgtctgcttattttgagacctcttaatatttgtgagtgtataataggagcttatgtcacctctgcggcttcccccgctgctgatttgtttttaatggttagaccaggacccttcacgagcgtagaatttagttcttgttggtcatttatgtgctgtgcctgacggtgttcaatcagatagaggtgatggtttttttggtagatcaaatcaaggaatatttcatatgcctttttggcaactgtttcagttgggtattcgcctggttaagctttcgtttgtgtttcgg

SEQ ID NO: 4352 - protein, 532 aa, zea mays
MMGGRALLLLLVSALLVQIRASDPLLYEPFDEDFEGRWIVSKKDEYQGVWKHAKSDGHEDYGLLVSDKARKYAIIKELDEPVTLNDGTVVLQFEVRLQNGLECGGAYIKYIRPQDAGWDAKEFDNETPYTIMFGPDKCGSTNKVHFILKHKNPKTGKYVEHHLKFPPSVPYDKLSHVYTAILKPDNEVRILIDGEEKKKANFLSADDFEPALIPSKTIPDPDDKKPEDWDERAKIPDPDAVKPDDWDEDAPMEIVDEEATKPEGWLDDEPEEIDDPEAAKPEDWDDEEDGEWEAPKIDNPKCEEAPGCGEWKRPMKQNPAYKGKWHAPMIDNPNYKGIWKPQEIPNPEYFELDRPDFDPIAAIGIEIWTMQDGILFDNILIADDEKVATSILEKTWKPKYDVEKEKEKAEEAAAGADGLSDFQKKIFDVLYKIADIPFLAPYKTKIIDVIEKGEKQPNITIGILVSVVIVFVTVLFKLLFGGKKPVAPVKPAAEAKKPKAAETDGAGSSGDKDEKEDEKEETGPRRRTRRET

SEQ ID NO: 4353 - DNA, 2140 bp, triticum aestivum
  CDS (63)..(1664)
  misc_feature (1984)..(1984): n is a, g, c or t
  misc_feature (1987)..(1987): n is a, g, c or t
  misc_feature (2091)..(2091): n is a, g, c or t
  misc_feature (2105)..(2105): n is a, g, c or t
  misc_feature (2132)..(2132): n is a, g, c or t
ccacgcgtccggatcgacaccagtggaagttccttccggttccagagagatcgcggtggaggatgacgggaggagggcgcgcggtgctcctgctgccggtgctgctgatctcggcgctgttcgcgcagatccgcgcgtcggatccgttgttccacgagtccttcaacgagagcttcgacgggagctggatcgtgtccggcaaggaggagtacaaaggtgtatggaagcacgcgaagagtgatggccatgaagactatggtctccttgttagcgagccagccaggaaatatgccataatcaaagaacttgattacccagttactatgaaggatgagacagttgtcctgcagtttgaagtgaggcttcagaatggccttgagtgtggaggtgcttatatcaagtacatccgtcctcaggctaccggatggaacgccaaggactttgacaatgatactccatacacaattatgtttggtcccgacaagtgtggttcaacgaacaaggttcacttcatcctgaagcacaagaaccctaagactggcaaatacgttgaacatcacctcaagtccccaccctctgtcccatatgacaagctctctcatgtctacacggctatcttgaagccggataatgaggtcagaattttggttgatggggtggagaagagtaaagcaaacttcctgtctgctgctgattttgagccggcacttattccatcaaagactattcctgaccctgacgacaagaagccagaggactgggacgagagagctaagatccctgatccagttgcggtgaagcccgatgactgggatgaggatgccccaatggaaattgtggatgaggaggccaccaagccagaaggatggttggatgatgagcctgaggaaattgatgatccagaagctgctaagcctgaggactgggatgatgaggaggatggcgaatgggaggcacccaagatggacaaccccaagtgcgaagtggcacctggatgtggtgaatggaagaagccgatgaaggataaccctgcctacaagggcaagtggcatgcccccctgattgacaaccccaactacaagggaatctggaagccccaagaaatctccaaccctgagtactttgagcttgacaagcctgactttgacccaattgccgctattggaattgagatctggacaatgcaggatggcatcctgtttgacaacattcttattgccgacaatgagaaggtagccacctctatcctggagaagacatggaagcccaagtttgatgttgagaaggaaaagcagaaggctgaggaggctgcagcaggtgcatcagaaggcctttctgaattccagaagaagatctttgacattttgtacaaagttgcagacatcccgttcttggaaccatacaagaccaagatcattgatgtgattgagaagggagagacacagccaaacattacaatttcgattttggcgtctgtcatcgtcgtcattgtgactgtactcttcagagccctgtttggtggcaagaagccagtggcacctgtgaagcccgctgctgagaccaagaagcccagtgctgtcgtacctgatgccgccgctggaagcagcggcgacatggaggatgacaaggatgcgccgcgccgaaggtcgcgaagagacgcataaactaactcttggtgccttcacattttgaaggactcggttatagcctttttgagaacgcctcgagtgtataatcgaaccctctgctgctagtagcaacctctagttttaagtcgcttaacattacgagccggtgaagctcgtgttcggttgtttgtgtcctgtcctgaatcagctagaagagatgtttttttttcctttccttttgttttttatttcttctgttctatatcagatgaaacatgaagcttgtgttcggttgtttgtgtgctgtgctaaatcaggtactccctccgttcccatattaattgtcgctgatttantanaaaaaaaaaaaaaaaggaaaggaaaaaaaaacatctcttctagcctgattcaggacaggacacaaacaaccgaacacgagcttcaccgggctcgtaatgttaancgacttaaaactanaggttgctactaacagcagagggttcnattataca

SEQ ID NO: 4354 - protein, 533 aa, triticum aestivum
MTGGGRAVLLLPVLLISALFAQIRASDPLFHESFNESFDGSWIVSGKEEYKGVWKHAKSDGHEDYGLLVSEPARKYAIIKELDYPVTMKDETVVLQFEVRLQNGLECGGAYIKYIRPQATGWNAKDFDNDTPYTIMFGPDKCGSTNKVHFILKHKNPKTGKYVEHHLKSPPSVPYDKLSHVYTAILKPDNEVRILVDGVEKSKANFLSAADFEPALIPSKTIPDPDDKKPEDWDERAKIPDPVAVKPDDWDEDAPMEIVDEEATKPEGWLDDEPEEIDDPEAAKPEDWDDEEDGEWEAPKMDNPKCEVAPGCGEWKKPMKDNPAYKGKWHAPLIDNPNYKGIWKPQEISNPEYFELDKPDFDPIAAIGIEIWTMQDGILFDNILIADNEKVATSILEKTWKPKFDVEKEKQKAEEAAAGASEGLSEFQKKIFDILYKVADIPFLEPYKTKIIDVIEKGETQPNITISILASVIVVIVTVLFRALFGGKKPVAPVKPAAETKKPSAVVPDAAAGSSGDMEDDKDAPRRRSRRDA

SEQ ID NO: 4355 - DNA, 1972 bp, triticum aestivum
  CDS (89)..(1681)
gctcctcccccagtcccggtcgcttcgaagatcgacgacaccagtggagaagttccttccggttccagagagatcgcgggggaggaggatgatgggagggcgcgcggtgctcctgctgctggtgatctcggcgctgttcgcgcagatccacgcgtcggatccgctgttccacgagtccttcaacgagagcttcgacgggagctggatcgtgtccggcaaggaggagtacaaaggtgtatggaagcacgcgaagagtgatggccatgaagattatggtctccttgttagcgagccagccaggaaatatgccataatcaaagaacttgattacctggttactttgaagggtgagacagttgtcctgcagtttgaagtgaggcttcagaatggccttgagtgtggaggtgcttatatcaagtacatccgtcctcaggctactggatggaacgccaaggactttgacaatgatactccgtacacaattatgtttggtcctgacaagtgtggttcaacgaacaaggttcacttcatcctgaagcacaagaaccctaagactggcaaatatgttgaacatcacattaagtccccaccctctgtcccatatgacaaactctctcatgtctacacggctatcttgaagccggataatgaagtcagaattttggttgatggggtggagaagagcaaagcaaacttcctgtctgctgatgattttgagccggcacttgttccatcaaagactattcctgaccctgacgacaagaagccagaggactgggacgagagagctaagatccctgatccagttgcggtgaagcccgatgactgggatgaggatgccccaatggaaattgtggatgaggaggccaccaagccagaaggatggttggatgatgaccctgaggaaattgatgatccagaggctgctaagcctgaggactgggatgatgaggaggatggtgaatgggaggcaccgaagatggacaaccccaagtgcgaagtggcacctggatgtggtgaatggaagaagccgatgaaggataaccctgcctacaagggaaagtggcatgcccccctgattgacaaccccaactacaagggaatctggaagccccaagaaatccccaacccggagtactttgagcttgacaagcctgactttgacccaattgccgctattggaattgagatctggacaatgcaggatggcatcctatttgacaacattcttattgccgataatgagaaggtagccacctctgtccgggagaagacatggaagcccaagtttgatgccgagaaggaaaagcagaaggctgaggaggctgcagcaggtgcatcagagggcctttctgaaatccagaagaagatctttgacattctgtacaaagtcgcagacatcccattcttggaaccatacaagaccaagatcattgatgtgattgagaagggagagacgcagccaaacattacaatttcgattttggcctctgtcattgtcgtcattgtgactgtactcttcaaagccctgtttggtggcaagaagccagtggcacctgtgaagcccactgctgagaccaagaagcccagtgccgtcgtacctgatgccgccgccggaagcagcggcgacaaggaggatgacaaggatgcgccacgccgaaggtcgcgaagagacgcataaactaactcttggtgccttcacgttttgaaggactcggttatagcctttttgagaacgcgtcgagtgtataatcgaaccctctgctgctagtagcaacctctagttttaagtcgcttgacattacgagccggcgaagctcgtgttgttcggttgtttgtgtgctgtcctgaatcagctagaagagatgtttttttttttcctttccttttgttttttctttcttttgttttatatcaggtgaaacatgaagcttgtgttcggttgtttgtgtgctgtgctaaatcaggtact

SEQ ID NO: 4356 - protein, 530 aa, triticum aestivum
MMGGRAVLLLLVISALFAQIHASDPLFHESFNESFDGSWIVSGKEEYKGVWKHAKSDGHEDYGLLVSEPARKYAIIKELDYLVTLKGETVVLQFEVRLQNGLECGGAYIKYIRPQATGWNAKDFDNDTPYTIMFGPDKCGSTNKVHFILKHKNPKTGKYVEHHIKSPPSVPYDKLSHVYTAILKPDNEVRILVDGVEKSKANFLSADDFEPALVPSKTIPDPDDKKPEDWDERAKIPDPVAVKPDDWDEDAPMEIVDEEATKPEGWLDDDPEEIDDPEAAKPEDWDDEEDGEWEAPKMDNPKCEVAPGCGEWKKPMKDNPAYKGKWHAPLIDNPNYKGIWKPQEIPNPEYFELDKPDFDPIAAIGIEIWTMQDGILFDNILIADNEKVATSVREKTWKPKFDAEKEKQKAEEAAAGASEGLSEIQKKIFDILYKVADIPFLEPYKTKIIDVIEKGETQPNITISILASVIVVIVTVLFKALFGGKKPVAPVKPTAETKKPSAVVPDAAAGSSGDKEDDKDAPRRRSRRDA

SEQ ID NO: 4357 - DNA, 2072 bp, Ricinus communis
  CDS (112)..(1740)
ggcacgagcttgtgttagattagattttagattcagatcagatcaataattatacttagctaaacctaggaggagtagctagggttttgagagtttttgggataccaagagatgggagaagcaaaacgcatctctctacgattagctcttgtatttttagtagcttttgtttccttcgttcagctacgagcagactctgacgataataagatcttctacgagtcatttgaggactcatttgaaggacgatggactctgtctgctaaagatgactacaaaggtgagtggaagcacgcgaagagtgaaggtcatgatgagtatggccttcttgtgagtgaaaaagctaggaagtatgccattgtgaaagagctcgacgaaccggcaactctcaaggatggaaccattgttctccaattcgagactcgttttcagaatgggcttgaatgcggtggcgcatatcttaaatatttgcgtccccaggaagctgggtggactcctaaggattttgacaatgactctccttattctataatgtttggacctgacaaatgtggggccacaaacaaggtgcacttcattcttaagcacaagaacccaaagagtggcgagtacattgaacaccatctcaaatatccaccatctgttccatctgacaaactcacccatgtctatactgccattctgaaacctgacaatgagctgcgaattttggttgatggagaagagaagaagaaggcaaattttctctcatctgatgatttcgagcctcctttagttcctgccaagacaattcctgatccggatgataagaagcctgaagactgggatgagcgagccaaaattcctgatcctaatgcagtgaagccagatgattgggacgaggatgcacctatggaaattgtagatgaggatgctgagaaacctgaaggatggttagatgatgagcctgaggaaattgatgatcctgatgctgcaaaacctgaagattgggatgatgaggaggatggtgaatgggaggcaccaaagattgataacccaaagtgtgagacagcacctggttgtggtgaatggaagaggccaatgaaaagaaatccagcttacaaaggaaaatggcatgctccacttattgacaaccccaactataagggtatctggaagcctcaggagattccaaaccccaactactttgagcttgaaaagcctgactttgagcccattgctgctgttggcattgagatctggacaatgcaggacggtattttgtttggacatatcttgatagcagatgatgagaaggttgcagagtcactcaggcagacagcatggaagccaaagtttgatgctgagaaagagaaacagaaggctgaggatgcagctgctggttcagatggtcttgctggcttccagaagaaggtgtttgatctgctgtaccaggttgcagatattcctttcttaagcgagcacaaggacaaaattattgatattattgaaaagggagagaaacagcccaacctcacaattggtatactcgtctccattgtggtggtgatctttactgtgctttttaagatcctctttggtgggaagaagcctgcaaaagtagaagagaaacctgcaccagctgctgagacttcgaaaaaggaagaaagcagtggagagaaagcggaagagaacgagaaggaagatgctgcagctgctgctgctccccctcgcagaaggcaagccaggcgcgagaactaaaaggacaatgaaaggagagtggtccgcttcaactttcacttttggtagatcttcagtttaggcgtctttacactcttgctggctggattcttgcatatctctcttttttttctttcttttcttgttcgggttttgtggctctgttttggagcataaaatggatgaagagtgtaaatgacatgatgatctgtgaggttttgatacttcatttcccgcctcggaagtaaaattagcctgccaacttaaggatattattgttgatttgactattaaagaaaacacatgcaactaatgtgaaagtagcatttttatttaaaaaaaaaaaaaaaaaa

SEQ ID NO: 4358 - protein, 542 aa, Ricinus communis
MGEAKRISLRLALVFLVAFVSFVQLRADSDDNKIFYESFEDSFEGRWTLSAKDDYKGEWKHAKSEGHDEYGLLVSEKARKYAIVKELDEPATLKDGTIVLQFETRFQNGLECGGAYLKYLRPQEAGWTPKDFDNDSPYSIMFGPDKCGATNKVHFILKHKNPKSGEYIEHHLKYPPSVPSDKLTHVYTAILKPDNELRILVDGEEKKKANFLSSDDFEPPLVPAKTIPDPDDKKPEDWDERAKIPDPNAVKPDDWDEDAPMEIVDEDAEKPEGWLDDEPEEIDDPDAAKPEDWDDEEDGEWEAPKIDNPKCETAPGCGEWKRPMKRNPAYKGKWHAPLIDNPNYKGIWKPQEIPNPNYFELEKPDFEPIAAVGIEIWTMQDGILFGHILIADDEKVAESLRQTAWKPKFDAEKEKQKAEDAAAGSDGLAGFQKKVFDLLYQVADIPFLSEHKDKIIDIIEKGEKQPNLTIGILVSIVVVIFTVLFKILFGGKKPAKVEEKPAPAAETSKKEESSGEKAEENEKEDAAAAAAPPRRRQARREN

SEQ ID NO: 4359 - DNA, 1623 bp, Medicago truncatula
  CDS (1)..(1623)
atgggagagcgaaagcgaattcctctcggaatttttgcagtgatcttcttcgtaatttgttcttcatcgttacaccttcttcgtgcttccgatgatgccgatgacgcgatcttctacgaatcatttgatgaggattttgatgatcgttggattgtttccgataaggatgaatataacggcatctggaagcattcaaagagtgaggggcatgaagattatgggcttcttgtcagtgagaaagcaagaaagtatgctgtagttaaagaacttgatgagcctgtgattcttaaggatgaatcagttgttcttcagtttgagactcgccttcagaatggcctcgaatgtggtggtgcatatctaaaatatcttcgaccacaggaagctggttggaaacccaaggaatttgacaacgattctccctattctatcatgtttggtcctgacaagtgtggggccacaaacaaggtgcacttcattttcaagcataagaatccgaagagtggggagtatgttgaacaccatctcaagtttcccccatctgttccttctgacaagctatctcacgtgtacactgctattttgaaacccgacaatgagttgcaaattttgattgatggggaacagaagaaaaaggcaaatttcttatcttctgaggattttgagccttcccttatccctcccaagacaatcccagatcctgaagataagaaacctgaggactgggacgagagagagaaaattccagacccaagtgcagtaaagcctgatgactgggatgaggatgcacccttggaaattcttgatgaagaaactgtgaaacctgaaggatggttagatgatgagcctgaggagatagatgacccagaggctacaaaaccagaagattgggacgatgaagaggatggtgaatgggaagcccctaagattactaacccaaattgtgaaacagcccctggttgtggtgagtggaaaaggccaatgaagaagaatccagcatacaagggaaaatggcatgcccccctaattaaaaatccagcttataagggtatatggaagcctcaggatattccaaaccctgattactttgagcttaaaaaacccgattttgagcctattgcagctattggtattgagatttggacaatgcaggatggcatattgtttgacaatattttgatcgctaaagatgataagattgcagcttcataccgggagactacatggaagcccaagtttactattgagaaagagaagcagaaggaagaagaaaaggacactgaatcaagtggtcttgcaagcatacataagaaggtatttgacctgttatacaagattgcagacattcccttcctgagtgcctacaagtttaaaatacatgatctcattgaaaagggtgaaacgcagccgaatctcacagttggaattcttgtagccgttgtggttattgtcttgacaattttccttcgtattgtatttggtgggaagaaaaagccagcaagagtggagaaaacaaacacacctgccgcagaaacttccactaaccaagacagtggagagaatgaagaaaacaaagaggaggaaacatcgaaggctccacgtcggagggtaaagcgagataattga

SEQ ID NO: 4360 - protein, 540 aa, Medicago truncatula
MGERKRIPLGIFAVIFFVICSSSLHLLRASDDADDAIFYESFDEDFDDRWIVSDKDEYNGIWKHSKSEGHEDYGLLVSEKARKYAVVKELDEPVILKDESVVLQFETRLQNGLECGGAYLKYLRPQEAGWKPKEFDNDSPYSIMFGPDKCGATNKVHFIFKHKNPKSGEYVEHHLKFPPSVPSDKLSHVYTAILKPDNELQILIDGEQKKKANFLSSEDFEPSLIPPKTIPDPEDKKPEDWDEREKIPDPSAVKPDDWDEDAPLEILDEETVKPEGWLDDEPEEIDDPEATKPEDWDDEEDGEWEAPKITNPNCETAPGCGEWKRPMKKNPAYKGKWHAPLIKNPAYKGIWKPQDIPNPDYFELKKPDFEPIAAIGIEIWTMQDGILFDNILIAKDDKIAASYRETTWKPKFTIEKEKQKEEEKDTESSGLASIHKKVFDLLYKIADIPFLSAYKFKIHDLIEKGETQPNLTVGILVAVVVIVLTIFLRIVFGGKKKPARVEKTNTPAAETSTNQDSGENEENKEEETSKAPRRRVKRDN

SEQ ID NO: 4361 - DNA, 1626 bp, Medicago truncatula
  CDS (1)..(1626)
atggtggaacgaaaggttatccctatcgctatcgcggtgctctttttcttcattgcttcctcttccttcgttcacgcttccgatgaagctgacgatgcgatcttctacgaatcgttcgatgaggattttgatagccgttggattgtatctgaaaaggaggaatacaatggtgtctggaagcattctaagagtgaggggcacgacgattttggacttcttgttagtgaaccagcaaggaagtacgccatagttaaagaacttgacgaacctgtcattcttaaggatggatcagttgttcttcagtttgagactcgcctacagaatggccttgaatgtggtggtgcatatatcaaatatcttcaaccccaggagagtggttggaaacccaagggatttgacaacgaatctccatattctgtcatgtttggtccagacaagtgtggggcaacaaataaggttcacttcatcttcaggcataagaatccaaagaccggaaagtatgttgaacaccatctcaagttccccccttctgtcccatctgacaaactatctcatgtgtacactgccattctaaagcctgataatgagttgagaattctagttgacggcgaggagaagaaaaaggctaacttcctatccgaggaggattttgagccttctcttatcccttccaagacaatccctgatcctgatgataacaaacccgaagactgggacgagagagccaagattcctgacccagaagctgtaaagccagaggactgggatgaggatgcacccatggaaattatcgatgaagaagctgagaaacctgaaggatggctggacgacgagccagaggaaatagatgacccggaggcaacaaaacctgaagattgggatgatgaggaggatggtgaatgggaagctcccaaaattgaaaacccaaagtgtgaaacagcccctggttgtggtgagtggaagaggccaacgaagaggaacccagcttataagggaaaatggagtgcccccttcattgataacccagcttataagggtatatggaagcctcaggagattccaaacccagagtactttgaacttgagaaacctgactttgagcctattgctgctattggtattgaaatttggacaatgcaggacggcattctatttgataatgttcttatagctaaggatgataagattgcagaatcctatcgtgaaactacatggaaacccaagtttaacattgagaaagagaagcagaaggctgaagaggaggcagcagctgagtcagagggtattgctggctaccagaagaaggcatttgacctcttgtacaagatcgcagacattcccttcctgagtggccagaaagataagattattgaaatcattgaaaagggggagaagcaaccaaatctgactattggaattcttgcatccgttgtggttgttttcgtaacaattttctttaggctcatattcggcgggaagaaacctgctaaggtggaggcgaaggtagagaagaagaccaacacagaacgcacagaaacttcccaagctggtggagagaatgaagacaacaaagagaaggaagaaacagccaatgctccacgtaggaggccaaagcgagacaattga

SEQ ID NO: 4362 - protein, 541 aa, Medicago truncatula
MVERKVIPIAIAVLFFFIASSSFVHASDEADDAIFYESFDEDFDSRWIVSEKEEYNGVWKHSKSEGHDDFGLLVSEPARKYAIVKELDEPVILKDGSVVLQFETRLQNGLECGGAYIKYLQPQESGWKPKGFDNESPYSVMFGPDKCGATNKVHFIFRHKNPKTGKYVEHHLKFPPSVPSDKLSHVYTAILKPDNELRILVDGEEKKKANFLSEEDFEPSLIPSKTIPDPDDNKPEDWDERAKIPDPEAVKPEDWDEDAPMEIIDEEAEKPEGWLDDEPEEIDDPEATKPEDWDDEEDGEWEAPKIENPKCETAPGCGEWKRPTKRNPAYKGKWSAPFIDNPAYKGIWKPQEIPNPEYFELEKPDFEPIAAIGIEIWTMQDGILFDNVLIAKDDKIAESYRETTWKPKFNIEKEKQKAEEEAAAESEGIAGYQKKAFDLLYKIADIPFLSGQKDKIIEIIEKGEKQPNLTIGILASVVVVFVTIFFRLIFGGKKPAKVEAKVEKKTNTERTETSQAGGENEDNKEKEETANAPRRRPKRDN

SEQ ID NO: 4363 - DNA, 1602 bp, Zea mays
  CDS (1)..(1602)
atgggagggcgcgcgctcctcctcctcctggtctcggcgttggtctttcagatccacgcctccgacccgctgctgtacgagccgttcgatgaggactttgaggggagatgggtcgtctccaagaaggatgaataccaaggtgtgtggaagcatgccaagagtgatggtcatgaggactatggcctccttgttagtgagaaggcaaggaaatacgccataatcaaggagcttgatgagccagttaccttgaaggatgggacagtggtcctgcagtttgaagtgagacttcagaatggccttgaatgcggaggtgcctacattaagtacatccgccctcaggatgctggatgggatgccaaggagtttgataatgagactccatacactattatgtttggtccagataagtgtggatcaaccaacaaggttcatttcatccttaagcacaagaatcctaagactggaaagtatgttgagcatcatctcaaattcccaccatctgtcccatatgacaagctctctcatgtctacacggctatcttgaagccagacaatgaggtcaaaattttggtagatggggaagaaaagaagaaggcgaacttcctttctgctgatgattttgagccagcacttatcccatccaagaccattcctgaccctgatgacaagaagccggaggactgggatgagagagctaaaattcctgatccagatgcagtaaagcctgatgactgggatgaggatgccccgatggaaattgtggatgatgaagccaccaagcctgagggatggttggatgatgaacctgaggagattgatgatcctgaggcagccaagcctgaggactgggacgatgaggaggatggtgaatgggaggcgccaaagattgacaaccccaagtgtgaagaggcacctggatgtggcgagtggaagaggccaatgaagcagaatcctgcttacaagggcaagtggcatgcacctatgattgacaaccccaactacaagggaatctggaagcctcaggagatccccaaccctgagtactttgagcttgacaagcctgactttgatccaattgctgctattgggattgagatctggacaatgcaggatggcatcctgtttgacaatatcttgattgctgacgatgagaaggttgccacctccattctggagaagacctggaagcccaagtatgatgttgagaaggaaaaggagaaggctgaggaggaggctgctgctggtgcagatggtctttctgagttccagaagaagatttttgacgtcctgtacaagattgctgatgttccgttcttggcaccctacaaaaccaagatcattgatgttatcgagaagggagagaagcagcccaacatcactattggcattctggtctccgttgtcgtcgtgttcgttaccgttctcttcaagatcctgtttggaggcaagaagccggtggcacctgtgaaacctgcagctgaggcgaagaagcccaaggccacagtgaccgacggtgctggaagcagtggcgacaaggatgagaaagaggacgaaaaggaggagacatcaggcccacgtcggaggacccgaagggagacatag

SEQ ID NO: 4364 - protein, 533 aa, Zea mays
MGGRALLLLLVSALVFQIHASDPLLYEPFDEDFEGRWVVSKKDEYQGVWKHAKSDGHEDYGLLVSEKARKYAIIKELDEPVTLKDGTVVLQFEVRLQNGLECGGAYIKYIRPQDAGWDAKEFDNETPYTIMFGPDKCGSTNKVHFILKHKNPKTGKYVEHHLKFPPSVPYDKLSHVYTAILKPDNEVKILVDGEEKKKANFLSADDFEPALIPSKTIPDPDDKKPEDWDERAKIPDPDAVKPDDWDEDAPMEIVDDEATKPEGWLDDEPEEIDDPEAAKPEDWDDEEDGEWEAPKIDNPKCEEAPGCGEWKRPMKQNPAYKGKWHAPMIDNPNYKGIWKPQEIPNPEYFELDKPDFDPIAAIGIEIWTMQDGILFDNILIADDEKVATSILEKTWKPKYDVEKEKEKAEEEAAAGADGLSEFQKKIFDVLYKIADVPFLAPYKTKIIDVIEKGEKQPNITIGILVSVVVVFVTVLFKILFGGKKPVAPVKPAAEAKKPKATVTDGAGSSGDKDEKEDEKEETSGPRRRTRRET

SEQ ID NO: 4365 - DNA, 1599 bp, Zea mays
  CDS (1)..(1599)
atgatgggagggcgcgctctgctgctgctcctggtctcggcgctgctcgttcagatccgcgcctctgacccgctgctgtacgagccgtttgatgaggacttcgagggtagatggatcgtctccaagaaggatgaataccaaggtgtatggaagcatgccaagagtgatgggcatgaggactatggcctccttgttagtgacaaggcaaggaaatacgccataatcaaggagcttgatgagccagttaccttaaatgatgggacagtggtcctgcagtttgaagtgagacttcagaatggccttgaatgtggaggtgcctacattaagtacatccgccctcaggatgctggatgggatgccaaggagtttgataatgagactccatacactattatgtttggtccagataaatgtgggtcaaccaacaaggttcatttcatccttaagcacaagaatcctaagactggaaagtatgttgagcatcacctcaaattcccaccttctgtcccatacgacaagctctctcatgtctacacagctatcttgaagccagacaatgaggtcagaattttgatcgatggggaagaaaagaagaaggcgaacttcctttctgctgatgactttgagccagcacttatcccatccaagaccattcctgaccctgatgacaagaagccggaggactgggatgagagagctaaaatccctgatccagatgcagtgaagcctgatgattgggatgaggatgcccccatggaaattgtggatgaggaagccaccaagcctgagggatggttggatgatgaacccgaggagattgatgatcctgaggcagccaagcccgaggactgggacgatgaagaggatggtgaatgggaggcaccaaagattgacaaccccaggtgtgaagaggcacctggatgtggcgagtggaagaggccgatgaagcagaatcctgcttacaaaggcaagtggcatgcacctatgattgacaaccccaactacaagggaatctggaagcctcaggagatacccaaccctgagtactttgagcttgacaggcctgattttgatccaattgctgctattgggattgagatctggacaatgcaggatggcatcctgttcgacaatatcttgattactgatgatgagaaagttgccacctccattctcgagaagacctggaagcccaagtatgatgttgagaaggaaaaggagaaggctgaggaggctgctgctggtgcagatggtctttctgacttccagaagaagatttttgacgtcctgtacaagattgctgatattccgttcttggcaccctacaagaccaagattattgatgttatcgagaagggagagaaacagcccaacatcactattggcattttggtctccgttgtcatcgtgttcgttaccgttctctgcaagctcctgtttggtggcaagaaaccagtggcacctgtgaaacctgcagctgaggcgaagaagcccaaggccgcggagacggacggtgctggaagcagtggtgacaaggatgagaaagaggatgaaaaggaggagacaggcccacgtcggaggacccgaagggagacatag

SEQ ID NO: 4366 - protein, 532 aa, Zea mays
MMGGRALLLLLVSALLVQIRASDPLLYEPFDEDFEGRWIVSKKDEYQGVWKHAKSDGHEDYGLLVSDKARKYAIIKELDEPVTLNDGTVVLQFEVRLQNGLECGGAYIKYIRPQDAGWDAKEFDNETPYTIMFGPDKCGSTNKVHFILKHKNPKTGKYVEHHLKFPPSVPYDKLSHVYTAILKPDNEVRILIDGEEKKKANFLSADDFEPALIPSKTIPDPDDKKPEDWDERAKIPDPDAVKPDDWDEDAPMEIVDEEATKPEGWLDDEPEEIDDPEAAKPEDWDDEEDGEWEAPKIDNPRCEEAPGCGEWKRPMKQNPAYKGKWHAPMIDNPNYKGIWKPQEIPNPEYFELDRPDFDPIAAIGIEIWTMQDGILFDNILITDDEKVATSILEKTWKPKYDVEKEKEKAEEAAAGADGLSDFQKKIFDVLYKIADIPFLAPYKTKIIDVIEKGEKQPNITIGILVSVVIVFVTVLCKLLFGGKKPVAPVKPAAEAKKPKAAETDGAGSSGDKDEKEDEKEETGPRRRTRRET

SEQ ID NO: 4367 - DNA, 1902 bp, Triticum aestivum
  CDS (31)..(1626)
cgcagagagatcgggtcggggaggaggaggatgacgggcgggcgcgcggtgcttctgctggtggtctcggcgctgttcgcgcagatctacgcgtcggatccgctgtttcacgagtccttcgacgagggcttccaggggagctggatcgtctccggcaaggaagagtactcaggtgtatggaagcacgagaagagtgatggccatgaagactatggtctccttgttagcgagccagccaggaaatatgccatagtcaaagagcttgatagccctgttactttgaaggatggaacagttgtcctgcagttcgaagtgaggcttcagaatggccttgagtgtggaggtgcttatcttaagtacattcgccctcaggaggctggatgggatgccaaggaatttgacaatgacactccttacacaattatgtttggtcctgacaagtgtggttcaacgaacaaggttcacttcatcctgaagcacaagaaccccaagactggcaaatatgttgaacatcaccttaagtccccaccctctgtcccatatgacaagctctctcatgtctatacggctatcttgaagccagataacgaggtcagaattctggttgacggggaggagaagagcaaagcaaacttcctgtccgctgatgattttgagccagcacttattccatcaaagactattcctgaccctgacgacaagaagccagaggactgggacgagagagctaaaatccctgacccagctgcagtgaagcccgatgactgggatgaggatgccccaacagaaattctggatgaggaggccaccaagccagaaggatggttggatgatgagcctgaggaagttgatgacccagaggctgctaagcccgaagactgggatgatgaggaggatggtgaatgggaggcaccgaagattgacaaccccaagtgtgaagaggcacctggatgtggtgaatggaagaggccaatgaagcagaaccctgcgtacaagggcaagtggcatgcacccatgattgacaaccctgcctacaagggaatctggaagccccaagaaatccccaaccctgaatactttgagcttgacaagcctgactttgatccgattgccgctattggaattgagatctggacaatgcaggatggcatcctttttgacaacattcttatcgccgatgatgagaaggtagccaccgccatcttggagaagacatggaagcccaagtttgatgttgagaaggaaaagcagaaggctgaggaggctgcagcagccgattcagaggacctttctgagttccagaagaagatcttcagcgttttgtacaagatcgccgacattccattcttggaaccttacaagatcaagatcattgatgttattgagaagggagagaagcagcccaacattacaatttcgatcttggcctcagccgctgtcatccttgtgactgtactcttcagaacccttttcggtggcaagaagccagtggcacctgtgaagcccattgccgaggtcaagaagcccagtgccacggaagccgatgccgctggaagcagcggcgacaaggaggagaaggaggatgacacaaccgcaccacgcagaaggtcgcgaagggagacataggatcttcacatttcggacggtctcggtcctcgcctttttgtgaactcctcgagtgtataatcgaacagtcttgctgccctctgctgctacccctagtttttaagtcgctagaatctacgagccggtgaagctttgtgttgtttgtgtgctgtacggaatcagctagaagtgatctccttttccttttgtatcaaacgaaacttgaaaggatcttttgatatgtagatgctgttcatttactggttaaatcaggtttgagctaaaaaaaaaaaaaaa

SEQ ID NO: 4368 - protein, 531 aa, Triticum aestivum
MTGGRAVLLLVVSALFAQIYASDPLFHESFDEGFQGSWIVSGKEEYSGVWKHEKSDGHEDYGLLVSEPARKYAIVKELDSPVTLKDGTVVLQFEVRLQNGLECGGAYLKYIRPQEAGWDAKEFDNDTPYTIMFGPDKCGSTNKVHFILKHKNPKTGKYVEHHLKSPPSVPYDKLSHVYTAILKPDNEVRILVDGEEKSKANFLSADDFEPALIPSKTIPDPDDKKPEDWDERAKIPDPAAVKPDDWDEDAPTEILDEEATKPEGWLDDEPEEVDDPEAAKPEDWDDEEDGEWEAPKIDNPKCEEAPGCGEWKRPMKQNPAYKGKWHAPMIDNPAYKGIWKPQEIPNPEYFELDKPDFDPIAAIGIEIWTMQDGILFDNILIADDEKVATAILEKTWKPKFDVEKEKQKAEEAAAADSEDLSEFQKKIFSVLYKIADIPFLEPYKIKIIDVIEKGEKQPNITISILASAAVILVTVLFRTLFGGKKPVAPVKPIAEVKKPSATEADAAGSSGDKEEKEDDTTAPRRRSRRET

SEQ ID NO: 4369 - DNA, 2079 bp, Pinus radiata
  CDS (199)..(1863)
ccagcggaacttttatttgcattttcatcgttcaaagctgttacaagggttcgaattctaagattgaaaaccctcaaatactcgtcgagttccgcataaaagcccgcagacggtcgtctctggagatagcttaacgtacgcagagtgattggctgtgtaaaggcgtttattttcaggtggtttgcaggcattttttgtatggtctccatggatcggagatggattccattgcttttggctctgctgtgcctaatgtcaccgttaaatgccctcgtttccgcttctgaatcgactttttatgaatcttttgacgagtcgttcgaagggagatggatcgtatcccaaaaggaagattataaaggtgtatggaagtacgaaaagagtaaaggtcatgaagactatggtctccttgtgagtgaagtggccaaaaagtatgccatagtaagagaattaccagaaaccattgaccccaaggatgggtcactggtgttacagtatgaggtccgcttacaaaatgggctggagtgtggaggtgcttacttgaagtacctacggcctcaagaagctggatggaaaccagcagagtttgacaatgaatccccctactccatcatgtttggaccagataaatgcggtgctactaacaaggtacacttcatctacaagcacaagaatccaaagtctggggaatatgttgagcaccatctcaagtatcctccatctattccctctgacaagaagacacatgtttattcagccatcttgacacctgataatcaagttagaattttaattgatggcgaagagaagaaaaaggcaaatcttttgtctgcggatgattttgaacccgccctcatcccacctaagacgattcccgacccagaggataagaagccagaagactgggatgagagagcaaagatccctgatcctgatgcggaaaagcccgaggactgggatgaggatgcaccgatggaaattgaagatttggaagccgtgaaacctgaaggatggctggatgatgaaccagaggaggttgatgatcctgaagctacaaagccagatgattgggatgatgaagaagatggagaatgggaggcaccaaaggtttctaatcccaagtgcgatgaggcaccaggatgtggtgaatggactagacccatgaagagcaaccctgattacaagggcaagtggtatgctccgatgattgacaatcctaactacaagggtatctggaagccacaacaaattcccaaccccgagtactttgaactggagaagcctgatttagaaccaattgcagctattggtattgaaatctggaccatgcaagatggaattttgtttgacaacatacttatcacacatgatgagaaggttgcggaggagtacagaaagaatacatggaaggcaaaatttagcaatgaaaaagaagaggaagatgtggatagtcctttgccaggagagctctctggtttccagaagaaaatttttgacgtcctctacaagatcgcaaacatcccattcttggaagcatacaagttgaagattattgatttaatcgaacaaggtgagaagaaaccaaatttgacaattggcattttagtggccgttttggtggttctgttgacaacaatttacaagctccttttcggtggcaagaagcaacctgttcagaaggtagagttgaaaagtcagcccgagcaggatgcttctgcttctgagaataacaaagaagattcagatattgcagcagagaatgaaaaatctgatgcagcagagaaggaaaagtctggagatgaaaatgaaatagaaggagaagatgcagctccccgccagaggagagtaaggcgcgagacataaatcctagttcactgagaaaaaaattcggacactaaagttcagtgcatggaatgaacaaatctgtcaaaattcatccatctgtttttggtatgtaagtcataggtaaaataggaggaacggtcagagaatctgcgtccccatcatgcgtggtggatttggataacattttttccagagttctgtttctaggtgtttgtcagacattggaagcatagc

SEQ ID NO: 4370 - protein, 554 aa, Pinus radiata
MVSMDRRWIPLLLALLCLMSPLNALVSASESTFYESFDESFEGRWIVSQKEDYKGVWKYEKSKGHEDYGLLVSEVAKKYAIVRELPETIDPKDGSLVLQYEVRLQNGLECGGAYLKYLRPQEAGWKPAEFDNESPYSIMFGPDKCGATNKVHFIYKHKNPKSGEYVEHHLKYPPSIPSDKKTHVYSAILTPDNQVRILIDGEEKKKANLLSADDFEPALIPPKTIPDPEDKKPEDWDERAKIPDPDAEKPEDWDEDAPMEIEDLEAVKPEGWLDDEPEEVDDPEATKPDDWDDEEDGEWEAPKVSNPKCDEAPGCGEWTRPMKSNPDYKGKWYAPMIDNPNYKGIWKPQQIPNPEYFELEKPDLEPIAAIGIEIWTMQDGILFDNILITHDEKVAEEYRKNTWKAKFSNEKEEEDVDSPLPGELSGFQKKIFDVLYKIANIPFLEAYKLKIIDLIEQGEKKPNLTIGILVAVLVVLLTTIYKLLFGGKKQPVQKVELKSQPEQDASASENNKEDSDIAAENEKSDAAEKEKSGDENEIEGEDAAPRQRRVRRET

SEQ ID NO: 4371 - DNA, 2239 bp, Eucalyptus grandis
  CDS (78)..(1703)
ggatcaaatcctctccaaacttcgatccgatcgcgtcctccagattccgatcgttcgtcgctcgtcacggtgctgggatgatggaggggaggcggattcgcctgctggcccgggcgctgacggtgttgctgctcagcttccagatctgcgcttcggacgtgatctttcacgaatcgttcgacgagtctttcgagggacggtgggtcgtgtccgagaaggaagaataccaaggtgtgtggaagcactccaaaagtgagggacatgatgattatggccttcttgtcagtgagaaggcaaggaagtacgctattgtgaaggagcttgatgatgttgtgagtcttaaggacggaactgtagttctacagtatgaagtccggctccaggacgggcttgaatgtggcggtgcatacctgaagtacctccgtccacaggatgctggatggaaagtcaaggaatttgataatgagtctccatacactataatgtttgggccggataaatgtggtgctaccaacaaagtgcatttcattttcaagcacaaaaatcccaaaactggggagtatgttgaacatcatctcaagcaccctgcatctgtgccctatgacaaactctctcatgtctacactgctgtattgaagcctgataatgaactgaggatattgatagatggtgaggaaaagaagaaggcaaatttcctctcggctgaagactttgagccagcactcatcccacccaagacaattcccgacccagatgataagaagccagaggattgggatgagcgagcgaagatcccagattctgatgcagtgaagccagatgattgggatgaggatgccccgatggaaattgtagatgaagatgcagtgaagcctgaaggttggttggatgatgagcccgaagagattgatgaccctgaagctacaaagcctgaggattgggatgacgaggaagatggtgaatgggaagctcccaaaatcgacaaccccaagtgcgagactgcacccggttgcggtgagtggaagaggccaacaaaaagcaaccctgcgtacaaagggaagtggcatgctcctctaattgataacccgaactataagggcatctggaagcctcaagagatcccgaatcctgactactttgagcttgaaagacccaactttgagccgatagctgcaattggtattgagatttggaccatgcaagatggaatcttgtttgacaatgtcttgatcgcaagtgatgagaaggtggcagagtcatacagggaaacagcatggaaacccaagttcgaagttgaaaaggagaagcaaaaggaagaggataaagccactggttctgatggactctcagccatacataaaaaggtattcgatgtcctttacaaggtggcggatgtttctttcctggagccatacaaacctaagatcttggaactcatcgagaaagctgaggaaaaaccaaatatagcaattggtgtgcttgggtctattgtggttgtcatcctgacggttttcttcaaaatcctctttggcggcaagaaaccagtggctaatgtaccggagccacggagggaagcagctgccgagacttccaacaaccaaggtagccaaggggacaaggaagacgaggatgagaaggaagatgcaggtgatgccgctgctgctgcggcacctcgtaagaggcctaacagaagggaaatatagagtcagcacgggaatatagttggatgtctatcctgtgtctccgaatggttcccaccgttgtcactgattattcaagtctctttaggttttcggagaattgcttatcgagcttttttcaggcctctttggttgttatagttattttaggagtttgataaaattttgacgatgagaaacattgaaactgtattatttctgatctaattgtccttcatgcggttgtacttttcctcgaggcctctcaattgctcgtattcgcgtattgcatgggatgctcatgattggcgatcttgaatgtaggttagaaatggctctgatggcccactctctttcatatgttgtgtttgaaaccgttgactgtgttttatgggactatatttcgtgcatctgaaagtttacctttcggagggaatttgcatctgaaagttgatgagtggaattttggtaagtgcttgtttcgtgatggagatttgggtttggggctccttgtacgaaacgtacgattttatggttataataggattttaagaaaaaaa

SEQ ID NO: 4372 - protein, 541 aa, Eucalyptus grandis
MMEGRRIRLLARALTVLLLSFQICASDVIFHESFDESFEGRWVVSEKEEYQGVWKHSKSEGHDDYGLLVSEKARKYAIVKELDDVVSLKDGTVVLQYEVRLQDGLECGGAYLKYLRPQDAGWKVKEFDNESPYTIMFGPDKCGATNKVHFIFKHKNPKTGEYVEHHLKHPASVPYDKLSHVYTAVLKPDNELRILIDGEEKKKANFLSAEDFEPALIPPKTIPDPDDKKPEDWDERAKIPDSDAVKPDDWDEDAPMEIVDEDAVKPEGWLDDEPEEIDDPEATKPEDWDDEEDGEWEAPKIDNPKCETAPGCGEWKRPTKSNPAYKGKWHAPLIDNPNYKGIWKPQEIPNPDYFELERPNFEPIAAIGIEIWTMQDGILFDNVLIASDEKVAESYRETAWKPKFEVEKEKQKEEDKATGSDGLSAIHKKVFDVLYKVADVSFLEPYKPKILELIEKAEEKPNIAIGVLGSIVVVILTVFFKILFGGKKPVANVPEPRREAAAETSNNQGSQGDKEDEDEKEDAGDAAAAAAPRKRPNRREI

SEQ ID NO: 4373 - DNA, 1968 bp, Eucalyptus grandis
  CDS (76)..(1710)
aacgccgccgccgccgtctcttcccgtcgcttccccgccgccgattccaaatcgagcgtccctcgaccgttggcgatggagggaagccggatccctcggctcgtgccggcgttggcgctggtgctgattagcttcgcctttctccagatccgcgcgtctgatgtgatcttctacgattcgtttgaccagccgttcgtgggaaggtgggtggtgtctgtgaaggatgactacacaggtgaatggaagcactccaaaagtgagggacatgatgattacggtcttcttgtcagtgagaaagcaaggaaatatgcaattgtgaaagaactcgatgagattgtgagtcttaaggatgggacaattgccctgcaatatgaagttcgactccagaatgggctcgagtgtggtggtgcatacttgaagtatctccgacctcaggatgctggatggaaagtcaaggaatttgataatgattctccatatactatcatgttcggaccagacaaatgtggttcaaccaacaaggtgcatttcattttcaagcacaaaaaccccaaaactggagagtatgtggaacaccatctcaagttcccgccatctgtgccctatgacaaactctctcatgtctacactgctgtattgaagcccgataatgaactgaggatattgatagatggtgaggagaagaagaaggcaaatttcctctctgctgaagactttgagccgccactcatcccacctaagacgattcctgacccagatgataagaagccagaggattgggatgagcaagagaagatcccagatcctgatgcagtgaagcctgatgattgggatgaggatgccccgatggaaattgtagatgaagatgcagtgaagcctgaagggtggttggatgacgagcccgaggagattgatgatcctgaagctacaaagcctgaggattgggatgatgaggaagatggtgaatgggaggctcccaaaattgacaaccccaagtgtgagttggcacctgggtgtggtgagtggaagaggcctatgaaaaggaaccctgcatataaagggaagtggcatgctcctctcattgataacccgaactacaagggcatttggaaacctcaagagatcccaaatcctgattactttgagcttgagagacctcagtttgatcctattgctgcaattggcattgagatttggacaatgcaagatggaattttgtttgacaatatactaattgcaagtgacgagaaggtagcagagacatatagggaaacaacatggaaacccaagtttgaagttgaaaaggagaagcagaaggaggaggataaagacagcgattccccgggtctctcggctgtccataagaaagcttttgacgtcctctacatgatagctgatgtacctttcctggatccatacaaacctaagatcttggatcttattgagaaggcagagaaacagccgaatattacgattggcgtactggtttccattgtggtcataattttgacattattcttcaagatcctttttggtgggaaaaaaccagcggttaatgtgccagagccacgaagtgaagcggctccggagacttccgacggtccaggtagcagtggagacaaggaagacgaggacgaggacgaggacgaggacgagaaggaagagacagctgctgctcctcgtaggagatctatccgaagggaagcttaagcgagtcacctgtgaagggctttctgtgtcattactccaaattttgagcagtagtatatgttgccgggcatcgatcaaagttgtggttagatgatttttcgattctgtcatgggtgaaatctgaatactatgtagaagtctaggttatcctggattacgtctcgaaatgttgtgttgatgggattttgtagcagatatttagttttatttggactggcaagtctttaaaggaaagaaaacgttgaagtaaaaaaaaaa

SEQ ID NO: 4374 - protein, 544 aa, Eucalyptus grandis
MEGSRIPRLVPALALVLISFAFLQIRASDVIFYDSFDQPFVGRWVVSVKDDYTGEWKHSKSEGHDDYGLLVSEKARKYAIVKELDEIVSLKDGTIALQYEVRLQNGLECGGAYLKYLRPQDAGWKVKEFDNDSPYTIMFGPDKCGSTNKVHFIFKHKNPKTGEYVEHHLKFPPSVPYDKLSHVYTAVLKPDNELRILIDGEEKKKANFLSAEDFEPPLIPPKTIPDPDDKKPEDWDEQEKIPDPDAVKPDDWDEDAPMEIVDEDAVKPEGWLDDEPEEIDDPEATKPEDWDDEEDGEWEAPKIDNPKCELAPGCGEWKRPMKRNPAYKGKWHAPLIDNPNYKGIWKPQEIPNPDYFELERPQFDPIAAIGIEIWTMQDGILFDNILIASDEKVAETYRETTWKPKFEVEKEKQKEEDKDSDSPGLSAVHKKAFDVLYMIADVPFLDPYKPKILDLIEKAEKQPNITIGVLVSIVVIILTLFFKILFGGKKPAVNVPEPRSEAAPETSDGPGSSGDKEDEDEDEDEDEKEETAAAPRRRSIRREA

SEQ ID NO: 4375 - DNA, 2007 bp, Glycine max
  CDS (146)..(1762)
acatttctcactctcgtctcgaagatcgagatatctatttagatctcagaaaaacagtgtttcatttcaattcattcagtcttattattattagggtttgccgattgagagagaaagagaaatgggagaacgaaaaggaatcccaatggctttggggctcttggcgatgatcctcttcttcattgcttcctcttcctctcacctcgttcgcgcttccgatgacgccgacgacgcgatcttctacgagtcgttcgacgaggattttgatggacggtggattgtatccgacaaggaggattacaatggtgtctggaagcatgccaagagtgatgggcatgatgattatggacttcttgttagtgaacaagccaggaaatatgctatagtcaaagaacttgccgagtctgtcagtcttaaggatggaacagttgttcttcagtttgagactcgccttcagaatggcctcgaatgtggtggtgcatatattaaatatcttcgaccccaggagagcggatggaaaccaaaggaatttgacaacgaatctccatattctatcatgtttggtcctgataagtgtggtgctacaaacaaggttcacttcattttcaagcataagaacccaaagagtggggagtatgttgagcatcatctcaagtatcccccttctgtcccatcggacaaactaactcatgtgtacactgcaattctgaagcctgataatgaattgcaaatcttgattgatggggaggagaagaaaaaggcaaatttcttgtcttctgaggactttgagcctcctcttataccttccaagacaatccctgatcctgatgataagaaacctgaggactgggacgaaagagccaaaatcccagacccaagtgctgtgaagccagatgactgggatgaggatgcacccatggaaatcttagatgaagaagcagagaaacctgaaggatggttggatgatgagccagaggaaattgatgacccagaggcaactaaaccagaagactgggatgatgaggaggatggtgaatgggaagccccaaagattgaaaacccaaagtgtgaggccgcccctggttgtggtgaatggaagaggccaacgaagaggaatccagcttataagggaaagtggagtgctccttacatcgataaccccagttacaagggcatatggaagcctcgcgagattccaaaccctgaatactttgaactcgcaaaacctgattttgagcctattgctgctattggcattgagatttggacaatgcaggatggcatcctatttgacaatgttctgatagctaacgatgataaagttgcagaatcctatcgggagactacatggaagcccaagtttaccgttgagaaagacaaactgaaggctgaagaggaggcggcaacgggttcagatggtatttcaggcttccagaagaaggtatttgacctcttgtacaagattgcagatattcccttcttgagcgagcacaaatctaagattttcgatctcattgagaaagctgagaaacagccaaatctcacaattggaattcttgtagctgttgtggttgtcttcgtgtcaattttcttcagactcatatttggtggcaagaaacctgcaaaggtggagaagaaaccagaacgcacagaagcttccaataaccaaggtagtggagagaatgaagaaaacaaagagaaggagaaacagaaagaggaagcatctaatgctgcgcgtcggaggccaaggcgagaaacttgaaatggttgaatctttattttaaagtggcgccctgtttagtatcatcatcaccacagataaattttgggcttagtttcattttaggtgcactctgttttcagtattttcttttttcttccttttaagaaaaggaaaagattatttgcttcaggggtgtagatcttctcctgtttttggagactcgagtgtttgagctagttgaagttgtacaattatttttctattaatggattctgtttttaacc

SEQ ID NO: 4376 - protein, 538 aa, Glycine max
MALGLLAMILFFIASSSSHLVRASDDADDAIFYESFDEDFDGRWIVSDKEDYNGVWKHAKSDGHDDYGLLVSEQARKYAIVKELAESVSLKDGTVVLQFETRLQNGLECGGAYIKYLRPQESGWKPKEFDNESPYSIMFGPDKCGATNKVHFIFKHKNPKSGEYVEHHLKYPPSVPSDKLTHVYTAILKPDNELQILIDGEEKKKANFLSSEDFEPPLIPSKTIPDPDDKKPEDWDERAKIPDPSAVKPDDWDEDAPMEILDEEAEKPEGWLDDEPEEIDDPEATKPEDWDDEEDGEWEAPKIENPKCEAAPGCGEWKRPTKRNPAYKGKWSAPYIDNPSYKGIWKPREIPNPEYFELAKPDFEPIAAIGIEIWTMQDGILFDNVLIANDDKVAESYRETTWKPKFTVEKDKLKAEEEAATGSDGISGFQKKVFDLLYKIADIPFLSEHKSKIFDLIEKAEKQPNLTIGILVAVVVVFVSIFFRLIFGGKKPAKVEKKPERTEASNNQGSGENEENKEKEKQKEEASNAARRRPRRET

SEQ ID NO: 4377 - DNA, 1871 bp, Gossypium hirsutum
  CDS (61)..(1650)
cgatttgaaggggtaaaagaacttcaatagtttgagtttagggtttttagatcgaagattatggggcgttttgctcttctccttttactagctttcgcttcatttcaagccctttgcttcgccgctgatgatgatacggtcttttatgactcatttgatgagccttttgacggacgatggatcgtgtccgataaagatgattacaaaggtgtatggaaacattcgaagagcgaaggacatgatgactacgggcttcttgtgagcgagaaggcacggaagtatgcgatagtgaaggagctcaatgagcctgtgagtctcaaggatggaagcactgtgcttcagtttgagactcgctttcagaatgggcttgaatgtggtggtgcatatttgaaataccttcgtcctcaagaggctggatggaaggctaaggaatttgacaatgaatccccttactctatcatgtttggacctgacaaatgtggagccacaaacaaggttcacttcatcttgaagcataagaatcctaaaagtggggaatacgtcgaacaccatctgaaatacccaccctctgtcccatctgacaagcttactcatgtctacactgccatcttgaagcctgacaatgaggtcagcattctgattgatggtgaggaaaagaagaaggctagcttcctttcagcagaagattttgagcctccacttatcccttccaagacaattcctgatcctgatgataagaagcctgaggactgggatgagagagccaagattcctgatccagatgccgtgaagccagaggattgggatgaggatgcacccatggaaattgaagatgaggaggctgtgaaacccgaaggttggttagatgatgagcccgaggagattgatgatcctgaggcaaccaagcctgaagattgggatgatgaagaggatggtgagtgggaagcccccaaaattgataacccgaagtgtgagacagcccctggttgtggcgaatggaagaggccaatgaagaggaatccagcttataaaggaaaatggtctcctccactaattgacaaccccagctacaagggtatttggaagcctcaggagattccaaaccccaactactttgagcttgaaaagcccgactttgatcctattgctgccattggtattgagatttggacaatgcaagatggtatattatttgacaatattttgatagccaaaaacgacaaggttgccgagtcatatcgggagaccacgtggaagccaaagtttgaggttgagaaggaaaaacagaaggctgaggatgaagctgccgattctgccaggcttgcaggctttcagaggaaggtttttgatgtcttatacaaggttgctgacattcctttcttaagcaaatacaagcatcaaattctcgatcttattgagcatgctgagacacagccgaacctcaccattggtgtcttggtctctattgtggtgattattctcacgattttcttcaagctcatttttggtgggaagaaacagccaagagtagagaagaaaccagaggttgctgaaacatcaaatggtgaaggaagcagtggagaaaaggctgaagaggcggagaaggaagaagctgctgccgctcctcgccgaaggcgccgtgacaattgagcaaatcttaaaacaaaggtggctggtggcgactagcagtttgagttttggctaatttttgcactgtaggtggttttcgtagctgagatattatttgcctttggcattattttagttttactttttaatatgattagattgtatggtttgaaggatgtaaacgagacaaatttctgcatcaaagcaaaaaccaagtagaaaggaatttgaagcttgcttgt

SEQ ID NO: 4378 - protein, 529 aa, Gossypium hirsutum
MGRFALLLLLAFASFQALCFAADDDTVFYDSFDEPFDGRWIVSDKDDYKGVWKHSKSEGHDDYGLLVSEKARKYAIVKELNEPVSLKDGSTVLQFETRFQNGLECGGAYLKYLRPQEAGWKAKEFDNESPYSIMFGPDKCGATNKVHFILKHKNPKSGEYVEHHLKYPPSVPSDKLTHVYTAILKPDNEVSILIDGEEKKKASFLSAEDFEPPLIPSKTIPDPDDKKPEDWDERAKIPDPDAVKPEDWDEDAPMEIEDEEAVKPEGWLDDEPEEIDDPEATKPEDWDDEEDGEWEAPKIDNPKCETAPGCGEWKRPMKRNPAYKGKWSPPLIDNPSYKGIWKPQEIPNPNYFELEKPDFDPIAAIGIEIWTMQDGILFDNILIAKNDKVAESYRETTWKPKFEVEKEKQKAEDEAADSARLAGFQRKVFDVLYKVADIPFLSKYKHQILDLIEHAETQPNLTIGVLVSIVVIILTIFFKLIFGGKKQPRVEKKPEVAETSNGEGSSGEKAEEAEKEEAAAAPRRRRRDN

SEQ ID NO: 4379 - DNA, 2036 bp, Glycine max
  CDS (123)..(1754)
gacatttctcactctcgtctcgaagatcgagatatctatttagatctcagaaaaacagtgtttcatttcaattcattcagtcttattattattagggtttggcgattcagagagaaagagaaatgggagaacgaaaaggaatcccaattgctctggggctcttggcgatgctcctcttcttcattgcttcttcctcttcctctcacctcgttcgtgcttccgatgacgccgacgacgcgatcttctacgagtcattcgacgaggattttgacggacggtggattgtgtccgacaaggaggattacaacggtgtctggaagcatgctaagagtgatgggcatgatgattatggacttcttgttagtgaacaagcccggaaatatgctatagtcaaaaaacttgacgagcctgtcagtcttaaggatggaacagttgttcttcagtttgagactcgccttcagaatggcctcgaatgtggtggcgcatatattaaatatcttcgaccccaggagagcggatggaaaccaaaggaatttgataacgaatctccatattctatcatgtttggtcctgataagtgtggtgctacaaacaaggtgcacttcattttcaagcataagaatccaaagagtggggagtatgttgaacaccatctcaagtatcctccttctgtcccatctgacaaactaactcatgtatacactgcaattctgaagcccgataatgaattgcaaattttgattgatggtgaggagaagaaaaaggcaaatttcttgtcttctgaggactttgagcctcctcttatcccttccaagacaatccctgatcctgatgataagaaacctgaggactgggacgaaagagccaaaatcccggacccgagtgctgtgaagccagatgactgggatgaggatgcacccatggaaattttagatgaagaagcagagaaacctgaaggatggttggatgacgagccagaggaaattgatgacccagaggcgacaaaacccgaagactgggatgatgaggaggatggtgaatgggaagccccaaagattgaaaacccgaagtgtgaggcagcccctggttgtggtgaatggaagaggccaatgaagaggaatccagcttataagggaaagtggagtgctccttacatcgataaccccaattacaagggcatatggaagcctcgcgagattccaaaccctgaatactttgaactcgagaaacctgattttgagcccattgctgctcttggcattgagatttggacaatgcaggatggcatcctatttgacaatattctgatagctaacgatgataaagttgcagaatcctatcgggagaccacatggaagcccaagtttaccattgagaaagaaaaacagaaggctgaagatgaggctgcaactggttcagatggtattgcaggcttccagaagaaggtatttgacctcttgtacaagattgcagacattcccttcctgagcgaccacaaatctaagatatacgatctcattgagaaagctgagaaacagccaaatctcactattggaattcttgtagcggttgtggttgtcttcgtgtcaattttcttcaggctcatatttggtggcaagaaacctgcaaaggtggagaagaaaccagaacgcacagaagcttccaataaccaaggtggtgcagagaatgaagaaaacaaagagaaagaggaagcatctaatgctccgcgtcggaggccaaggcgagaagattgaaatggttgaatcttttaaatggcgccctgtcaactatcatcaccacagctacagataaattttgggctttagtttcattttaggtgcactctgttttcattcgtttccttttttccctttttttttaagaaaaagaaaagattatttgcttcaggggtgtagatcttctcctgtttttggagacttgagtgtttgagctagtagttgaagttgtacaattattttttgttctttatttttctattaatggatcctgtttttaacgcaaaaaaaaaaaaaaaa

SEQ ID NO: 4380 - protein, 543 aa, Glycine max
MGERKGIPIALGLLAMLLFFIASSSSSHLVRASDDADDAIFYESFDEDFDGRWIVSDKEDYNGVWKHAKSDGHDDYGLLVSEQARKYAIVKKLDEPVSLKDGTVVLQFETRLQNGLECGGAYIKYLRPQESGWKPKEFDNESPYSIMFGPDKCGATNKVHFIFKHKNPKSGEYVEHHLKYPPSVPSDKLTHVYTAILKPDNELQILIDGEEKKKANFLSSEDFEPPLIPSKTIPDPDDKKPEDWDERAKIPDPSAVKPDDWDEDAPMEILDEEAEKPEGWLDDEPEEIDDPEATKPEDWDDEEDGEWEAPKIENPKCEAAPGCGEWKRPMKRNPAYKGKWSAPYIDNPNYKGIWKPREIPNPEYFELEKPDFEPIAALGIEIWTMQDGILFDNILIANDDKVAESYRETTWKPKFTIEKEKQKAEDEAATGSDGIAGFQKKVFDLLYKIADIPFLSDHKSKIYDLIEKAEKQPNLTIGILVAVVVVFVSIFFRLIFGGKKPAKVEKKPERTEASNNQGGAENEENKEKEEASNAPRRRPRRED

SEQ ID NO: 4381 - DNA, 1626 bp, Glycine max
  CDS (1)..(1626)
atggcaaaaccaaagcgaatctctctgcgtatctttgcgctgctcctcttgatttccacctcttcgtttcagcttctccgcgcttccgatgacgccgatgatgatgcgatcttctatgattcgttcgacgaggattttgaagaccgttgggttgtgtctcagaaagatgagtacagtggtgtctggaaacatgccaagagtgagggacatgatgattatgggcttcttgtcagtgagaaagcaaggaaatatgctatagtaaaagaacttgatgaggccgtgagtctcaaggatgaaacagttgttcttcagtttgaaactcggcttcagaatggccttgagtgtggtggtgcatatctaaaatatctccgaccacaggaggctggatggaaatccaaggaatttgataatgaatctccatattctatcatgtttggtcctgacaagtgtggtgccacaaacaaagtacacttcattttcaagcataagaatcccaagagtggggagtatgttgaacaccatcttaagaatcccccttctgtcccgtctgacaaattatctcatgtgtacactgccattttgaagcctgacaatgagttgcaaattttgattgatggggaacagaagaagaaggtaaatttcttatctgctgatgattttgaaccccctcttatccctcccaagacaatcccagatcctgatgataaaaaacctgaggactgggatgagagagagaaaattccagactcaagtgcagtaaagccagatgactgggatgagaatgcacccttggaaattgttgatgaagaagctgagaaacctgaaggatgggacaatgaacctgaggagatagatgatccagaggcaacaaaaccagaagattgggacgatgaggaggatggtgaatgggaagccccaaagattgagaacccaaaatgtgaagcagcccccggttgtggtgagtggaagaggccaatgaagaggaatccagcttacaaaggaaaatggcatgccccactaattgaaaatcctgcttataagggaatttggaagcctcaggacattccaaaccctgactactttgaaattaaaaaacctgattttgagcctattgctgctattggtattgagatttggacaatgcaagatggtatattgtttgacaacatcttgatagctaaagatgataaaattgccgagtcctaccgggagactacatggaagcccaagtttaccgtcgagaaagaaaaacagaaggaagaagattcggaagctggatcaagtggtcttgctggcttccagaagaaggtatttgacctgttatacaagatcgcagacattcccttcctgagtgcctacaagcttaaaatatacgatgtcattgagaagggtcaagagcaaccaaatctcactgttggaattgttgtagccgttgtggttgtcatcgtgtcagttttcttgaggctcatatttggtgggaagaagaagcccacaagggtggagaagacaaacgtagaaccagcagaaactgcaactagccaaggcagtggtgagaatgaggaaaacaaagagaaggaggaatcatctgcccctgcacgtcggaggccaacaaggagagataattga

SEQ ID NO: 4382 - protein, 541 aa, Glycine max
MAKPKRISLRIFALLLLISTSSFQLLRASDDADDDAIFYDSFDEDFEDRWVVSQKDEYSGVWKHAKSEGHDDYGLLVSEKARKYAIVKELDEAVSLKDETVVLQFETRLQNGLECGGAYLKYLRPQEAGWKSKEFDNESPYSIMFGPDKCGATNKVHFIFKHKNPKSGEYVEHHLKNPPSVPSDKLSHVYTAILKPDNELQILIDGEQKKKVNFLSADDFEPPLIPPKTIPDPDDKKPEDWDEREKIPDSSAVKPDDWDENAPLEIVDEEAEKPEGWDNEPEEIDDPEATKPEDWDDEEDGEWEAPKIENPKCEAAPGCGEWKRPMKRNPAYKGKWHAPLIENPAYKGIWKPQDIPNPDYFEIKKPDFEPIAAIGIEIWTMQDGILFDNILIAKDDKIAESYRETTWKPKFTVEKEKQKEEDSEAGSSGLAGFQKKVFDLLYKIADIPFLSAYKLKIYDVIEKGQEQPNLTVGIVVAVVVVIVSVFLRLIFGGKKKPTRVEKTNVEPAETATSQGSGENEENKEKEESSAPARRRPTRRDN

SEQ ID NO: 4383 - DNA, 1617 bp, Glycine max
  CDS (1)..(1617)
atgggagaaccaaaacgaatctatctgcgtatctttgcgctgctcctcttcatttccgcctcttcgtttcagcttctccgcgctttcgatgacgcgatcttttacgagtcgttcgacgaggatttcgaagaccgttggattgtgtctcagaaagatgagtacaatggtgtctggaaacatgccaagagtgagggacatgatgattatgggcttcttgtcagtgagaaagtaaggaaatatgctatagtaaaagaacttgatgaggccgtgggtctcaaggatgaaacagttgttcttcagtttgaaactcggcttcagaatggccttgagtgtggtggtgcatatctaaaatatctccgaccacaggaggctggatggaaatccaaggaatttgataatgaatctccatattctatcatgtttggtcctgacaagtgtggtgccacaaacaaagtacacttcattttcaagcataaaaatcccaagagtggggagtatgttgaacaccatcttaagaatcccccttctgtcccgtctgacaaattatctcatgtgtacacggccattttgaagtctgacaatgagttgcaaatattgattgatggggaacagaagaagaaggtaaatttcttatctgctgatgattttgaaccccctcttatccctcccaagacaatcccagattctgatgataagaaacctgaggactgggatgagagagagaaaattccagaccctagtgcagtaaagccagatgactgggatgaggatgcacccttggaaattgttgatgaagaagcagagaaacctgaaggatggttagacaatgaacccgaggagattgatgatccagaggcaacaaaaccagaagattgggatgatgaggaggatggtgaatgggaagccccaaagattgagaacccaaaatgtgaagcagcccccggttgtggtgagtggaagaggccaatgaagaggaatccagcttataaaggaaaatggcatgccccacttattgaaaatcctgcttataagggtatttggaagcctcgggatattccaaaccctgattactttgaacttaagaaacctgattttgagcctatcgctgctatcggtattgagatttggacgatgcaagatggcatattgtttgacaacatcttgatatctaaagatgataaaattgccgagtcttatcgggagactagatggaagcccaagtttaccgttgagaaagaaaaacagaaggaagaagattcagaagctggatcaagtggccttgctggcttccagaagaaggtatttgacctgttatacaagatcgcagatattcccttcctgagtgcctacaagcttaaaatatacgatgtcattgagaagggtcaagagcaaccaaatctcaccgttggaattgttgtcgccgttgtggttgtcatcttgtcaattttcttgaggctcatatttggagggaagaagaagccaacaagggtggagaagacaaacccagaacccgcagaaactgcgagtagccaaggcagtggtgagaatgaagaaaacaaagagaaggaggaatcatctgcccctgcacgtcggaagccaacaaggagagacaattga

SEQ ID NO: 4384 - protein, 538 aa, Glycine max
MGEPKRIYLRIFALLLFISASSFQLLRAFDDAIFYESFDEDFEDRWIVSQKDEYNGVWKHAKSEGHDDYGLLVSEKVRKYAIVKELDEAVGLKDETVVLQFETRLQNGLECGGAYLKYLRPQEAGWKSKEFDNESPYSIMFGPDKCGATNKVHFIFKHKNPKSGEYVEHHLKNPPSVPSDKLSHVYTAILKSDNELQILIDGEQKKKVNFLSADDFEPPLIPPKTIPDSDDKKPEDWDEREKIPDPSAVKPDDWDEDAPLEIVDEEAEKPEGWLDNEPEEIDDPEATKPEDWDDEEDGEWEAPKIENPKCEAAPGCGEWKRPMKRNPAYKGKWHAPLIENPAYKGIWKPRDIPNPDYFELKKPDFEPIAAIGIEIWTMQDGILFDNILISKDDKIAESYRETRWKPKFTVEKEKQKEEDSEAGSSGLAGFQKKVFDLLYKIADIPFLSAYKLKIYDVIEKGQEQPNLTVGIVVAVVVVILSIFLRLIFGGKKKPTRVEKTNPEPAETASSQGSGENEENKEKEESSAPARRKPTRRDN

SEQ ID NO: 4385 - DNA, 1389 bp, Glycine max
  CDS (1)..(1389)
atgggagaacgaaaaggaatcccaatggctttggggctcttggcgatgatcctcttcttcattgcttcctcttcctctcacctcgttcgcgcttccgatgacgccgacgacgcgatcttctacgagtcgttcgacgaggattttgatggacggtggattgtatccgacaaggaggattacaatggtgtctggaagcatgccaagagtgatgggcatgatgattatggacttcttgttagtgaacaagccaggaaatatgctatagtcaaagaacttgccgagtctgtcagtcttaaggatggaacagttgttcttcagtttgagactcgccttcagaatggcctcgaatgtggtggtgcatatattaaatatcttcgaccccaggagagcggatggaaaccaaaggaatttgacaacgaatctccatattctatcatgtttggtcctgataagtgtggtgctacaaacaaggttcacttcattttcaagcataagaacccaaagagtggggagtatgttgagcatcatctcaagtatcccccttctgtcccatcggacaaactaactcatgtgtacactgcaattctgaagcctgataatgaattgcaaatcttgattgatggggaggagaagaaaaaggcaaatttcttgtcttctgaggactttgagcctcctcttataccttccaagacaatccctgatcctgatgataagaaacctgaggactgggacgaaagagccaaaatcccagacccaagtgctgtgaagccagatgactgggatgaggatgcacccatggaaatcttagatgaagaagcagagaaacctgaaggatggttggatgatgagccagaggaaattgatgacccagaggcaactaaaccagaagactgggatgatgaggaggatggtgaatgggaagccccaaagattgaaaacccaaagtgtgaggccgcccctggttgtggtgaatggaagaggccaacgaagaggaatccagcttataagggaaagtggagtgctccttacatcgataaccccagttacaagggcatatggaagcctcgcgagattccaaaccctgaatactttgaactcgcaaaacctgattttgagcctattgctgctattggcattgagatttggacaatgcaggatggcatcctatttgacaatgttctgatagctaacgatgataaagttgcagaatcctatcgggagactacatggaagcccaagtttaccgttgagaaagacaaactgaaggctgaagaggaggcggcaacgggttcagatggtatttcaggcttccaggtaataaaagaattatgcggtttctctttctcttttactctccttaagcacccaaactatctttctcatgcataa

SEQ ID NO: 4386 - protein, 462 aa, Glycine max
MGERKGIPMALGLLAMILFFIASSSSHLVRASDDADDAIFYESFDEDFDGRWIVSDKEDYNGVWKHAKSDGHDDYGLLVSEQARKYAIVKELAESVSLKDGTVVLQFETRLQNGLECGGAYIKYLRPQESGWKPKEFDNESPYSIMFGPDKCGATNKVHFIFKHKNPKSGEYVEHHLKYPPSVPSDKLTHVYTAILKPDNELQILIDGEEKKKANFLSSEDFEPPLIPSKTIPDPDDKKPEDWDERAKIPDPSAVKPDDWDEDAPMEILDEEAEKPEGWLDDEPEEIDDPEATKPEDWDDEEDGEWEAPKIENPKCEAAPGCGEWKRPTKRNPAYKGKWSAPYIDNPSYKGIWKPREIPNPEYFELAKPDFEPIAAIGIEIWTMQDGILFDNVLIANDDKVAESYRETTWKPKFTVEKDKLKAEEEAATGSDGISGFQVIKELCGFSFSFTLLKHPNYLSHA

SEQ ID NO: 4387 - DNA, 1653 bp, Glycine max
  CDS (1)..(1653)
atgggagaacgaaaaggaatcccaatggctttggggctcttggcgatgatcctcttcttcattgcttcctcttcctctcacctcgttcgcgcttccgatgacgccgacgacgcgatcttctacgagtcgttcgacgaggattttgatggacggtggattgtatccgacaaggaggattacaatggtgtctggaagcatgccaagagtgatgggcatgatgattatggacttcttgttagtgaacaagccaggaaatatgctatagtcaaagaacttgccgagtctgtcagtcttaaggatggaacagttgttcttcagtttgagactcgccttcagaatggcctcgaatgtggtggtgcatatattaaatatcttcgaccccaggagagcggatggaaaccaaaggaatttgacaacgaatctccatattctatcatgtttggtcctgataagtgtggtgctacaaacaaggttcacttcattttcaagcataagaacccaaagagtggggagtatgttgagcatcatctcaagtatcccccttctgtcccatcggacaaactaactcatgtgtacactgcaattctgaagcctgataatgaattgcaaatcttgattgatggggaggagaagaaaaaggcaaatttcttgtcttctgaggactttgagcctcctcttataccttccaagacaatccctgatcctgatgataagaaacctgaggactgggacgaaagagccaaaatcccagacccaagtgctgtgaagccagatgactgggatgaggatgcacccatggaaatcttagatgaagaagcagagaaacctgaaggatggttggatgatgagccagaggaaattgatgacccagaggcaactaaaccagaagactgggatgatgaggaggatggtgaatgggaagccccaaagattgaaaacccaaagtgtgaggccgcccctggttgtggtgaatggaagaggccaacgaagaggaatccagcttataagggaaagtggagtgctccttacatcgataaccccagttacaagggcatatggaagcctcgcgagattccaaaccctgaatactttgaactcgcaaaacctgattttgagcctattgctgctattggcattgagatttggacaatgcaggatggcatcctatttgacaatgttctgatagctaacgatgataaagttgcagaatcctatcgggagactacatggaagcccaagtttaccgttgagaaagacaaactgaaggctgaagaggaggcggcaacgggttcagatggtatttcaggcttccagaagaaggtatttgacctcttgtacaagattgcagatattcccttcttgagcgagcacaaatctaagattttcgatctcattgagaaagctgagaaacagccaaatctcacaattggaattcttgtagctgttgtggttgtcttcgtgtcaattttcttcagactcatatttggtggcaagaaacctgtgagtagtgaaattattttccccacactcattcagagtatttctttcatggaattattattccttatgattgcgtttaaatctcgtaaccaagcctcttcttgtgcaggcaaaggtggagaagaaaccagaacgcacagaagcttccaataa

SEQ ID NO: 4388 - protein, 550 aa, Glycine max
MGERKGIPMALGLLAMILFFIASSSSHLVRASDDADDAIFYESFDEDFDGRWIVSDKEDYNGVWKHAKSDGHDDYGLLVSEQARKYAIVKELAESVSLKDGTVVLQFETRLQNGLECGGAYIKYLRPQESGWKPKEFDNESPYSIMFGPDKCGATNKVHFIFKHKNPKSGEYVEHHLKYPPSVPSDKLTHVYTAILKPDNELQILIDGEEKKKANFLSSEDFEPPLIPSKTIPDPDDKKPEDWDERAKIPDPSAVKPDDWDEDAPMEILDEEAEKPEGWLDDEPEEIDDPEATKPEDWDDEEDGEWEAPKIENPKCEAAPGCGEWKRPTKRNPAYKGKWSAPYIDNPSYKGIWKPREIPNPEYFELAKPDFEPIAAIGIEIWTMQDGILFDNVLIANDDKVAESYRETTWKPKFTVEKDKLKAEEEAATGSDGISGFQKKVFDLLYKIADIPFLSEHKSKIFDLIEKAEKQPNLTIGILVAVVVVFVSIFFRLIFGGKKPVSSEIIFPTLIQSISFMELLFLMIAFKSRNQASSCAGKGGEETRTHRSFQ

SEQ ID NO: 4389 - DNA, 1716 bp, Ciona intestinalis
  CDS (1)..(1716)
atgtggaaagttattacattggtattgtgttttggattagtttgtgcacaggagtctacgggtcctacctatgttacaccagttccaagtggaaatgtgttcatagatgaaccatttgactcagatgatgcattagaaagttggacacagtcacaagccactaaagatggagttgattcagatattgctaaatataatgggaactgggcagttgagggtctggctgaaaacgcattgcccggtgatctaggtcttgtactaaaaggcaaagcaaagcatcatgctattgcggcaagccttgacacagtctataaatttgaaggcaaaccattcataatgcagtatgaggtaaattttcaaactggaattgaatgtggaggagcatacgtgaaactgctgacacattcggatggtttggacttgagtgatttccgagacaagacaccatacacaatcatgtttggccctgataaatgtggagaagattacaagttacacttcattttccgccacaaaaaccctaaaaccggtgagattgaggagaaacacgccaataaaccaaccacagacttcaaatcttattacacggataaagcatcccatctttacacacttgtcatcaacccagacaattcattccaagttcttattgaccaaactgtgattaattctggaaatcttttgacggatttcactcctcctgtcgtaccaccaaaggaaattgaagacaaagatgacaagaagccagaagattgggatgagagagagatgatacctgatccggatgcaacaaaaccagatgattgggatgaaactgctccagcaagaattgttgattcagatgctgaaatgccggaaggttggcttgaagatgaacctctttacatacctgatccggatgcgagtatgccagaagattgggatgaggagatggatggagaatgggaagctcctaaggtcgataatccaaaatgtgcggaggctgctggttgtgggacatgggagccacccatgattgacaaccctgaatacaaaggtatatggtcggctcctgaaatagcaaacccagcatacaaaggtatttggaagccaaggatgatcccgaaccccggctactttgaagatgaattgccttacaagatgtcaccaattggagcagttggcttcgaactgtggtccatgagcgaggatatttatttcgacaacatcctcatcactgatgatcgtgaagtggctgatgattacgcagagaagacctggaaactgaagaagcaaattcgagccgagaaagagccaagctttgtacaaggactgctttcagcaactgaagaaaagccgtggttgtggatcatttatgtgctggtggttggactgccggctgtgctgctctttgctttctgttgcggtggtaagaaaaaggcagatcctaagaagactgatgaagccacaccggatgacccacacgagtctgaaaatgaagatgaaaatgacaaggaggaagaaaaagaagaggatggagaggcttctcaagatgaaaacaaggaagaagcaagtcaggaagaggaagaagctgcaacagaggagacaggtgatggagataaattaactaaagaagatctggagaaagatgacgatgaaattcaagctcttgaagatgataatagtccagtgaacaggcgttccccaagaaaacgaaagcccagagtacaagattga

SEQ ID NO: 4390 - protein, 571 aa, Ciona intestinalis
MWKVITLVLCFGLVCAQESTGPTYVTPVPSGNVFIDEPFDSDDALESWTQSQATKDGVDSDIAKYNGNWAVEGLAENALPGDLGLVLKGKAKHHAIAASLDTVYKFEGKPFIMQYEVNFQTGIECGGAYVKLLTHSDGLDLSDFRDKTPYTIMFGPDKCGEDYKLHFIFRHKNPKTGEIEEKHANKPTTDFKSYYTDKASHLYTLVINPDNSFQVLIDQTVINSGNLLTDFTPPVVPPKEIEDKDDKKPEDWDEREMIPDPDATKPDDWDETAPARIVDSDAEMPEGWLEDEPLYIPDPDASMPEDWDEEMDGEWEAPKVDNPKCAEAAGCGTWEPPMIDNPEYKGIWSAPEIANPAYKGIWKPRMIPNPGYFEDELPYKMSPIGAVGFELWSMSEDIYFDNILITDDREVADDYAEKTWKLKKQIRAEKEPSFVQGLLSATEEKPWLWIIYVLVVGLPAVLLFAFCCGGKKKADPKKTDEATPDDPHESENEDENDKEEEKEEDGEASQDENKEEASQEEEEAATEETGDGDKLTKEDLEKDDDEIQALEDDNSPVNRRSPRKRKPRVQD

SEQ ID NO: 4391 - DNA, 1824 bp, Drosophila pseudoobscura pseudoobscura
  CDS (1)..(1824)
atgcagtggaagttcggggggagcagcgcagcgctggcgttgctgctggcctgcagcttactgctgtccgtgacagccgatgcggagttcggtgtcgatgccgacgactttgaggatggccaagtcgaagatgttcaggaggagacggtcggcgctgatgaggagctggtctacgagagccctgtgatcgagcccaagaagttccactttgccgaccatttcgatgatgttgaggagtcacgcaagctgtgggtcaactcgcaggccaagaaggacgacattgccgaagagatctccaagtacgatggcatctggagctgggagtcaccgcagcggatcgtctgggcgaaggataagggactggtgctcaaatcgaaggcaaagcatgctgccatctcggcacgcctccgcaagcagttcgatttcaaggcagaaaaaccactggtggtgcaatatgaggtcacactgcaggagggtcaagattgcggcggctcgtacatcaagctgctgtccgctggcaaggaaaccgacaatcttaagtcgttcaatgacaagacaccctacaccatcatgttcggtccggacaagtgcgggaacgatgtgaaattgcatttcatattccgtcacgttaatccaattaacggcaccatcaccgagaagcattgcaacaaaccaaagaaccggctggacgatctctttaaggataagctcccacatttgtatcagcttgtggtccatcccgacaacagcttcgagattcgagtggatcacaaaatcgtcaatgagggctccctactgacagactttaagccgcccgtaaatccgccagcacagatcgatgacccgaatgaccacaagccagagtcgtgggatgagcgcgagaagataccagatcccacagcatcgaagcccagtgattgggatgaggatgcaccgccccagctgcccgatccggatgctgttatgcccgagggctggctggaggatgagcccgacatgatattcgatcccactgccagcaagcccgaggattgggatgccgaaatcgatggcgaatgggaggcaccgctggtggataaccccgtctgtgagaaaaccgttggctgtggcaagtggaaggctccgctgatccccaatcccaactacaagggcaagtggcgtgcaccgagcattgacaatcccaactatcagggcaagtggtctcctcgcaagattgccaatcccgatttctttgaagatctaaagccgttccgcatgacaccgattagtgctgtgggtctggagctctggtccatgtctagcgacattctcttcgacaatcttatcgtcaccgatgatgtggcggtggcccgtgattttgctgccaatagttttgatgtcaagcgtcgctatattgatcgtgaatcggactcattcgtgaataaggtagtcgagctagccaaggccaatcccgtggtcgcgggcattgccctggtggtctttgtcgtgctattcgttttccttaccatttggtgtagatttggtgccgctaagaaagaggacgctgccaaacgcgctgccgctcaggcaaagaaaaccgatgaaccacaacccgatgaggcacccgaagaggaggaggaaagcgatccatcgtctgagagagctgctggcgattccagtaaggaaagcacgccgctgtccgctagtcccaagaagaatacaaagtctgatttagaggataatgttgagaccaagccggaggagccggagggttctgatgagcccgcacagactgagcaacctaccacaaaaactacacgtaagcgcgcagtgcgcaaggagtaa

SEQ ID NO: 4392 - protein, 607 aa, Drosophila pseudoobscura pseudoobscura
MQWKFGGSSAALALLLACSLLLSVTADAEFGVDADDFEDGQVEDVQEETVGADEELVYESPVIEPKKFHFADHFDDVEESRKLWVNSQAKKDDIAEEISKYDGIWSWESPQRIVWAKDKGLVLKSKAKHAAISARLRKQFDFKAEKPLVVQYEVTLQEGQDCGGSYIKLLSAGKETDNLKSFNDKTPYTIMFGPDKCGNDVKLHFIFRHVNPINGTITEKHCNKPKNRLDDLFKDKLPHLYQLVVHPDNSFEIRVDHKIVNEGSLLTDFKPPVNPPAQIDDPNDHKPESWDEREKIPDPTASKPSDWDEDAPPQLPDPDAVMPEGWLEDEPDMIFDPTASKPEDWDAEIDGEWEAPLVDNPVCEKTVGCGKWKAPLIPNPNYKGKWRAPSIDNPNYQGKWSPRKIANPDFFEDLKPFRMTPISAVGLELWSMSSDILFDNLIVTDDVAVARDFAANSFDVKRRYIDRESDSFVNKVVELAKANPVVAGIALVVFVVLFVFLTIWCRFGAAKKEDAAKRAAAQAKKTDEPQPDEAPEEEEESDPSSERAAGDSSKESTPLSASPKKNTKSDLEDNVETKPEEPEGSDEPAQTEQPTTKTTRKRAVRKE

SEQ ID NO: 4393 - DNA, 1944 bp, Drosophila melanogaster (fruit fly)
  CDS (1)..(1944)
atggcgtggaaaatgggaggaaaccgggccgcaacgctggcgttgctcttcgccagcagtttgctgctgctgagtgcggccaatgccgccgatttggacacggagtcggacgacttcgaggatggttatgtggaggatgtgcaggaggagcccgccgtcatcggtggcgatgagaagctggcctacgagagcccggttatcgatgccaagaagttccacttcgcggatcacttcgacgacgtggaggagtccaggaagaggtgggtgctgtcgcaggccaagaaggacgacatcgccgaggagatctccaagtacgacggcatctggaactgggagtcgccgcagcgcatcgtttgggctaacgacttgggtctggtgctcaagtcgaaggccaaacacgcggccatagccgcccccctccgcaaaccgttcgagttcaagtcggacaagccgctggtggtgcagtacgaggtcacgttgcaggagggtcaggagtgcggtggctcgtatctgaagcttttgtccgccggaaaagacacggagcaactaaaagcgttcaatgacaagacaccctataccatcatgtttggaccggacaagtgcggcaacgatgtgaaaatgcacttcatattccggcacgtcaatccaattaatggcaccatcaccgagaagcactgcaacaagccaaagaaccgtttggaagagccattcaaggacaagctaccccatctctaccagctggtggtccgtcccgataacagctttgagattcgcgttgaccacaagatcatcaatgagggttccctgctaaccgatttcaagccaccagtcaacccgccggcagagatcgacgaccccaatgaccacaagcccgaatcgtgggatgagcgagagaagatcccagatcccactgcccacaagcccgaggattgggatgaggatgctccaccccagttgcccgataccgatgccgtcatgcccaatggctggctcgaagatgagcccgacatgattttcgatccaactgccaccaaacccgaggattgggatgccgaaatcgatggcgagtgggaggctccattggtggacaatccagtgtgcgagaaggctcccggctgtggcaagtggaaggctccgctcatccccaatcccaactacaagggcaagtggcgtgcaccaatgatcgagaaccccaactaccagggcaagtgggcacccaggaagattcccaatccagacttctttgaggatctgaagcccttccaaatgacgcccatcagcgctgtgggtctggaactgtggtccatgtccagcgatattctcttcgacaacctaatcatcacggacgacgtggaggtggcccgtgactttgccgccaacagcttcgacatcaagcgtcgctacatcgatcgtgaatcgaaaaccttctggcaccgcctaatgcgccgcatgaactacaagcccggctggtgggccctgtacttcgtgtacctgctcattccggccagttgttatgtcttctatctctaccgacgcgccaaagaggactcattcgtgaataaggtagtcgagctagccaaggccaatccctcgatctggggcattggcttggtggccattgtggcgctggttgccctcaccatctactgtagatttggtaccgctaagagtcaggactcggctgccaaaaaggctgctgccgaggccaagaagtccgacgatcctcagcccgacgatgagcccgaggccgaggaggagagcgacgaaagggccgctggcgataccagcaaggagagcacaccgctgtccgctagtcccaagaagaaccaaaagtctgatttagatgataacgaagaggagtccaaggcggcggagagccgagagcccgcacagactgaggaatctaacacaaaaacacgcaagcgtcaagcgcgcaaggagtaa

SEQ ID NO: 4394 - protein, 647 aa, Drosophila melanogaster (fruit fly)
MAWKMGGNRAATLALLFASSLLLLSAANAADLDTESDDFEDGYVEDVQEEPAVIGGDEKLAYESPVIDAKKFHFADHFDDVEESRKRWVLSQAKKDDIAEEISKYDGIWNWESPQRIVWANDLGLVLKSKAKHAAIAAPLRKPFEFKSDKPLVVQYEVTLQEGQECGGSYLKLLSAGKDTEQLKAFNDKTPYTIMFGPDKCGNDVKMHFIFRHVNPINGTITEKHCNKPKNRLEEPFKDKLPHLYQLVVRPDNSFEIRVDHKIINEGSLLTDFKPPVNPPAEIDDPNDHKPESWDEREKIPDPTAHKPEDWDEDAPPQLPDTDAVMPNGWLEDEPDMIFDPTATKPEDWDAEIDGEWEAPLVDNPVCEKAPGCGKWKAPLIPNPNYKGKWRAPMIENPNYQGKWAPRKIPNPDFFEDLKPFQMTPISAVGLELWSMSSDILFDNLIITDDVEVARDFAANSFDIKRRYIDRESKTFWHRLMRRMNYKPGWWALYFVYLLIPASCYVFYLYRRAKEDSFVNKVVELAKANPSIWGIGLVAIVALVALTIYCRFGTAKSQDSAAKKAAAEAKKSDDPQPDDEPEAEEESDERAAGDTSKESTPLSASPKKNQKSDLDDNEEESKAAESREPAQTEESNTKTRKRQARKE

SEQ ID NO: 4395 - DNA, 1713 bp, Drosophila melanogaster (fruit fly)
  CDS (1)..(1713)
atggcatggaaaattggaggaaatcagtacgcaacactgtcgatgctcttcgccagcagtttgctattgctgagtgcggtcaaagccatcgattcggatctagagtgggatgacttcgaggacgttgatgtagaggatgtgcagcaggaggatgtcgatgagaagcctacctataagagcccggtgatcgatgccaagaaattccacttcgcggaccacttcgacgacatggaggcatccacaaggaggtgggtactctcgcaggccaagaaggacgacatcgccgatgagatctccaagtacgatggcatctggaattgggagccgccgcagcgcatggtttgggcaaacgatctgggtctggtgctcaagtcgaaggccaaacatgcggccatagcagcccaccttcatcagccgttcgatttcaagtcggagaagccactggtggtgcagtatgagattacgattcagaagggtcaggagtgcggcggctcgtatctaaagcttttgtccgccggaaaagagacggaacaactacagaccttcaatgacaagacaccctataccattatgtttggaccggacaagtgcggcaaagatgtgacaattcactttatattcaagcacgtcaatccaattaatggcaccatcaccgagaagcattgcaacaagccaaataatagttttgaagagccattcaaggataagttaccccatctctatcagctggtggttcgtccagataacagctttgaaattcgcattgaccacaagatcatcaaagagggttccctgctaaccgatttcaagccaccagtcaatccgccggcagagatcgatgaccccaatgaccataagccagattcgtgggatgagcgagagaagatcccagaccccactgttcacaagcccgaggattgggacgagaatgaaacactaaagctgccagatgccgacatgatttttgatccaactgccacgaaacctgaagattgggatgacgaaatcgatggcgagtggcaggctccaatggtagacaacccagtgtgcaagaaggaccaaacctgtggcatcatccgcaatcccaactacaagggcaagtggattgcaccgatgatcgataacccaaactaccagggcaagtgggcacccagaaagattgccaatccagacttctttgaggatctcaagccctttcaaatgacgcccatcagcgctgtgggtctggagctgtggtccatgtccagtgatattctcttcgacaacctgatcatcacagacgacgtggaggtggcccgtgactttgcggccaacagctttgacatcaagcgtcgctacatcgatcgtgaacgggactcaatcgtgaataaggtagtcgagctagtcaaggactatccctcgatttgggccattggcctggtggccattgtggcgttggttgccctcactaaatgctgtagatttggtaccactaagattcaggaatcggctgctgccgagtccaagaagaccgacgatcctcagccccatgagccgaggccgtgggggagtaggatgagcagagcgaagaaatggaagttgacgataccaccaagaagagcatatagctgtccgttaccacccaaaaagaaattagatgacaacgaatggaagttcaaggcggcgaagaaacaaaagcacacacagactaaggaatctaacactgaggagtaa

SEQ ID NO: 4396 - protein, 570 aa, Drosophila melanogaster (fruit fly)
MAWKIGGNQYATLSMLFASSLLLLSAVKAIDSDLEWDDFEDVDVEDVQQEDVDEKPTYKSPVIDAKKFHFADHFDDMEASTRRWVLSQAKKDDIADEISKYDGIWNWEPPQRMVWANDLGLVLKSKAKHAAIAAHLHQPFDFKSEKPLVVQYEITIQKGQECGGSYLKLLSAGKETEQLQTFNDKTPYTIMFGPDKCGKDVTIHFIFKHVNPINGTITEKHCNKPNNSFEEPFKDKLPHLYQLVVRPDNSFEIRIDHKIIKEGSLLTDFKPPVNPPAEIDDPNDHKPDSWDEREKIPDPTVHKPEDWDENETLKLPDADMIFDPTATKPEDWDDEIDGEWQAPMVDNPVCKKDQTCGIIRNPNYKGKWIAPMIDNPNYQGKWAPRKIANPDFFEDLKPFQMTPISAVGLELWSMSSDILFDNLIITDDVEVARDFAANSFDIKRRYIDRERDSIVNKVVELVKDYPSIWAIGLVAIVALVALTKCCRFGTTKIQESAAAESKKTDDPQPHEPRPWGSRMSRAKKWKLTIPPRRAYSCPLPPKKKLDDNEWKFKAAKKQKHTQTKESNTEE

SEQ ID NO: 4397 - DNA, 1920 bp, Drosophila melanogaster (fruit fly)
  CDS (1)..(1920)
atggcttggaaaatgctcttcgccattttgttgctgctgagtgcggccaaaaccggctatttggccccggagtcggaaaactctgtggaggatgtgcagatagagcccggcgccatctatggcgatgagaagtttgcctacaagagtccggtgatcgatgccgaaaagttttactttgcggatcacttcgacgacgtggaggcatcccgaaagagatgggtactgtcgcaggccaagaagaacgacatcgccgatgagatagccaaatacgatggcatctggaactgggagtctccgcaacgcatcttttgggcaaacgatctgggtctggtgctcaagtcgaaggccaagcatgcggccatagccgccccctttcgccagccgttcgatttcaagtcgaacaagccgctggtggtgcagtacgagcttacgttgcaggagggtcaggactgtggcggctcgtatctgaagcttttgtccgccggaaaaggcacggagcaactaaatcgcttcaatgacaagacaccctataccatcatgtttggtccggacaagtgcggcaacaatttgaaaatgcactttatattccggcacgtcaatccattaaatggcaacatcaccgaaaagcactgcaaaaagccaaatgcccgtttgggagtgccattcacggacaagctaccccatctctaccagctggtggtccgtcccgataacagctttgagattcgcttagaccacaagatcatcaaagagggttccctgctgaccgactttgtgccaccagtcaacccaccggcggagatagatgaccccaatgaccacaagccagaatcgtgggatgagcggaagaagatcccagaccccaatgcccacaagcccgaggattgggacgaggatgctccaccacatctgcccgataccgatgccgtcatgccaaatggctggctagaggatgagcccgacatgattttcgatccaactgccatcgaacccgaagattggaattccgaaatcgatggcgagtgggaggctcctctggtggagaacccagtgtgcaagaaggcccccggctgtggcaagtggaaggctccgctcatccccaatcccaactacaagggcaagtggagtgcaccaatgatcgagaaccccaacaaccagggcaagtgggctcccaggaagatagccaatccagacttctttgaggatctgaagcccttccaaatgacgccaatcaacgctgtgggtctggagctgtggtccatgtccagcgatattctcttcgataacctgatcatcacggacgatgtggagttggcccgtgactttgctgccaacagcttcgacatcaagcgtctctacatcgatcgtgaatcattcgggaataaggtagtcgagctagctagggccaatcgagcgatctggggcattgtcatagtggccattgcggtgccggttgccattaccatcttctgtaaatttggtttaggcccgagtagggttgcggctgccaaaaaagctgctgctgccgcggccaagaagaccgacgatcctcagcccgatgatgacctgggggccgaggaggaggaaaagttggagaaggggaagaaggaggaggaaaagaaggaggaggaggaggaggaggagaaggaggagaataaggaggaaaagaaggaggaggagaaggatgacgagaaggagatgaaggattgcgaggaggaggaggatgacgaggagaaggatgacgaggagaagaccgacgaaagggccgctggtgataccaacaaggaaagcacaccgctgtccgctagtcccaagaagaaccaaaagtcttatttagataataacgaagatgaggaagacacattaaagaacaaggaacctaccccaaaaaaaaggaagcgtaaagcactcaaggagtaa

SEQ ID NO: 4398 - protein, 639 aa, Drosophila melanogaster (fruit fly)
MAWKMLFAILLLLSAAKTGYLAPESENSVEDVQIEPGAIYGDEKFAYKSPVIDAEKFYFADHFDDVEASRKRWVLSQAKKNDIADEIAKYDGIWNWESPQRIFWANDLGLVLKSKAKHAAIAAPFRQPFDFKSNKPLVVQYELTLQEGQDCGGSYLKLLSAGKGTEQLNRFNDKTPYTIMFGPDKCGNNLKMHFIFRHVNPLNGNITEKHCKKPNARLGVPFTDKLPHLYQLVVRPDNSFEIRLDHKIIKEGSLLTDFVPPVNPPAEIDDPNDHKPESWDERKKIPDPNAHKPEDWDEDAPPHLPDTDAVMPNGWLEDEPDMIFDPTAIEPEDWNSEIDGEWEAPLVENPVCKKAPGCGKWKAPLIPNPNYKGKWSAPMIENPNNQGKWAPRKIANPDFFEDLKPFQMTPINAVGLELWSMSSDILFDNLIITDDVELARDFAANSFDIKRLYIDRESFGNKVVELARANRAIWGIVIVAIAVPVAITIFCKFGLGPSRVAAAKKAAAAAAKKTDDPQPDDDLGAEEEEKLEKGKKEEEKKEEEEEEEKEENKEEKKEEEKDDEKEMKDCEEEEDDEEKDDEEKTDERAAGDTNKESTPLSASPKKNQKSYLDNNEDEEDTLKNKEPTPKKRKRKALKE

SEQ ID NO: 4399 - DNA, 1818 bp, Drosophila melanogaster (fruit fly)
  CDS (1)..(1818)
atggcgtggaaaatgggaggaaaccgggccgcaacgctggcgttgctcttcgccagcagtttgctgctgctgagtgcggccaatgccgccgatttggacacggagtcggacgacttcgaggatggttatgtggaggatgtgcaggaggagcccgccgtcatcggtggcgatgagaagctggcctacgagagcccggttatcgatgccaagaagttccacttcgcggatcacttcgacgacgtggaggagtccaggaagaggtgggtgctgtcgcaggccaagaaggacgacatcgccgaggagatctccaagtacgacggcatctggaactgggagtcgccgcagcgcatcgtttgggctaacgacttgggtctggtgctcaagtcgaaggccaaacacgcggccatagccgcccccctccgcaaaccgttcgagttcaagtcggacaagccgctggtggtgcagtacgaggtcacgttgcaggagggtcaggagtgcggtggctcgtatctgaagcttttgtccgccggaaaagacacggagcaactaaaagcgttcaatgacaagacaccctataccatcatgtttggaccggacaagtgcggcaacgatgtgaaaatgcacttcatattccggcacgtcaatccaattaatggcaccatcaccgagaagcactgcaacaagccaaagaaccgtttggaagagccattcaaggacaagctaccccatctctaccagctggtggtccgtcccgataacagctttgagattcgcgttgaccacaagatcatcaatgagggttccctgctaaccgatttcaagccaccagtcaacccgccggcagagatcgacgaccccaatgaccacaagcccgaatcgtgggatgagcgagagaagatcccagatcccactgcccacaagcccgaggattgggatgaggatgctccaccccagttgcccgataccgatgccgtcatgcccaatggctggctcgaagatgagcccgacatgattttcgatccaactgccaccaaacccgaggattgggatgccgaaatcgatggcgagtgggaggctccattggtggacaatccagtgtgcgagaaggctcccggctgtggcaagtggaaggctccgctcatccccaatcccaactacaagggcaagtggcgtgcaccaatgatcgagaaccccaactaccagggcaagtgggcacccaggaagattcccaatccagacttctttgaggatctgaagcccttccaaatgacgcccatcagcgctgtgggtctggaactgtggtccatgtccagcgatattctcttcgacaacctaatcatcacggacgacgtggaggtggcccgtgactttgccgccaacagcttcgacatcaagcgtcgctacatcgatcgtgaatcggactcattcgtgaataaggtagtcgagctagccaaggccaatccctcgatctggggcattggcttggtggccattgtggcgctggttgccctcaccatctactgtagatttggtaccgctaagagtcaggactcggctgccaaaaaggctgctgccgaggccaagaagtccgacgatcctcagcccgacgatgagcccgaggccgaggaggagagcgacgaaagggccgctggcgataccagcaaggagagcacaccgctgtccgctagtcccaagaagaaccaaaagtctgatttagatgataacgaagaggagtccaaggcggcggagagccgagagcccgcacagactgaggaatctaacacaaaaacacgcaagcgtcaagcgcgcaaggagtaa

SEQ ID NO: 4400 - protein, 605 aa, Drosophila melanogaster (fruit fly)
MAWKMGGNRAATLALLFASSLLLLSAANAADLDTESDDFEDGYVEDVQEEPAVIGGDEKLAYESPVIDAKKFHFADHFDDVEESRKRWVLSQAKKDDIAEEISKYDGIWNWESPQRIVWANDLGLVLKSKAKHAAIAAPLRKPFEFKSDKPLVVQYEVTLQEGQECGGSYLKLLSAGKDTEQLKAFNDKTPYTIMFGPDKCGNDVKMHFIFRHVNPINGTITEKHCNKPKNRLEEPFKDKLPHLYQLVVRPDNSFEIRVDHKIINEGSLLTDFKPPVNPPAEIDDPNDHKPESWDEREKIPDPTAHKPEDWDEDAPPQLPDTDAVMPNGWLEDEPDMIFDPTATKPEDWDAEIDGEWEAPLVDNPVCEKAPGCGKWKAPLIPNPNYKGKWRAPMIENPNYQGKWAPRKIPNPDFFEDLKPFQMTPISAVGLELWSMSSDILFDNLIITDDVEVARDFAANSFDIKRRYIDRESDSFVNKVVELAKANPSIWGIGLVAIVALVALTIYCRFGTAKSQDSAAKKAAAEAKKSDDPQPDDEPEAEEESDERAAGDTSKESTPLSASPKKNQKSDLDDNEEESKAAESREPAQTEESNTKTRKRQARKE

SEQ ID NO: 4401 - DNA, 1713 bp, Nasonia vitripennis (jewel wasp)
  CDS (1)..(1713)
atggctctgacccggaggcaggtcctctgcttgctactgctcgcggtctgcagtcggttcgtgccctcgagggcggccgagcccgaagtcgaggacgtcgtcgtcgaggacgagcccgccgacaacgagcccaagatcgaagactacaaaagcccggagctgcccgggaacgtctacctagccgaccacttcgacgacaagcagggattcgacaagatctggatccagtcgcaagccaagaaggaaaacatcgacgaagatatcgctaaatatgatggtatttgggctgtggaggagcccaagcgcagcgtggaaaatggcaacctaggcctagtgctcaagagcaaggctcggcacgctgcgctgtccgccctgttaaacaagccttttattttcgatgacaaaccactgatagtgcagtacgaagtcatcttccaagaaggacaggaatgcggcggagcctacctgaagctgatatccgttgatcctcaacacaaggacttgaggaatttccacgataagactccctacagtattatgtttggtcctgataagtgtggcaatgatcacatgctgcactttatcttcagacacaggaaccctctcaatggctcgattgaggagaaacatgctaaaaagccaaaggaaagactggaagactttttcaaagacaagcagccccatttgtacactcttgttgttcgtccagacaacacttttgaagtcaaagttgatggaaatgtggtaaacgagggttcactactggatgattttaatcctcctgtcaatcccccgctcgaaattgaagatccaaatgataagcgaccagaagactgggacgaaagagaaaaaataccagatccaactgccgtgaagcctgaagactgggatgaagatgcgccggcacagattgttgatgaaaatgatcaagtgcctgaaggatggctagaagatgagccatcaaccataccaaatcctgactcggtgaaacctgcagattgggatgaagaaatggatggggaatgggaaccgccagagattcaaaatcccaagtgtcttgatgcacctggttgtggcccatataaaaaacgacttattagtaatcctaagtacaaaggaaaatggcttccaccattaataaataatcctaattatcaaggaaaatggaaacctaggctaattcacaaccccgaatactttaatgatgaaaatcctttcagaatgactccaatctatgcagttggatttgagttatggtcaatgtcacctgatattctttttgacaatattattgtcaccgatgatgaaattgtcgctcagaaatgggcagaacaaacattcgaggttcgaaaacaaagaattgccatagaatcgtctggtttatatcaacaagttgtaaatttcaccgttgagcacccatggatatggacagtttatttaatattgctaggcatacccattatgctgattatttattgttgctgctttacaagcaaggatagtcaagataaagaagatgatactgaaaatgaaaatgaagaactgcttcaaaaagataaagaagaatctgaggcagctactgtagaggaagttaatggtgataaagttgaagaatcgccagaatccgaggaacaagctgaagagattatcaagagcaaggaatcaatctcgactgcagagggaccacggaggagaaaagcaaataaagaataa

SEQ ID NO: 4402 - protein, 570 aa, Nasonia vitripennis (jewel wasp)
MALTRRQVLCLLLLAVCSRFVPSRAAEPEVEDVVVEDEPADNEPKIEDYKSPELPGNVYLADHFDDKQGFDKIWIQSQAKKENIDEDIAKYDGIWAVEEPKRSVENGNLGLVLKSKARHAALSALLNKPFIFDDKPLIVQYEVIFQEGQECGGAYLKLISVDPQHKDLRNFHDKTPYSIMFGPDKCGNDHMLHFIFRHRNPLNGSIEEKHAKKPKERLEDFFKDKQPHLYTLVVRPDNTFEVKVDGNVVNEGSLLDDFNPPVNPPLEIEDPNDKRPEDWDEREKIPDPTAVKPEDWDEDAPAQIVDENDQVPEGWLEDEPSTIPNPDSVKPADWDEEMDGEWEPPEIQNPKCLDAPGCGPYKKRLISNPKYKGKWLPPLINNPNYQGKWKPRLIHNPEYFNDENPFRMTPIYAVGFELWSMSPDILFDNIIVTDDEIVAQKWAEQTFEVRKQRIAIESSGLYQQVVNFTVEHPWIWTVYLILLGIPIMLIIYCCCFTSKDSQDKEDDTENENEELLQKDKEESEAATVEEVNGDKVEESPESEEQAEEIIKSKESISTAEGPRRRKANKE

SEQ ID NO: 4403 - DNA, 1809 bp, Aedes aegypti (Stegomyia aegypti)
  CDS (1)..(1809)
atgaaaattaggaaagagaggagctatcttttgctcactagcatccttttgctggtaactttgtcctatgccgacgacgatggagtaactgtagagacggaagaggaaacgtcatccgatagtgttgccgctagtgatctctcatacgaaagcccgtacgccgaccctgcgaaattctactttgcggaccatttcgacgatcaggaacaattcgcttccaagtgggtaaagtctcaagcaaagaaagatgacaccgctgacgaaatcgccaagtacgatggcgagtgggatgttgaattgccaaagcgaccattgctgcccaacgatctaggacttgttctgaaatcgaaggccaaacacgctgccatcgcttccagactgaatcgtccgtttgtcttctccgacaagcctctggttgtgcagtacgaagtgaaccttcaggacggccaagaatgcggaggttcatacatcaagctgctttcgtccggcaaggagacaaccgatctcaaacagttcagggacaaaacaccctacaccatcatgtttggaccagacaaatgtggcaatgacatcaagttgcatttcattttccgccatgttaatcccatcaacggtaccatcacagaaaagcattgcaggaaagcaaaggatcggctagatgacccattcaaggacaagcaaccgcatctgtatcaacttgttgtccgtcccgataatacgtatgtaatccgtgtggatcacaagattatcaacgagggttctttgttcaccgagtttacgcctccggtgaatcctccgaaggaaatcgatgatcctagcgatttcaaaccggaaaattgggatgaacgtgaaaagattccagatcctgatgccaagaagccagacgactggaatgaagatgaaccaccgcaaattccagaccccagtgcgtccaaaccggaagggtggcttgatgacgtggaagaaatgattcctgatccgaatgcagaaaaaccatcagattgggatatagaaatggacggggaatgggaggcaccgctcattgctaatccggcttgcgagaaggcagtaggatgtggcttatggaaggctcccatgatctctaatcccaattacaaaggcaaatggcgtgcaccacttatcgacaatcccaactatcagggcaagtgggctccgcgaaagatacccaaccctgacttctttgaagacaaaaatcccttcaagatgactacaattgccgctattggtattgaactgtggtcaatgtccagcgatattctgttcgataatctcatcatcgtcgatgacgaaacccttgctagagactgggcagcacaaacttacgatttaaagagaaagctcattgatagagaagcggaaactgtcgtatcacgcgtaatgaaatttgcaaatgagaacccatggatgtgggcagttctcgtagtagttgtaggtttgccgctagccatcttcatctatttggcttgttcgaagagcacaccttctccaacggcacgagccaagaaaaccgatgaatttgttcctgatgacagcgagaccaaagatgacacagtcaagtcaaaatccaacctgaattcaaacgaagaagatcggttgcaatcagaagtcgcggatgcagaagaggtagaaaatgataactatgaagatgacgaagaggaagacgaagatgaggaagaagtggatgagactgaaagtaaagaaccagctgaagtgtcgccagcagatatgagtccatcgaccaaggaagcggaagaaggagttaagaaacgaaagcctaggagggaatag

SEQ ID NO: 4404 - protein, 602 aa, Aedes aegypti (Stegomyia aegypti)
MKIRKERSYLLLTSILLLVTLSYADDDGVTVETEEETSSDSVAASDLSYESPYADPAKFYFADHFDDQEQFASKWVKSQAKKDDTADEIAKYDGEWDVELPKRPLLPNDLGLVLKSKAKHAAIASRLNRPFVFSDKPLVVQYEVNLQDGQECGGSYIKLLSSGKETTDLKQFRDKTPYTIMFGPDKCGNDIKLHFIFRHVNPINGTITEKHCRKAKDRLDDPFKDKQPHLYQLVVRPDNTYVIRVDHKIINEGSLFTEFTPPVNPPKEIDDPSDFKPENWDEREKIPDPDAKKPDDWNEDEPPQIPDPSASKPEGWLDDVEEMIPDPNAEKPSDWDIEMDGEWEAPLIANPACEKAVGCGLWKAPMISNPNYKGKWRAPLIDNPNYQGKWAPRKIPNPDFFEDKNPFKMTTIAAIGIELWSMSSDILFDNLIIVDDETLARDWAAQTYDLKRKLIDREAETVVSRVMKFANENPWMWAVLVVVVGLPLAIFIYLACSKSTPSPTARAKKTDEFVPDDSETKDDTVKSKSNLNSNEEDRLQSEVADAEEVENDNYEDDEEEDEDEEEVDETESKEPAEVSPADMSPSTKEAEEGVKKRKPRRE

SEQ ID NO: 4405 - DNA, 1908 bp, Anopheles gambiae str. PEST
  CDS (1)..(1908)
atgatgaaattaaacagaccccggtggtcaccgctgctgtggcggattgctttgctgagcgccgtactactatttcatagccccgtggtacatggaaatgacgaaatttccaccgagcctcagccggctggggatgctgagcagtacgaaacaccgacggtagacccgaagcgtatgtattttgctgaacatttcgatgatctgttcgatggtgcgagtgatgccatcgagaagcggtgggtgaagtcaaaggccaagaaagacgacgctgccgaagaggtggccaaatacgacggcgaatgggcggtcgagcagccgcagcggccgattctatcgaacgattatgggttggtgctgaaatcgaaagcgaagcatgctgcgattgcttcgcctttgctgctgaaccgaccattcgtgttcgaggacaagccgctcgtggtacagtacgaggtcaacttgcaggagggccaggaatgcggcggctcctacataaagctcctttccgtgggcgacggtacgaaggatctgaagcagttccacgacaaaacaccgtacacgattatgttcggaccggacaagtgtggcaacgatgtaaagttgcatttcattttccgacacgttaacccgattaatggtaccatcacggagaagcattgcaacaagcagaaagatcggcttgatgatccgttcaaagacaaacgcccccatttgtaccaattgattattcgcccggacaacacgtacaccatacgagtggatcacaaaaccgtcaacgagggctcgttgctcaccaactttacgccggcagtgaacccgcctgctgaaatcgatgacccggaggaccgcaagccggagaactgggacgatcgcgaaaaaatccccgatcccgaagcgaccaaacccgacgactggaacgaggacgaaccggcacaaattcccgacccgaaggctaccaagccggccggctggttggacgatgtggaggagatggtaccggacagttcggccgtgaagccggaggactgggacaacgatatggatggtgagtgggaaccgcccctgattccgaacccgatgtgtgagaaggcggttggttgcggtttgtggaaggctccgatggtaccgaaccctaactacaagggtaaatggcgcccgccgcttatcgctaacgtaaactaccaaggaaagtgggccccgcgcaagattcctaatccggacttctttgaagatctaacgccgttccgaatgacaccgattgccgcggtaggcatcgaactttggtccatgtcaaacgatatactgtttgataacattgttatttgcgatgatgaatccgttgctgacgaatgggctgcacaaacgttcgatctcaaagtgaagacgcttgatcggcaggcgcaaaccctatgggaccgagcgatgcggtacattaactacaagccaggctattggggagcgtactttgtgtactgctcaataccattgattgcctacgtatggttcctgtggtctcgacgcgataaagagggtgacgccaaggcggaaattggacgcaagaagaagaatgacgattatcctgcaccggagcaagagcaggacgagctggtcggtggtgctggtgaggaagcggaagacgacggacgatccagcaaaacaaagctgaatgccgcagccacggggtcctccggttcacggtcagccagcagtgccggcgaagcgtacgcagagaatgaggatgaacgtgacggcgatgaggctgaagaggatgaggaagacgacgaagcacaggaagaggctcaggaaatggaggccggtgaagaggaagcatcgtcaagcgatgcaccagtagatagcaagaattcggaaggcggggaaggccttaagaagagaagagcccgcaaggattag

SEQ ID NO: 4406 - protein, 635 aa, Anopheles gambiae str. PEST
MMKLNRPRWSPLLWRIALLSAVLLFHSPVVHGNDEISTEPQPAGDAEQYETPTVDPKRMYFAEHFDDLFDGASDAIEKRWVKSKAKKDDAAEEVAKYDGEWAVEQPQRPILSNDYGLVLKSKAKHAAIASPLLLNRPFVFEDKPLVVQYEVNLQEGQECGGSYIKLLSVGDGTKDLKQFHDKTPYTIMFGPDKCGNDVKLHFIFRHVNPINGTITEKHCNKQKDRLDDPFKDKRPHLYQLIIRPDNTYTIRVDHKTVNEGSLLTNFTPAVNPPAEIDDPEDRKPENWDDREKIPDPEATKPDDWNEDEPAQIPDPKATKPAGWLDDVEEMVPDSSAVKPEDWDNDMDGEWEPPLIPNPMCEKAVGCGLWKAPMVPNPNYKGKWRPPLIANVNYQGKWAPRKIPNPDFFEDLTPFRMTPIAAVGIELWSMSNDILFDNIVICDDESVADEWAAQTFDLKVKTLDRQAQTLWDRAMRYINYKPGYWGAYFVYCSIPLIAYVWFLWSRRDKEGDAKAEIGRKKKNDDYPAPEQEQDELVGGAGEEAEDDGRSSKTKLNAAATGSSGSRSASSAGEAYAENEDERDGDEAEEDEEDDEAQEEAQEMEAGEEEASSSDAPVDSKNSEGGEGLKKRRARKD

SEQ ID NO: 4407 - DNA, 1500 bp, Physcomitrella patens subsp. patens
  CDS (1)..(1500)
atgtggcaggtattctatgaaagtttcgatgaggacttcgaaggtcgttgggtggtgtctcagaacagcgagtacggaggtacatggaagcatgcgaaaagtgaaggtcacgatgattacggtctgttggtgagtgagaaagctaagaagtacggtatagcagtggacttgcccgagaaggtcgatcccaaggatggagctcttgttcttcagtatgatctgagacttcagagcggtcttgagtgcggtggtgcgtacttgaagtttctccaacctcaggaagcagggtggacggccaacgacttcaacaatgagtcgccgtactccataatgttcggtccggacaagtgtggagccaccaacaaggtgcacttcatcttccgacacaagaacccagtgacaggaaaatacgtggagcatcatctgaagaacccccctgttcccgcaggagacaagttgtctcacgtctacacagccatcatctatccgaacaacactctgagaattttgatcgatggtgaggagaagaagacggccgatctgttatctgacgagtttgaaccaacagtgatccccgccaagacgattgccgatccagaagacaagaagcctgaggattgggatgaccgcgccaagatttccgaccccgatgccactaagcctgatgactgggatgaggatgcccccagagagatcgaagacgaggaagctgagaagccagagggatggttggatgatgagcctgatgaagtggacgatcctgaagccgtgaaacccgaggattgggacgacgaggaagatggcgaatgggaacctcccaagatcagtaacccgaaatgtgaggaggctcctggttgtggtgagtggaagcgccccatgaagaagaaccccgccttcaagggcaagtggaaggcaccaatgattgacaacccagcttatcaaggcatttgggcacctaagcagattcccaatcccgagtactttgagttagagaagcccaacttggaagctgtggccgccatcggtattgagatttggaccatgcaagatggcatcctcttcgacaatattctagtagcacacgatgaagcgaacgctgaagagtacaggaagaagacctgggaaccaaaacacgcggttgaggaggagaaagaggcagctgaggccaagaagtccgaagataaaccagagaaggccgggttggacagcatcaagggcaaggtcttcgaggctcttaacaaggtttccgagattccattcctcgccaagtacaaggaacagattgatgacgtgcttgacaaggctgagaagaattcgaatgttactctcggtgttttggcaaccatccctgtcctcctcgtgacgatgctgttgagcttttgctttggaaagaagaagacgccatccaccgtacgtgactacatcggtttactttggtctatgcatggtcacatatattgtagctgtgcaagtttcagcgcacaaagcatatttttgtaa

SEQ ID NO: 4408 - protein, 499 aa, Physcomitrella patens subsp. patens
MWQVFYESFDEDFEGRWVVSQNSEYGGTWKHAKSEGHDDYGLLVSEKAKKYGIAVDLPEKVDPKDGALVLQYDLRLQSGLECGGAYLKFLQPQEAGWTANDFNNESPYSIMFGPDKCGATNKVHFIFRHKNPVTGKYVEHHLKNPPVPAGDKLSHVYTAIIYPNNTLRILIDGEEKKTADLLSDEFEPTVIPAKTIADPEDKKPEDWDDRAKISDPDATKPDDWDEDAPREIEDEEAEKPEGWLDDEPDEVDDPEAVKPEDWDDEEDGEWEPPKISNPKCEEAPGCGEWKRPMKKNPAFKGKWKAPMIDNPAYQGIWAPKQIPNPEYFELEKPNLEAVAAIGIEIWTMQDGILFDNILVAHDEANAEEYRKKTWEPKHAVEEEKEAAEAKKSEDKPEKAGLDSIKGKVFEALNKVSEIPFLAKYKEQIDDVLDKAEKNSNVTLGVLATIPVLLVTMLLSFCFGKKKTPSTVRDYIGLLWSMHGHIYCSCASFSAQSIFL

SEQ ID NO: 4409 - DNA, 1638 bp, Physcomitrella patens subsp. patens
  CDS (1)..(1638)
atggcgtcgcgtggaatggctggatttggattgctggtgctctttgcctgcttcgccattgccgcttcgctctctgacacggtgttttatgagaacttcgacgaggacttcgaagggcgatgggtcgtctctcaaaatagcgactacggaggtacatggaagcatgccaagagcgacggtcacgatgattacggactgttggtcagcgagaaagctaagaagtatggcatagccgtcgatttgcctgagaaggttgatccgaaggatggatctcttgttcttcagtacgacctgaggcttcagaatggacttgagtgcggtggtgcctacttgaagtttcttcaacctcaggaagcagggtggacggccaacgacttcaacaacgagtccccctactccataatgtttggtccggacaagtgtggggccactaacaaggttcacttcatcttccggcacaagaacccaaccaccgggaaatacgtggagcaccatttgaagaatccccctgttcccgctggcgacaagctgtctcatgtctacacagccattatctatcctaacaacactctcagaatcttgattgatggcgaggagaagaaaacggctgatctgctgtctgaagagtttgaaccaacagtcatccccgcaaagacgattcccgacccagaagataagaagcctgaggattgggacgatcgtgccaaaattcccgaccctgatgccaccaagcctgatgactgggatgaggacgctcctagagagatcgaagacgaggaagccgagaagcctgagggatggttggatgacgagcctgatgaagttgacgatcccgaagctgtgaagcccgaggactgggacgatgaggaagatggcgaatgggaacctcccaagatcaccaaccccaaatgtgaggagggtcctggttgtggtgagtggaagcgtcccttgaaggcaaaccctgcttacaagggcaagtggagggcaccaatgatcgacaacccagcttaccagggcatctgggcacctaggcagattcccaaccctgagtacttcgagctggaaaagctcaacttggaagcagtggctgccattggtatcgagatctggaccatgcaggatggtatcttcttcgacaacattctagtcgcacacgacgaagcggtcgctgaggagtacaggaagaccacttgggaaccaaagcacacggtcgagaaggagaaagaggcagctgaggcgaagaagtctgacgataaggctgataagaccagcgtagacaacatcaaggagaaggtcttcgaggctctgaataagattgcagaggttccattccttgccaagtacaaggagcagatcgatgctgtacttgacaaggctgagagcaatcccaacgtcacccttggtgttttggcaaccatccccgtgcttctcttcacgatgttgttcagtctttgcctcggaaagaagaaatcaccacccgctgtcacgactggggccattaagaaggaggatcttgtgaccgccgatgatgtgtccgtgcctaagggggaacaagtagaggaagcagagcaagagcaagcaggagagatagagaaggagggggttagtgcccgccgcaggccccgcagagagacatag

SEQ ID NO: 4410 - protein, 545 aa, Physcomitrella patens subsp. patens
MASRGMAGFGLLVLFACFAIAASLSDTVFYENFDEDFEGRWVVSQNSDYGGTWKHAKSDGHDDYGLLVSEKAKKYGIAVDLPEKVDPKDGSLVLQYDLRLQNGLECGGAYLKFLQPQEAGWTANDFNNESPYSIMFGPDKCGATNKVHFIFRHKNPTTGKYVEHHLKNPPVPAGDKLSHVYTAIIYPNNTLRILIDGEEKKTADLLSEEFEPTVIPAKTIPDPEDKKPEDWDDRAKIPDPDATKPDDWDEDAPREIEDEEAEKPEGWLDDEPDEVDDPEAVKPEDWDDEEDGEWEPPKITNPKCEEGPGCGEWKRPLKANPAYKGKWRAPMIDNPAYQGIWAPRQIPNPEYFELEKLNLEAVAAIGIEIWTMQDGIFFDNILVAHDEAVAEEYRKTTWEPKHTVEKEKEAAEAKKSDDKADKTSVDNIKEKVFEALNKIAEVPFLAKYKEQIDAVLDKAESNPNVTLGVLATIPVLLFTMLFSLCLGKKKSPPAVTTGAIKKEDLVTADDVSVPKGEQVEEAEQEQAGEIEKEGVSARRRPRRET

SEQ ID NO: 4411 - DNA, 1569 bp, Physcomitrella patens subsp. patens
  CDS (1)..(1569)
atgcacaagctttctcttgtgtggcaggtgttttatgagaacttcgacgaggacttcgaagggcgatgggtcgtctctcaaaatagcgactacggaggtacatggaagcatgccaagagcgacggtcacgatgattacggactgttggtcagcgagaaagctaagaagtatggcatagccgtcgatttgcctgagaaggttgatccgaaggatggatctcttgttcttcagtacgacctgaggcttcagaatggacttgagtgcggtggtgcctacttgaagtttcttcaacctcaggaagcagggtggacggccaacgacttcaacaacgagtccccctactccataatgtttggtccggacaagtgtggggccactaacaaggttcacttcatcttccggcacaagaacccaaccaccgggaaatacgtggagcaccatttgaagaatccccctgttcccgctggcgacaagctgtctcatgtctacacagccattatctatcctaacaacactctcagaatcttgattgatggcgaggagaagaaaacggctgatctgctgtctgaagagtttgaaccaacagtcatccccgcaaagacgattcccgacccagaagataagaagcctgaggattgggacgatcgtgccaaaattcccgaccctgatgccaccaagcctgatgactgggatgaggacgctcctagagagatcgaagacgaggaagccgagaagcctgagggatggttggatgacgagcctgatgaagttgacgatcccgaagctgtgaagcccgaggactgggacgatgaggaagatggcgaatgggaacctcccaagatcaccaaccccaaatgtgaggagggtcctggttgtggtgagtggaagcgtcccttgaaggcaaaccctgcttacaagggcaagtggagggcaccaatgatcgacaacccagcttaccagggcatctgggcacctaggcagattcccaaccctgagtacttcgagctggaaaagctcaacttggaagcagtggctgccattggtatcgagatctggaccatgcaggatggtatcttcttcgacaacattctagtcgcacacgacgaagcggtcgctgaggagtacaggaagaccacttgggaaccaaagcacacggtcgagaaggagaaagaggcagctgaggcgaagaagtctgacgataaggctgataagaccagcgagaaggtcttcgaggctctgaataagattgcagaggttccattccttgccaagtacaaggagcagatcgatgctgtacttgacaaggctgagagcaatcccaacgtcacccttggtgttttggcaaccatccccgtgcttctcttcacgatgttgttcagtctttgcctcggaaagaagaaatcaccacccgctgtcacgactggggccattaagaaggaggatcttgtgaccgccgatgatgtgtccgtgcctaagggggaacaagtagaggaagcagagcaagagcaagcaggagagatagagaaggagggggttagtgcccgccgcaggccccgcagagagacatag

SEQ ID NO: 4412 - protein, 522 aa, Physcomitrella patens subsp. patens
MHKLSLVWQVFYENFDEDFEGRWVVSQNSDYGGTWKHAKSDGHDDYGLLVSEKAKKYGIAVDLPEKVDPKDGSLVLQYDLRLQNGLECGGAYLKFLQPQEAGWTANDFNNESPYSIMFGPDKCGATNKVHFIFRHKNPTTGKYVEHHLKNPPVPAGDKLSHVYTAIIYPNNTLRILIDGEEKKTADLLSEEFEPTVIPAKTIPDPEDKKPEDWDDRAKIPDPDATKPDDWDEDAPREIEDEEAEKPEGWLDDEPDEVDDPEAVKPEDWDDEEDGEWEPPKITNPKCEEGPGCGEWKRPLKANPAYKGKWRAPMIDNPAYQGIWAPRQIPNPEYFELEKLNLEAVAAIGIEIWTMQDGIFFDNILVAHDEAVAEEYRKTTWEPKHTVEKEKEAAEAKKSDDKADKTSEKVFEALNKIAEVPFLAKYKEQIDAVLDKAESNPNVTLGVLATIPVLLFTMLFSLCLGKKKSPPAVTTGAIKKEDLVTADDVSVPKGEQVEEAEQEQAGEIEKEGVSARRRPRRET

SEQ ID NO: 4413 - DNA, 1770 bp, Culex quinquefasciatus (southern house mosquito)
  CDS (1)..(1770)
atgctgatgtttacgctgttggcagcatttatggccacatccaccctcgtatgtggcacggaggaaccggaaccggaggttgtccaggacagcggcgatctgtcctacaaaagcccgtacgctgatccggccaagttctactttgcggatcactttgatgacaaagaccagtttgccgatcggtggatcaagtcccaggcgaagaaggacgacacggcggaagaaatcgccaaatacgacggagagtgggacgtggaactgcccaagcgaacgctcctcgccaacgattttggtctggtgctgaaatcgaaggcaaaacatgctgctatcgcttcccggctcagcaaaccgtttgtgttctccgataggactctggtggtgcagtacgaggtcaacctgcaagacggccaggaatgcggcggctcgtacatcaagctattgtcttcaggaaaggaaacgacagatctcaaacagttccgtgacatatctccttacacgatcatgttcggacccgacaagtgcggaaacgacgtaaagttgcactttattttccgccacgttaatccaatcaacggcactatcacggagaaacattgccgcaaagcaaaagaccgccttgacgatgccttcaaagacaaacagccccacctttaccagttggtcctacgccctgacaacacttacttgatccgtttcgatcacaagatcatcaatgaagggtcgttgtttaccgagtttacgccgcctgttaatcctccgaaggaaattgatgaccctgaggatgcaaagccaaccaactgggacgaaagggagaaaattccggaccccgacgcaaagaagcccgacgactggaacgaaaacgagccaccgcaaatcccggacccgagcgcttctaagccggaaggatggctcgatgacgtggaggagatgattccggacccgaatgcggagaagccagcggactgggatgtcgaaatggacggcgagtgggaggcaccgttgattgctaaccccgtgtgtgagaaggcggtcggttgtggcctgtggaaggctccgatgatctcgaaccccagctacaaaggcaaatggcgcgcaccgttgattgacaaccccaactatcagggcaagtgggcacccaggaaaattccgaatccagactttttcgaagataccaacccattcaaaatgaccacaattgctgcaattggtattgagctgtggtcaatgtccagtgatatattgttcgacaacctgatcattaccgacgacgaagatgccgcgcgggactgggctgcccagacgtttgacttaaagcgaaagcttattgatcgtgaggcggaaacgtttgtttcacgcgtcctgaagttcgccaacgagaacccgtggatgtgggccgttctcgtagtagttgtaggattaccgctcgcaatagtaatctatctcgcttgctccaagagcacaccgccaaccgctgcccgtacaaagaaaaccgatgagtttgtgcccgacgatgaccaggatcagcaggaatcttcccggacgaaatcgaatctcaactcgccgagtggcgaacaggaaggaggagctcaagcggaaaccgtggacggtggagatgatgaagaagagggggatgaagaggacgaagaaaacgaaccagaggacgaggaacccgacaccgtcattgagggaaaggaagcggatgagcttctgcaggacgaacccaaagaacccgagggtggcgtgaaaaagcgaaagcctagaagggagtag

SEQ ID NO: 4414 - protein, 589 aa, Culex quinquefasciatus (southern house mosquito)
MLMFTLLAAFMATSTLVCGTEEPEPEVVQDSGDLSYKSPYADPAKFYFADHFDDKDQFADRWIKSQAKKDDTAEEIAKYDGEWDVELPKRTLLANDFGLVLKSKAKHAAIASRLSKPFVFSDRTLVVQYEVNLQDGQECGGSYIKLLSSGKETTDLKQFRDISPYTIMFGPDKCGNDVKLHFIFRHVNPINGTITEKHCRKAKDRLDDAFKDKQPHLYQLVLRPDNTYLIRFDHKIINEGSLFTEFTPPVNPPKEIDDPEDAKPTNWDEREKIPDPDAKKPDDWNENEPPQIPDPSASKPEGWLDDVEEMIPDPNAEKPADWDVEMDGEWEAPLIANPVCEKAVGCGLWKAPMISNPSYKGKWRAPLIDNPNYQGKWAPRKIPNPDFFEDTNPFKMTTIAAIGIELWSMSSDILFDNLIITDDEDAARDWAAQTFDLKRKLIDREAETFVSRVLKFANENPWMWAVLVVVVGLPLAIVIYLACSKSTPPTAARTKKTDEFVPDDDQDQQESSRTKSNLNSPSGEQEGGAQAETVDGGDDEEEGDEEDEENEPEDEEPDTVIEGKEADELLQDEPKEPEGGVKKRKPRRE

SEQ ID NO: 4415 - DNA, 1686 bp, Acyrthosiphon pisum (pea aphid)
  CDS (1)..(1686)
atggccaaaattaaactactggcatgcatagcagtgctggtcgtgcatttggcattcggcgaagaacaagcgccgagtgatgtaagcgtagaatcggtgccttacaccagcccaactgcgagcaaagtaggcgtgtacctggccgaaaatttcgacaatccatcattattggacacaaaatggattaaatctaattccaagaagccagatgttgatgaggaactagctcaatatgatggtaaatggaatattgaagaattagaaagattcccgctgaaaggtgacagaggtctagttttagcatcagagagtcgtcatgcagctatttcatcaaaacttgataaaccattcaagtttgatggtggaaaaactctagttattcaatatgaagtagcttttcaaaagccacatacttgtggtggagcatatttaaagttgcttactgatggccctcatattaaggatttaactcagtttaatgataaaactccttattcgattatgtttggcccagataaatgtggaccaacttccaaagtgcattttataattaggcataaaaatcctagaaacaatacaattactgaaaaacactgtttaaaattaaaaactgaagaatctgtatttactgaccaccaacctcatttgtttaccttagttgttaaaccagacaactcatattcattctttttagaccaagaattgcaatatgaaggagatttactatcagaagatgattttaatccaccaattaacccaccaaaagaaatagttgataagaacgatgtaaaacctgaagattgggatgaaagaagtaagattcctgatgaaagtgctgttaaaccagatgattgggatgaaagcgaacctgaaagtattcccgatgaatcttcttctatgccagacgattggttggaagaagaacccactcacattcctgatacagcagcagttaaacccactgattgggataatgaaatggatggagaatgggaaccccctttaattaataatccaaaatgtgaagatcgttcaggttgtggaccttggtcaagaccattaatgaaaaatccaaagtacaaaggcaaatggaagcagccattaacagacaatccaaactatcgtggaaagtggactcctcggcttatacataatcctgattacttttatgataaaaatccacttaaatcttcacctattggtgctgttggttttgaattgtggtctatttcagacaaaatttattttgataatgtcgtaatagcagatgatgaggtacatgctgaaaaatggtcagaagtaacatggtcactgaaaaagaagaatgtatctcacgaatcggaaagtgtatttggagctgtaattagatataccaatgagaacccatggttgtgggctgtgtatgtagttgttattgcagtaactgttgtattaatagttataacctgctgcacatcaaaagaaaagacttctttaaatgaatcgagtaagaaaactgatgagcctgtacctgacgtagaagcagaagcatctgatgaagaacacgaagcagatataaaagaagatgaagaagttgatagtaaaagtgctgatgatgatgaagaaaatgttgatgtagaggctgatcaaactaatgaagatcaagtaccatcatctccaaggaagcgcagaacaagaaaagactga

SEQ ID NO: 4416 - protein, 561 aa, Acyrthosiphon pisum (pea aphid)
MAKIKLLACIAVLVVHLAFGEEQAPSDVSVESVPYTSPTASKVGVYLAENFDNPSLLDTKWIKSNSKKPDVDEELAQYDGKWNIEELERFPLKGDRGLVLASESRHAAISSKLDKPFKFDGGKTLVIQYEVAFQKPHTCGGAYLKLLTDGPHIKDLTQFNDKTPYSIMFGPDKCGPTSKVHFIIRHKNPRNNTITEKHCLKLKTEESVFTDHQPHLFTLVVKPDNSYSFFLDQELQYEGDLLSEDDFNPPINPPKEIVDKNDVKPEDWDERSKIPDESAVKPDDWDESEPESIPDESSSMPDDWLEEEPTHIPDTAAVKPTDWDNEMDGEWEPPLINNPKCEDRSGCGPWSRPLMKNPKYKGKWKQPLTDNPNYRGKWTPRLIHNPDYFYDKNPLKSSPIGAVGFELWSISDKIYFDNVVIADDEVHAEKWSEVTWSLKKKNVSHESESVFGAVIRYTNENPWLWAVYVVVIAVTVVLIVITCCTSKEKTSLNESSKKTDEPVPDVEAEASDEEHEADIKEDEEVDSKSADDDEENVDVEADQTNEDQVPSSPRKRRTRKD

SEQ ID NO: 4417 - DNA, 1959 bp, Drosophila ananassae
  CDS (1)..(1959)
atgccgtggaaaatgggccagggcgcaacgctggcgttgctagtggcctcctgtttgcttctgaatgccgccacgggggctattgccgccgatccgacagcggagtctgacgatttcgaggacggctatgtggaagatgtgccggaggaggaacccgccaccggtgactctgatgagaacttggtctacgaaagccctgtgatcgatcgcaagaagttccactttgctgatcattttgacgatgttgaagcttctaggaagaactgggtcctctcgcaggccaaaaaggacgacattgccgaggagatatcgaagtacgatggtatatggaactgggagtcgccgcagcgcatcgtttggccgaacgacctgggtctggtactcaagtcgaaggccaaacatgcggctatcgcctcccgtttgcgcgagcccttcgatttcaagcaagacaagccgctggtggtgcagtacgaggtcacgttgcaggagggtcaggagtgcggtggctcgtatctgaagcttctgtccgccgggaaggagacggatgaactcacaaccttcaatgacaaaacaccctacaccatcatgtttggaccggacaagtgcgggagcgatgtaaaaatgcactttatattccggcacgtcaatccaattaatggcaccatcactgagaaacactgcaataaaccgaagaaccgcttggaggagccgttcaaggacaagctgccgcatctctaccagctggtggtgcgccccgacaacagcttcgagattcgcgtggaccacaaaatcatcaacgagggctcgctgctgaccgacttcaagccgccagttaatccgccggccgagatcgatgaccctaatgatcagaagccagaagcctgggacgaacgcgagaagatccaggatccagcggctcagaagcctgacgattgggatgaggatgctccgccacaaatacccgaccccagtgctgtcaagccaaagacttggctggaaaatgaggctgaaatgatctatgatcccacggccgtgaagcccgacgattgggattccgaaatcgatggtgattgggaggctccgctggtggacaatccgttgtgtgaaaaggccggtggctgtggaaagtggaaggctcctcttattcccaatcccaactacaagggcaagtggcgtccaccgatgattgagaaccccaactatcagggcaagtgggcaccccgtaagattcccaacccggacttctttgaagatctgaaacctttccaaatgacacccattagcgctgtgggcctagaactgtggtctatgtccagtgatattctctttgacaatcttattattacggacgatgtggatgtggcccgtgaattcgccgccaacagcttcgacatcaagcgtcgctatatcgaccgcgaatcgaaaacgttctggcatcgtctgatgcgccgcatgaactacaagcccggatggtgggccctgtacttcttgtacctgctcattccggccagttgctatgtcttctatctgtaccgtcgcgccaaagaggactcattcgtgaataaggtagtcgagctagccaaggcctacccctcggtctggggcattggcctggtggccattgtggcattggttgtcatcggcatctactgtagatttggtaaagctaagagtcaggactcggctgccaagcgcgccgccgccgaagctaagaaatctgatgaaccccagccggatgatgaacccaagccagactcagaggaggagagcgatctctccggcgagagggctgctggggattcaagcaaggagagcactccactgtccgctagtcccaagaacaaaaagtctgatttagatgttagcgaggagaccaagacggaggaaacttcagaggagcccgcacagactgaggaaactaccacaaaaacacggaagcgtacagttcgcaaggattaa

SEQ ID NO: 4418 - protein, 652 aa, Drosophila ananassae
MPWKMGQGATLALLVASCLLLNAATGAIAADPTAESDDFEDGYVEDVPEEEPATGDSDENLVYESPVIDRKKFHFADHFDDVEASRKNWVLSQAKKDDIAEEISKYDGIWNWESPQRIVWPNDLGLVLKSKAKHAAIASRLREPFDFKQDKPLVVQYEVTLQEGQECGGSYLKLLSAGKETDELTTFNDKTPYTIMFGPDKCGSDVKMHFIFRHVNPINGTITEKHCNKPKNRLEEPFKDKLPHLYQLVVRPDNSFEIRVDHKIINEGSLLTDFKPPVNPPAEIDDPNDQKPEAWDEREKIQDPAAQKPDDWDEDAPPQIPDPSAVKPKTWLENEAEMIYDPTAVKPDDWDSEIDGDWEAPLVDNPLCEKAGGCGKWKAPLIPNPNYKGKWRPPMIENPNYQGKWAPRKIPNPDFFEDLKPFQMTPISAVGLELWSMSSDILFDNLIITDDVDVAREFAANSFDIKRRYIDRESKTFWHRLMRRMNYKPGWWALYFLYLLIPASCYVFYLYRRAKEDSFVNKVVELAKAYPSVWGIGLVAIVALVVIGIYCRFGKAKSQDSAAKRAAAEAKKSDEPQPDDEPKPDSEEESDLSGERAAGDSSKESTPLSASPKNKKSDLDVSEETKTEETSEEPAQTEETTTKTRKRTVRKD

SEQ ID NO: 4419 - DNA, 1956 bp, Drosophila erecta
  CDS (1)..(1956)
atggcgtggaaaatgggaggaaaccgggccgcaacgctggcgttgctcttggccagcagtttgctgctgctgagtgcggccaaagccgccgatttgggcccggattcggagtcggacgacttcgaggacggctatgtggaagatgtgcaggaggagcccaccgccgtcgacgtcgatgagaagttggcctacgagagcccggtgatcgatgccaagaagttccacttcgcggaccacttcgacgacgtggaggagtccaggaagaagtgggtgctgtcgcaggccaagaaggacgacatcgccgaggagatctccaagtacgatggcatctggaactgggagtcgccgcagcgcatcgtttgggcgaacgacctgggtctagtgctcaagtcgaaggccaagcatgcggccatagcagcccccctccgccggccgttcgagttcaagtcggacaagccgctggtggtgcagtacgaggtcacgttgcaggagggtcaggagtgcggcggctcgtatctgaagcttttgtcagccggaaaagacacggagcaactaaaaagcttcaatgacaagacaccctataccatcatgtttggaccggacaagtgcggcaacgatgtgaaaatgcacttcatattccggcacgtcaatccaattaatggcaccatcaccgagaagcactgcaacaagccgaagaaccgtttggaagagccattcaaggacaagctaccccatctctaccagctggtggtccgtcccgataacagctttgagattcgcgttgaccacaagatcatcaacgagggttccctgctgaccgacttcaagccaccagtcaacccgccggcagagatcaacgaccccaatgaccacaagccagagtcgtgggatgagcgggagaagatcccagaccccactgcccacaagcccgaggattgggacgaggatgctccaccacagttgcccgataccgatgccgtcatgcccaatggctggcttgaggatgagcccgacatgattttcgatccgactgccaccaaacctgaagattgggatgccgaaatcgatggcgaatgggaggctccattggtggacaatccagtctgcgagaaggcacccggctgtggcaagtggaaggctccgctcatccccaatcccaactacaagggcaagtggcgtgcaccaatgatcgataaccccaactaccagggcaagtgggcccccaggaagattgtcaatccaaacttctttgaggatctgaagcccttccaaatgacgccaatcagcgccgtgggtctggagctgtggtccatgtcaagcgacattctcttcgacaatctgatcatcacggacgatgtggatgtcgcccgtgactttgctgccaacagcttcgatatcaagcgtcgctacattgaccgtgaatcgaaaaccttctggcaccgcctgatgcgccgcatgaactacaagcccggctggtgggccctgtacttcctgtacctgctcattccggccagttgctacgtcttctatctgtaccgacgcgccaaggaggactcattcgtgaataaggtagtcgagctagccaatgccaatcccgcgatctggggcgttggcctggtggccattgtggcgctggttgcgcttaccatctactgtagatttggtaccgctaagagtcaggactctgctgccaagaaggccgctgccgaggccaagaagaccgacgatcctcagcccgacgatgagcccgaggccgaggaggaggaggagagcgacgaaagggccgctggcgattccagcaaggagagcacaccgctgtccgctagtcccaagaagaaccaaaagtctgatttagatgataacgaagaggagaccaaggcggcggagaatcaagagcccgcacagactgaggaatccaacacaaaaacacgcaagcgtcaggcgcgcaaggagtaa

SEQ ID NO: 4420 - protein, 651 aa, Drosophila erecta
MAWKMGGNRAATLALLLASSLLLLSAAKAADLGPDSESDDFEDGYVEDVQEEPTAVDVDEKLAYESPVIDAKKFHFADHFDDVEESRKKWVLSQAKKDDIAEEISKYDGIWNWESPQRIVWANDLGLVLKSKAKHAAIAAPLRRPFEFKSDKPLVVQYEVTLQEGQECGGSYLKLLSAGKDTEQLKSFNDKTPYTIMFGPDKCGNDVKMHFIFRHVNPINGTITEKHCNKPKNRLEEPFKDKLPHLYQLVVRPDNSFEIRVDHKIINEGSLLTDFKPPVNPPAEINDPNDHKPESWDEREKIPDPTAHKPEDWDEDAPPQLPDTDAVMPNGWLEDEPDMIFDPTATKPEDWDAEIDGEWEAPLVDNPVCEKAPGCGKWKAPLIPNPNYKGKWRAPMIDNPNYQGKWAPRKIVNPNFFEDLKPFQMTPISAVGLELWSMSSDILFDNLIITDDVDVARDFAANSFDIKRRYIDRESKTFWHRLMRRMNYKPGWWALYFLYLLIPASCYVFYLYRRAKEDSFVNKVVELANANPAIWGVGLVAIVALVALTIYCRFGTAKSQDSAAKKAAAEAKKTDDPQPDDEPEAEEEEESDERAAGDSSKESTPLSASPKKNQKSDLDDNEEETKAAENQEPAQTEESNTKTRKRQARKE

SEQ ID NO: 4421 - DNA, 1797 bp, Drosophila grimshawi
  CDS (1)..(1797)
atgcagcaaaaatttagccggggccgcgcagcgctggcgctgctgatggcttgctgctgtctgctttctgctgctgccgaaatcgacgactttgacgacgacggactcgtcgaagatgtgcaggaggaacctgttgacgtagccggcgaggagctgaactatgagagtcccatcatcgagcccagaaaattccactttgccgatcattttgacgatattgaagcatcacgaaaattgtgggtcaaatcgcaggccaaaaaggatgatatttcggaggagattgccaaatacgatggcatctggaactgggaatccccgctgcgcattgtgtggcccaaggataagggtctggtgctaaagtccaaggcaaaacatgctgcaatctcggcgcgcctaaccaaaaagtttgacttcaagccggagaaaccactcgtggttcaatatgaggtcacaatgcaggagggacaagagtgcggcggttcctatctaaagctactgtccgcaggcaaggaaaccgaagatctgacaacgttcaatgacaagacaccgtacacgattatgtttggaccggacaagtgcggcaacgatgtgaaaatgcacttcatattccgccacgtaaatccaattaacggcaccataaccgagaaacactgtaacaaaccaaagaaccgcttggaggagcccttcaaggacaagctgccacatttgtatcagcttgtgctgcgaccggacaacagctttgagattcgtttggatcacaagatcattaatgagggctcgctgctgacggactttaagcccgctgtcaatccaccggccgagatcgatgatccctcagatcagaagccatccgattgggatgaacgcgaaaagatacccgatccaacatcccaaaagcccgatgactggaacgaggatgcaccgccccaaatacccgatgccagcgctgttatgcccgatggttggctcgaggatgaacccgatatgattgccgatcccacagcgtccaagcccgacgattgggataccgaaatcgatggtgaatgggaggcgcctctcgtcgataacccggtgtgcgaaaagtctgccggttgcggcaaatggaaggcaccactcatacccaatcccgaatacaagggcaaatggcgtgcagccatgatcgagaatcccaactaccagggcaagtgggcaccgcgcaagatagccaatcccgatttctttgaggatctgcaacccttcaaaatgacgccaattagcgctgttggcctggagttgtggtccatgtccaatgagatcttatttgacaatctcatcgttacggacgatgtggaggtggcacgtgactttgccgccaacagctttgacatcaagcgtcgctatattgatcgcgaatcggactcattggtcaacaaggtcactgagctagccaaggcatatccaacggcctcgctcctgggcctggtcgcctttcttatgttgtctgtcaccggcatttatcttaaatttggcaaagctaagagtcaggattcggcggcaacagctgctgctgcacaggcaaagaaaacggatgccccgcagcccgatgatgaggaagagctcgctgctgctgctgctgttgatgatgaggagcaggatgagagcgaggaggatacctcagagtctgccagtcccaaaaataatacaaagtctgatttagatattaaagaggaattgcagcagcagaatgatgatgagcctacacagactgaggaatcaactacaaaatccgctcgcaagcgtaccgtgcgcaaggactag

SEQ ID NO: 4422 - protein, 598 aa, Drosophila grimshawi
MQQKFSRGRAALALLMACCCLLSAAAEIDDFDDDGLVEDVQEEPVDVAGEELNYESPIIEPRKFHFADHFDDIEASRKLWVKSQAKKDDISEEIAKYDGIWNWESPLRIVWPKDKGLVLKSKAKHAAISARLTKKFDFKPEKPLVVQYEVTMQEGQECGGSYLKLLSAGKETEDLTTFNDKTPYTIMFGPDKCGNDVKMHFIFRHVNPINGTITEKHCNKPKNRLEEPFKDKLPHLYQLVLRPDNSFEIRLDHKIINEGSLLTDFKPAVNPPAEIDDPSDQKPSDWDEREKIPDPTSQKPDDWNEDAPPQIPDASAVMPDGWLEDEPDMIADPTASKPDDWDTEIDGEWEAPLVDNPVCEKSAGCGKWKAPLIPNPEYKGKWRAAMIENPNYQGKWAPRKIANPDFFEDLQPFKMTPISAVGLELWSMSNEILFDNLIVTDDVEVARDFAANSFDIKRRYIDRESDSLVNKVTELAKAYPTASLLGLVAFLMLSVTGIYLKFGKAKSQDSAATAAAAQAKKTDAPQPDDEEELAAAAAVDDEEQDESEEDTSESASPKNNTKSDLDIKEELQQQNDDEPTQTEESTTKSARKRTVRKD

SEQ ID NO: 4423 - DNA, 1845 bp, Drosophila mojavensis
  CDS (1)..(1845)
atgcagcagctaaattttagccggggccgccgtgcaacgcgggcgttgctgctgatagccgccgcattctgtctactgtccgttgcctcatcagccggcgccgctgagcctgagatcgatgacttcgatgatgacggactagtggaagatgttcaggaggagcaaatcaatgtccccggcgaggagctggtctatgagagtccagtgatcgaacccaaaaaatttcattttgctgatcatttcgatgatgttgacgcctcacgcaaacgctgggtcaaatcacaggctaagaaagacgatattgccgaggaaatagccaaatacgatggcatctggaactgggagtcgcctctgcgcattgtttggcccaaggataagggcctggtgctcaagtcaaaggccaagcacgcagccatttcggcgccacttaacaaaccgttcgacttcaaatcgaacaaaccgctggtggtgcaatatgaggtcacaatgcaggagggtcaagagtgtggtggctcgtacataaaattgctgtcgtcagggaaggaaaccgaagatcttaccatgttcaatgacaaaacaccctacaccatcatgtttggaccggacaagtgtggaaacgatgtgaaaatgcacttcatattccgtcacgtaaatccaattaacggcaccataaccgagaagcactgtaacaaaccaaagaaccgtttggaggagccctttaaggacaagctgccacatttgtaccagctggttgtgcgaccggacaacacctttgagatacgcgttgatcacaagatcattaacgagggctctcttctcaccgatttcaagccgccagtgaatccgcctgcagagatcgacgatcccactgaccagaagccagctgattgggatgagcgcgaaaaaatacccgatccaacggcacaaaagcccgatgattggaatgacgatgcattgccacagatacccgataccagcgccaccaagccgaatggctggttggatgatgagcccgatatgatacccgatccaactgccactaagcccgatgactgggacacggaaatcgatggcgaatgggaggcaccgcttgtggataatcctgcttgtgaaaaggcaccgggttgcggtaaatggaagccaccactgattccaaacccagaatacaagggcaaatggcgcgcacccatgatcgagaatcccaactaccagggcaaatgggcgccacgcaagatacccaatccagatttcttcgaggatcttatgccgttcaaaatgacgcctattagcgctgttggcctggagttgtggtcgatgtccaatgaaatactgtttgataatcttatcataacggacgacgtggatgtggctcgtgagtttgccgccagtagctttgacatcaagcgtcgctacattgatcgggaatcggactcattggtcaacaaggtagttgagctaaccaaggcctatcccacggcctgggctattggcctggtcgtattcatctcagtgattgtcattggcatctactgtagatttggcaaagctaagagtcaggattcggcggccaatgctgctgctgctcaggctaaaaagacggatgagccgcagcccgacgatgagcaggatggcgctgctgatgggaacgagagcgaagaggacgctgatgcggcaccagcgctggcgactggtggcagcaagacagacatttctgccagtcccaaaaagattcaaaagtctgatttagataataaagagcagctcaaccagaaagatgaggagcccacacagactgaggaaaacaccacgaaatctacgcgcaagcgtaccgtgcgcaaggattag

SEQ ID NO: 4424 - protein, 614 aa, Drosophila mojavensis
MQQLNFSRGRRATRALLLIAAAFCLLSVASSAGAAEPEIDDFDDDGLVEDVQEEQINVPGEELVYESPVIEPKKFHFADHFDDVDASRKRWVKSQAKKDDIAEEIAKYDGIWNWESPLRIVWPKDKGLVLKSKAKHAAISAPLNKPFDFKSNKPLVVQYEVTMQEGQECGGSYIKLLSSGKETEDLTMFNDKTPYTIMFGPDKCGNDVKMHFIFRHVNPINGTITEKHCNKPKNRLEEPFKDKLPHLYQLVVRPDNTFEIRVDHKIINEGSLLTDFKPPVNPPAEIDDPTDQKPADWDEREKIPDPTAQKPDDWNDDALPQIPDTSATKPNGWLDDEPDMIPDPTATKPDDWDTEIDGEWEAPLVDNPACEKAPGCGKWKPPLIPNPEYKGKWRAPMIENPNYQGKWAPRKIPNPDFFEDLMPFKMTPISAVGLELWSMSNEILFDNLIITDDVDVAREFAASSFDIKRRYIDRESDSLVNKVVELTKAYPTAWAIGLVVFISVIVIGIYCRFGKAKSQDSAANAAAAQAKKTDEPQPDDEQDGAADGNESEEDADAAPALATGGSKTDISASPKKIQKSDLDNKEQLNQKDEEPTQTEENTTKSTRKRTVRKD

SEQ ID NO: 4425 - DNA, 1950 bp, Drosophila persimilis
  CDS (1)..(1950)
atgcagtggaagttcggggggagcagcgcagcgctggcgttgctgctggcctgcagcttactgctgtccgtgacagccgatgcggagttcggtgtcgatgccgacgattttgaggatggccaagtcgaagatgttcaggaggagacggtcggcgctgatgaggagctggtctacgagagccctgtgatcgagcccaagaagttccactttgccgaccatttcgatgatgttgaggagtcgcgcaagctgtgggtcaactcgcaggccaagaaggacgacattgccgaagagatctccaagtacgatggcatctggagctgggagtcaccgcagcggatcgtctgggcgaaggataagggactggtgctcaaatcgaaggcaaagcatgctgccatctcggcacgcctccgcaagcagttcgatttcaaggcagaaaaaccactggtggtgcaatatgaggtcacactgcaggagggtcaagattgcggcggctcgtacatcaagctgctgtccgctggcaaggaaaccgacaatcttaagtcgttcaatgacaagacaccctacaccatcatgttcgggccggacaagtgcgggaacgatgtgaaattgcatttcatattccgtcacgttaatccaattaacggcaccatcaccgagaagcattgcaacaaaccaaagaaccggctggacgatctctttaaggataagctcccacatttgtatcagcttgtggtccatcccgacaacagcttcgagattcgagtggatcacaaaatcgtcaatgagggctccctactgacagactttaagccgcccgtaaatccgccagcacagatcgatgacccgaatgaccacaagccagagtcgtgggatgagcgcgagaagataccagatcccacagcatcgaagcccagtgattgggatgaggatgcaccgccccagctgcccgatccggatgctgttatgcccgagggctggctggaggatgagcccgacatgatattcgatcccacggccagcaagcccgaggattgggatgccgaaatcgatggcgaatgggaggcaccgctggtggataaccccgtctgtgagaaaaccgttggctgtggcaagtggaaggctccgctgatccccaatcccaactacaagggcaagtggcgtgcaccgagcattgacaatcccaactatcagggcaagtggtctcctcgcaagattgccaatcccgatttctttgaagatctaaagccgttccgcatgacaccgattagtgctgtgggtctggagctctggtccatgtctagcgacattctcttcgacaatcttatcgtcaccgatgatgtggcggtggcccgtgattttgctgccaatagttttgatgtcaagcgtcgctatattgatcgtgaatcgaaaaccctgtggcatcgcctgatgcgccgcatgaactacaagcctggatggtgggccctgtacttcctgtaccttctcattccggccagttgttatatcttctatctgtaccgtcgcgccaaagaggactcattcgtgaataaggtagtcgagctagccaaggccaatcccgtggtcgcgggcattgccctggtggtctttgtcgtgctattcgttttccttaccatttggtgtagatttggtgccgctaagaaagaggacgctgccaaacgcgctgccgctcaggcaaagaaaaccgatgaaccacaacccgatgaggcacccgaagaggaggaggaaagcgatccatcgtctgagagagctgctggcgattccagtaaggaaagcacgccgctgtccgctagtcccaagaagaatacaaagtctgatttagaggataatgttgagaccaagccggaggagccggagggttctgatgagcccgcacagactgagcaacctaccacaaaaactacacgtaagcgcgcagtgcgcaaggagtaa

SEQ ID NO: 4426 - protein, 649 aa, Drosophila persimilis
MQWKFGGSSAALALLLACSLLLSVTADAEFGVDADDFEDGQVEDVQEETVGADEELVYESPVIEPKKFHFADHFDDVEESRKLWVNSQAKKDDIAEEISKYDGIWSWESPQRIVWAKDKGLVLKSKAKHAAISARLRKQFDFKAEKPLVVQYEVTLQEGQDCGGSYIKLLSAGKETDNLKSFNDKTPYTIMFGPDKCGNDVKLHFIFRHVNPINGTITEKHCNKPKNRLDDLFKDKLPHLYQLVVHPDNSFEIRVDHKIVNEGSLLTDFKPPVNPPAQIDDPNDHKPESWDEREKIPDPTASKPSDWDEDAPPQLPDPDAVMPEGWLEDEPDMIFDPTASKPEDWDAEIDGEWEAPLVDNPVCEKTVGCGKWKAPLIPNPNYKGKWRAPSIDNPNYQGKWSPRKIANPDFFEDLKPFRMTPISAVGLELWSMSSDILFDNLIVTDDVAVARDFAANSFDVKRRYIDRESKTLWHRLMRRMNYKPGWWALYFLYLLIPASCYIFYLYRRAKEDSFVNKVVELAKANPVVAGIALVVFVVLFVFLTIWCRFGAAKKEDAAKRAAAQAKKTDEPQPDEAPEEEEESDPSSERAAGDSSKESTPLSASPKKNTKSDLEDNVETKPEEPEGSDEPAQTEQPTTKTTRKRAVRKE

SEQ ID NO: 4427 - DNA, 1938 bp, Drosophila sechellia
  CDS (1)..(1938)
atggtgtggaaaatgctcttcgccagtttgctgctgctgggtgcgctcaaagccgccgatttggccccggagtcggagggttctgtgaaggatggacagcaggagcccgccgccaacggtggcgatgagaagctggcctacaagagcccggtgatcgatgacgagaagttttacttcgcggataactttgacgacgtgcagacatccaggaagaagtgggtgctatcgcaggcgaagagggacgacatcgccgaggagatagccaagtacgatggcatctggaactgggagtcgccgcagcgcatcttttgggcaaacgatctgggtctggtgctcaagtcgaaggccaagcatgcggccatagccgccccctttcgccagccgttcgatttcaagtcgggcaagccgctggtggtgcagtacgagattacgtggcaggagggtcagaactgcggcggctcgtatctgaagcttttttccgccggaaaagacacggagcaactaaatgccttcaatgacaagacaccctataccatcctattcggaccggtcaagatcggcaatgatgtggaaatgcacttcatattccgttacgtcaatccaattaatggcaccatcaccgaaaagcactgcaataacccaatagacagtttggaagggtcattcatggacaagctaccccatctctaccagctggtggtccgtcccgataacagctttgagattcgcattgaccacaagatcatcaacgagggttccctgctgaccgacttcaagccaccagtcaacccgacggcggagatagatgaccccaacaacctcaagccagaatcgtgggatgagcgagagaagatcccagaccctactgcccacaagcccgaggattgggacgaggatgctccaccacagctgcccgataccgaggccgtcatgccaaacggctggctagaggatgagcccgatttgattttcgatccaactgccatcaaaccagaagattggaataacgaaatcgatggcgagtgggaggctcctctggtggagaacccagtgtgcaagaacgctcccggctgtggcaagtggaagactccgctcatccccaatcccaaatacaagggcaagtggcgtgcaccaatgatcaagaatcccaactaccagggcaagtgggcccccaggaagatagccaatccagacttctttgaggatctgaagcccttccaaatgacgccaatcagcgctgtgggtctggagctgtggtccatgtccagcgatattctcttcgacaacctgatcatcacggacgacgtgcagttggcccttgactttgccgccaacagcttcgacatcaagcgtctctacatcgatcgtgaattaaactcaatcggggataaggtagtcgagatagctagggcccatcccgtgatttggggcattgccatgggtgccattgcggtgccggttgcctttaccatcatctctaaattttgtttaggtccgagtaaggtcgcggctgccaaaaaggctgctgccgaggccaagaagacagacgatcctcagtccgatgatgagctcgcggccgtggaggatgaaaagttggagaagggcgagaaggaggagaaaaagttggagaagggcgagaaggaggaggaaaaggaggaggaggaggagaagaaagaggagaaggagcaggagaaggaggtaaagaaggaggaggagaaggatgacaaggaggaggagaaggagaagaaggattacaaggagggggagaaggaagagaaggaggacgaggaggaggagaagaaggatgacaaggagggggagaaggatgacgaggaggaggagaaggacgaggaagaggagtgcgacgaaagggccgctggcgataccatcaaggaaagcacaccgctgtccgctagtcacaagaaaaattatttttaa

SEQ ID NO: 4428 - protein, 645 aa, Drosophila sechellia
MVWKMLFASLLLLGALKAADLAPESEGSVKDGQQEPAANGGDEKLAYKSPVIDDEKFYFADNFDDVQTSRKKWVLSQAKRDDIAEEIAKYDGIWNWESPQRIFWANDLGLVLKSKAKHAAIAAPFRQPFDFKSGKPLVVQYEITWQEGQNCGGSYLKLFSAGKDTEQLNAFNDKTPYTILFGPVKIGNDVEMHFIFRYVNPINGTITEKHCNNPIDSLEGSFMDKLPHLYQLVVRPDNSFEIRIDHKIINEGSLLTDFKPPVNPTAEIDDPNNLKPESWDEREKIPDPTAHKPEDWDEDAPPQLPDTEAVMPNGWLEDEPDLIFDPTAIKPEDWNNEIDGEWEAPLVENPVCKNAPGCGKWKTPLIPNPKYKGKWRAPMIKNPNYQGKWAPRKIANPDFFEDLKPFQMTPISAVGLELWSMSSDILFDNLIITDDVQLALDFAANSFDIKRLYIDRELNSIGDKVVEIARAHPVIWGIAMGAIAVPVAFTIISKFCLGPSKVAAAKKAAAEAKKTDDPQSDDELAAVEDEKLEKGEKEEKKLEKGEKEEEKEEEEEKKEEKEQEKEVKKEEEKDDKEEEKEKKDYKEGEKEEKEDEEEEKKDDKEGEKDDEEEEKDEEEECDERAAGDTIKESTPLSASHKKNYF

SEQ ID NO: 4429 - DNA, 1674 bp, Drosophila sechellia
  CDS (1)..(1674)
atggcctggaaaattggaggtaatcgggccgcaacgctgtcaatgctcctcgccagcagtttgctgttgctgagtgcggtcaaagtcaccgattcgagcccggaatatgacgactttgaggatgatgagatgctggcctatgagagcccggtgatcgatgcaaagaagttccatttcgcggaccacttcgacgacgtggaggcgtccaggaagaggtgggtgctttcggaggccaagaatgacgacatcgccgaggagatctccaagtacgatgacatctggaactgggagccgccgcagcgcatggtttgggcaaacgatctgggtctggtgcttaagtcgaaggtcaaacatgcagccatagccgccccccttcaaaagccgttcgagttcaaatcgaagaagccgctggtggtgcaatacgaggtcacggtgcagaagggtcaggagtgcgtcggttcgtatctgaagcttttgtccatcggaaatgacacggagcaagtaaaagggtttaatgacaagacaccctataccatcatgtttggaccggacaagtgcggcaaggatgtgaagatgcacttcatattccagcacctcaatggcaccatcaccgaaaagcactgcaacaaaccaaataacagtttggaagagctattcaaggacaatctaccccatctctaccagctggtggtccgtccagataacagctttgaaattcgcgttgaccacaagatcatcaaagagggttccctgctgaccgatttcaagccaccagttaacccgccggcggagatcgacgaccccaatgaccataagccagattcgtgggatgagcgagagaagatcccggaccacaatgtccacaagcccgaggattgggacgagaatgccaccatacagctgcccgatgccgagatgattttcgatccaactgccaccaaacccgaagattgggataccgaaatcgatggcgagtggaaggctccattggtagggaacccagtgtgcaagaaggcccaaagctgtggcaccatccgcaatcccaactacaagggcaagtggattgcaccaatgatcgataacccaaactaccaaggcaagtggaccccccggaagatagccaatccagacttctttgtggatctcaagccctttcaaatgacgccaatcagcgccgtgggtctggagctgtggtccatgtccagcgatattctcttcgacaacctgatcatcacagacgacgtggaggtggcccgtgactttgcggccaacagcttcgacatcaagcgtcgctacatcgatcttgaatggaactcaattgtgaataaggtagtcgagctagtgaaggccaatccctcgagcccggccattggcctgctggccattgtggcgctggttgccctcaccatctggtgtggatctggtaccgctaaggttcaggactcggatgccaaaaaggctgatgccgaggccaagaagaccgacgaccatcagcccgattatgtgccgattccgttgggaaggaggatgagcagagccccgaaaaggatgctggcgataccaccaagaagagcatacagctgtccgctaccccacaagaagaaccaaaagtcgaaggcggcgaagaaccaaagctctttcttagatgataacgtatgggcacacacagactga

SEQ ID NO: 4430 - protein, 557 aa, Drosophila sechellia
MAWKIGGNRAATLSMLLASSLLLLSAVKVTDSSPEYDDFEDDEMLAYESPVIDAKKFHFADHFDDVEASRKRWVLSEAKNDDIAEEISKYDDIWNWEPPQRMVWANDLGLVLKSKVKHAAIAAPLQKPFEFKSKKPLVVQYEVTVQKGQECVGSYLKLLSIGNDTEQVKGFNDKTPYTIMFGPDKCGKDVKMHFIFQHLNGTITEKHCNKPNNSLEELFKDNLPHLYQLVVRPDNSFEIRVDHKIIKEGSLLTDFKPPVNPPAEIDDPNDHKPDSWDEREKIPDHNVHKPEDWDENATIQLPDAEMIFDPTATKPEDWDTEIDGEWKAPLVGNPVCKKAQSCGTIRNPNYKGKWIAPMIDNPNYQGKWTPRKIANPDFFVDLKPFQMTPISAVGLELWSMSSDILFDNLIITDDVEVARDFAANSFDIKRRYIDLEWNSIVNKVVELVKANPSSPAIGLLAIVALVALTIWCGSGTAKVQDSDAKKADAEAKKTDDHQPDYVPIPLGRRMSRAPKRMLAIPPRRAYSCPLPHKKNQKSKAAKNQSSFLDDNVWAHTD

SEQ ID NO: 4431 - DNA, 1989 bp, Drosophila virilis
  CDS (1)..(1989)
atgcagcagctaaatattagccggggccgccgagcagcgcgggcgttgctgttgctgatggccgccagctgcctggcggctgctgccacagcagccggcgctgctgaggcggacatcgacgactttgatgacgacgggatcgttgaagatgtgcaggaggagcccgttgacaatcttggcgaggagctggtctacgagagtcccgtaattgagccgaaaaagtttcactttgccgatcatttcgatgatgttgaggcctcgcgcaaacaatggatcaaatcgcaggccaaaaaggacgatatagccgaggagatagccaaatacgatggcatctggaattgggagccaccgttgcgcattgtttggcccaaggataagggtctggtgctcaaatcgaaggccaaacacgcggccatttcggcgcgcctcagcaaacagttcgatttcaaagcgaacaagccgctggtggtgcaatatgaggtcacaatgcaggagggtcaagagtgcggcggctcgtacctaaagctgctgtcgtcgggcaaggaaaccgaagatctcacaacgttcaatgacaaaacaccctacaccatcatgtttggaccggacaagtgcggcaacgatgtgaaaatgcacttcatattccgtcatgtaaatccaattaacggcaccataaccgagaagcactgtaacaaaccaaagaatcgcttggaggagcccttcaaggacaagctgccccatttatatcagctggtggtgcgaccggacaacagctttgagatacgtctcgatcacaagatcatcaatgagggctcgctgctgacggactttaagccgccagtcaatccgcccgctgagattgatgatcccaccgaccagaagccaaccgattgggatgagcgcgagaaaataccggatccgtcagcacaaaagcccgacgattggaatgatgatgcaccgccacagatacccgatgccagcgccagcaagcctgatggctggctggaggatgagcccgatatgatacccgatccaacagccaccaagcccgacgattgggataccgaaatcgatggcgaatgggaggcaccacttgtcgacaatccgttgtgtgaaaaggcgccaggctgcggcaaatggaaggcaccgctcatagccaatcccgagtacaagggcaagtggcgtgcacccatgatcgagaatcccaattaccagggcaaatggacgccacgcaagatacccaatccccatttctttgaggatctcatgccattcaaaatgacgcccattagcgctgttggcctggaactgtggtccatgtccaatgaaatactcttcgataatctcatcattacggacgatgtgaatgtggcgcgcgactttgccgccaatagctttgatatcaaacgtcgctatattgatcgcgaatcgaaaactctgtggcatcgtctgatgcggcacatgaactacaagcccggctggtgggcattatattttctctatctgctgatacccgccagctgttatatcttctatttgtatcgacgctccaaagaggactcattggtcaacaaggtgcttgagctagccaaggcttatcccacggcctggggtattggcctggtcatattcatagcattgactgtaatcggcatctattgtagatttggcaaagctaagagtcaggactcggctgccacagctgctgctgcacaagccaaaaaaacggatgaagcacagcccgatgatgagccagagccggctgctgatgagaacgagagcggtgaggaagtggtagacgcgactgcggcaccagcgcaggcggctggtgatgccaacaagacagacaactcaaagtctgccagtcccaagaagaataaaaagtctgaattagatattaaagagcagctgaagcagcaggatgaggagcccacacagactgaggaatccaccacgaaatctgctcgcaagcgcaatgtgcgcaaggattag

SEQ ID NO: 4432 - protein, 662 aa, Drosophila virilis
MQQLNISRGRRAARALLLLMAASCLAAAATAAGAAEADIDDFDDDGIVEDVQEEPVDNLGEELVYESPVIEPKKFHFADHFDDVEASRKQWIKSQAKKDDIAEEIAKYDGIWNWEPPLRIVWPKDKGLVLKSKAKHAAISARLSKQFDFKANKPLVVQYEVTMQEGQECGGSYLKLLSSGKETEDLTTFNDKTPYTIMFGPDKCGNDVKMHFIFRHVNPINGTITEKHCNKPKNRLEEPFKDKLPHLYQLVVRPDNSFEIRLDHKIINEGSLLTDFKPPVNPPAEIDDPTDQKPTDWDEREKIPDPSAQKPDDWNDDAPPQIPDASASKPDGWLEDEPDMIPDPTATKPDDWDTEIDGEWEAPLVDNPLCEKAPGCGKWKAPLIANPEYKGKWRAPMIENPNYQGKWTPRKIPNPHFFEDLMPFKMTPISAVGLELWSMSNEILFDNLIITDDVNVARDFAANSFDIKRRYIDRESKTLWHRLMRHMNYKPGWWALYFLYLLIPASCYIFYLYRRSKEDSLVNKVLELAKAYPTAWGIGLVIFIALTVIGIYCRFGKAKSQDSAATAAAAQAKKTDEAQPDDEPEPAADENESGEEVVDATAAPAQAAGDANKTDNSKSASPKKNKKSELDIKEQLKQQDEEPTQTEESTTKSARKRNVRKD

SEQ ID NO: 4433 - DNA, 1941 bp, Drosophila willistoni
  CDS (1)..(1941)
atgaaggcgaaactaggccgggcgctcatttttggggcctgttttagctgcattctcctgatgacggtcgccggtgccgaagtggaagccgatgattttgaagatggctttgtggaggatgttcaggatgaatctcccaacgtggccgctggcgatgaggaaattgtctacgaaagtccaccaattgaaccaaagaaattccattttgctgaccattttgataatgtcgaagaatctcgtaaactttggactctgtcgcaggcgaaaaaagatgatatagccgaggagatatccaaatatgatggcatttggaattgggagtcgccacagcgtattgtgtgggccaaggataagggtttggtattgaaatcaaaggccaaacatgctgccatttcggcacgtctgagcaaacagtttgatttcaagaaagacaaacctctggtcgttcaatatgaggtcacgttgcaggagggtcaagagtgcggtggttcctatttgaagcttttgtcggccggcaaagaaacagaagatcttactaagttcaatgacaagtcaccctatacgattatgtttggtccggacaagtgtggaaatgatgtaaaaatgcatttcatattccgacatgttaatccaattaatggcaccatcaccgagaagcattgcaacaaaccaaagaatcgtctggaggaacctttcaaggataagctaccacatttgtatcaattggtcgttcatcctgataatagtttcgaaatccgcgtcgatcacaaaatcatcaatgagggctctttactcaccgatttcaagccagctgttaatccacctgcagagattgatgatcccaatgatcaaaagcctgccaattgggatgaacgtgaaaagattcccgatcccagttcacagaagcctgacgattgggatgaggatgctccaccacaattgcccgatccaaatgccgtgatgcccgatggttggctcgaggatgaacccgatatgatctttgatccaacagccagtaaacccgatgattgggatgctgaaatcgatggcgaatgggaggcacccctggtggataatcctgcctgtgagaaggctgtcggctgtggcaaatggaaggctcccctaatacccaatcccgaatacaagggcaagtggcgtgcagccatgatcgagaatcccaattatcagggcaaatgggcaccgcgtaagatacaaaatcctgactttttcgaggatcttaaaccattccgtatgacaccaattggcgctgtgggtctggaactctggtccatgtcaagtgatattctcttcgacaatcttattattacggacgatgtgaatgtggcacgtgattttgctgccaatagttttgatattaagcgtaaatacattgatcgggaatcgaaaactctgtggcatcgcctaatgcgtcgcatgaactataagcccggatggtgggccttgtatttcctctatctattgattccagccagttgctatgtcttttatctctatcgacgagccaaagaggattcattcttcaataaggtagttgagctaaccaagacctatccttctatttggggcgtgagtttggtggcctttgtgatcttgcttgttattgtcgtctactataaattctctagagctaagccacaggactcggcggctaaagcagctgatgccaagaaaactgatgcacttcagcccgacgatgaggatcaagtcgatgctgaagaggacgatgctggggatgatagtgatccctcagccgataaggctaatggtgataatagcagccaggaaagcacgccgctgtccgctagtcccaagaaatcaaagtctgatttagatgataaagaaagcaaattggagcaaaatgctgaacctaaggaaacaaccgcaaaggccactcgcaagcgtcaagtgcgcaaggagtga

SEQ ID NO: 4434 - protein, 646 aa, Drosophila willistoni
MKAKLGRALIFGACFSCILLMTVAGAEVEADDFEDGFVEDVQDESPNVAAGDEEIVYESPPIEPKKFHFADHFDNVEESRKLWTLSQAKKDDIAEEISKYDGIWNWESPQRIVWAKDKGLVLKSKAKHAAISARLSKQFDFKKDKPLVVQYEVTLQEGQECGGSYLKLLSAGKETEDLTKFNDKSPYTIMFGPDKCGNDVKMHFIFRHVNPINGTITEKHCNKPKNRLEEPFKDKLPHLYQLVVHPDNSFEIRVDHKIINEGSLLTDFKPAVNPPAEIDDPNDQKPANWDEREKIPDPSSQKPDDWDEDAPPQLPDPNAVMPDGWLEDEPDMIFDPTASKPDDWDAEIDGEWEAPLVDNPACEKAVGCGKWKAPLIPNPEYKGKWRAAMIENPNYQGKWAPRKIQNPDFFEDLKPFRMTPIGAVGLELWSMSSDILFDNLIITDDVNVARDFAANSFDIKRKYIDRESKTLWHRLMRRMNYKPGWWALYFLYLLIPASCYVFYLYRRAKEDSFFNKVVELTKTYPSIWGVSLVAFVILLVIVVYYKFSRAKPQDSAAKAADAKKTDALQPDDEDQVDAEEDDAGDDSDPSADKANGDNSSQESTPLSASPKKSKSDLDDKESKLEQNAEPKETTAKATRKRQVRKE

SEQ ID NO: 4435 - DNA, 1752 bp, Drosophila willistoni
  CDS (1)..(1752)
atgaatatcctttgggccatgatgacgataatgatgatggccactgccgttaaggccgctgagaagtccccaactgtggctagtggcgataagaagttaacatacaagagtcccctcattgatggcaaatcctattatttcggggatcactttgatcgcgtggaagagtcacgcaacaactggatactttcgcaggccaagaaggacgaccttgatgaggaaatagcaaaatacgatggcgtctggaactgggagtcgccagcggacatcatctttgatgaggacaagggactagtgctcaagtcaaaggccaaacatgccgcaattgcagctccactgttcaaggagtttgatttcaaggcaaataagccgctggtggtccagtacgaggtcacaatgcaggatggccaggagtgcggtggctcctatctgaagttgctatccaccggccaggacacggccgatcttaccaagtttaatgacaagacaccatacacgattatgtttggaccggacaagtgtggcgggaacaagaaaatccatttcatatttcgccacgtcaatcccctgaatggcagcatcagtgagaagcattgcaagaaaccaaaggagcgtgtggatgagctgtttaccgacaagttgccccatttgtatcagttgattgtttatcctgatagtaacttcgagatgcgcgtcgatcacaatgtgattaaggaaggctccttgctatgggatttccagccaccggtgaatcctccagcggatattgatgatcctaccgatcgcatgcccgacgattgggatgaacgcgaaaagatcgcagatcccttggcccagaaacccgatgattgggatgaagacgccccagccgaattggtcgatgagtcggctcaaatgcccgacaattggctccaggaagagcccacattgatctcggatccgaccgccaagaaacctgatgactgggatgccgaaatcgatggcgaatgggaggcaccgctagtggagaatcctgtgtgcgagactgttgcaggctgtggaccatggagagctcctttaattgccaatcccgcttacaagggcaaatggcatgcccccatgattgagaatcccaattttcagggcttttgggcacctcgtaagataccgaaccctgacttctttgaggatctaaagccgttccaaaccatgacaccaattagcgctgtgggtctggaactttggtccatgtcccccgatatactcttcgacaatctgatcattacggatgacatcgaggtggcccgtgagtttgctgcccagacttttgacatcaagcgacgctttttaagtgccgatccggagtcatttgtccatcagattgtggagctcaccaagaaccatcgcctggtttggatcgttgtcaccctgaccatactcctcgtgatcactgtcgggggctaccttcgatttggcaaagccaaaaagacgaaactccccatagagaagaccacaacagcatctgttgcccaagccaagaagaatgatgacgaaattcatcctgacaatgaagaggaaatacacaccgagaacacccagtcgacctttgaggaggagacctctacccccataccggaaactgaaacatctctaagcaatatcccacagaacttcgattccattccctgtttaaatctcgattcggaggccatggacgttgctgcaaggaccaaagaaaggatcgtacgcaagcgtgcggttcgtaaggattag

SEQ ID NO: 4436 - protein, 583 aa, Drosophila willistoni
MNILWAMMTIMMMATAVKAAEKSPTVASGDKKLTYKSPLIDGKSYYFGDHFDRVEESRNNWILSQAKKDDLDEEIAKYDGVWNWESPADIIFDEDKGLVLKSKAKHAAIAAPLFKEFDFKANKPLVVQYEVTMQDGQECGGSYLKLLSTGQDTADLTKFNDKTPYTIMFGPDKCGGNKKIHFIFRHVNPLNGSISEKHCKKPKERVDELFTDKLPHLYQLIVYPDSNFEMRVDHNVIKEGSLLWDFQPPVNPPADIDDPTDRMPDDWDEREKIADPLAQKPDDWDEDAPAELVDESAQMPDNWLQEEPTLISDPTAKKPDDWDAEIDGEWEAPLVENPVCETVAGCGPWRAPLIANPAYKGKWHAPMIENPNFQGFWAPRKIPNPDFFEDLKPFQTMTPISAVGLELWSMSPDILFDNLIITDDIEVAREFAAQTFDIKRRFLSADPESFVHQIVELTKNHRLVWIVVTLTILLVITVGGYLRFGKAKKTKLPIEKTTTASVAQAKKNDDEIHPDNEEEIHTENTQSTFEEETSTPIPETETSLSNIPQNFDSIPCLNLDSEAMDVAARTKERIVRKRAVRKD

SEQ ID NO: 4437 - DNA, 1956 bp, Drosophila yakuba
  CDS (1)..(1956)
atggcgtggaaaatgggaggaaaccgggccgcaacgctggcgttgctcttggccagcagtttgctgctgctgagtgcggccaaagccgccgatttgggcccggattcggagtcggacgacttcgaggacggctatgtggaagatgtgcaggaggaacccacagccatcgatggcgatgagaagctggcctacgagagcccggtgatcgatgccaagaagttccacttcgcagatcacttcgacgacgtggaggcgtccaggaagaagtgggtcctgtcgcaggccaagaaggacgacattgccgaggagatctccaagtacgatggcatctggaactgggagtcgccgcagcgcatcgtttgggcaaacgatctgggtctggtgctcaagtcgaaggccaagcatgcggccatagccgcgcccctccgccagccgttcgagttcaagtcggacaagccactggtggtgcagtacgaggtcacgttgcaggagggccaggagtgcggcggctcgtatctgaaacttttgtccgcgggaaaagacacggagcaactaaaagccttcaatgacaagacaccctataccatcatgtttggaccggacaagtgcggcaacgatgtgaaaatgcacttcatattccggcacgtcaatccaattaatggcaccatcaccgagaagcactgcaacaagccaaagaaccgtttggaagagccattcaaggacaagctaccccatctctaccagctggtggtccgtcccgataacagcttcgagattcgcgttgaccacaagatcatcaatgagggttccctgctgaccgacttcaagccaccagtcaacccgccgtccgagatcgacgaccccaatgaccacaaaccagaatcgtgggatgagcgagagaagatcccagaccccactgcccacaagcccgaggattgggacgaggatgctccaccacagctgcccgataccgatgccgtcatgcccaatggctggctcgaggatgagcccgacatgattttcgatccaactgccaccaaacccgaagattgggatgccgaaatcgatggcgagtgggaggctccattggtggacaatccagtgtgcgagaaggcacccggctgtggcaagtggaaggctccgctcattcccaatcccaactacaagggcaagtggcgtgcaccaatgatcgagaaccccaactaccagggcaagtgggcacccaggaagattgtcaatccagacttctttgaggatctgaagcccttccaaatgacgccaatcagcgccgtgggtctggagctgtggtccatgtcgagcgacattctcttcgataatctgatcatcacggacgatgtggaggtggcccgtgactttgccgccaacagcttcgacatcaagcgtcgctacattgatcgtgaatcgaaaaccttctggcaccgcctgatgcgccgcatgaactacaagcccggctggtgggccctgtacttcctgtacctgctcattccggccagttgctatgtcttctatctctaccgacgcgccaaagaggactcattcgtgaataaggtagtcgagctagccaaggccaatccctcgatctggggcattggcctggtggccattgtggcgctggttgccctcaccatctactgtagatttggtaccgctaagagtcaggactctgctgccaaaaaggccgctgccgaggccaagaagaccgacgatcctcagcccgatgatgagcccgaggccgaggaggaggaggagagcgacgaaagggccgctggcgattccagcaaggagagcacaccgctgtccgctagtcccaagaagaaccaaaagtctgatttagatgataaccaagaggagaccaaggcggcggagaatcaagagcccgcacagactgaggaatctaacacaaaaacacgcaagcgtcaggcgcgcaaggagtaa

SEQ ID NO: 4438 - protein, 651 aa, Drosophila yakuba
MAWKMGGNRAATLALLLASSLLLLSAAKAADLGPDSESDDFEDGYVEDVQEEPTAIDGDEKLAYESPVIDAKKFHFADHFDDVEASRKKWVLSQAKKDDIAEEISKYDGIWNWESPQRIVWANDLGLVLKSKAKHAAIAAPLRQPFEFKSDKPLVVQYEVTLQEGQECGGSYLKLLSAGKDTEQLKAFNDKTPYTIMFGPDKCGNDVKMHFIFRHVNPINGTITEKHCNKPKNRLEEPFKDKLPHLYQLVVRPDNSFEIRVDHKIINEGSLLTDFKPPVNPPSEIDDPNDHKPESWDEREKIPDPTAHKPEDWDEDAPPQLPDTDAVMPNGWLEDEPDMIFDPTATKPEDWDAEIDGEWEAPLVDNPVCEKAPGCGKWKAPLIPNPNYKGKWRAPMIENPNYQGKWAPRKIVNPDFFEDLKPFQMTPISAVGLELWSMSSDILFDNLIITDDVEVARDFAANSFDIKRRYIDRESKTFWHRLMRRMNYKPGWWALYFLYLLIPASCYVFYLYRRAKEDSFVNKVVELAKANPSIWGIGLVAIVALVALTIYCRFGTAKSQDSAAKKAAAEAKKTDDPQPDDEPEAEEEEESDERAAGDSSKESTPLSASPKKNQKSDLDDNQEETKAAENQEPAQTEESNTKTRKRQARKE

SEQ ID NO: 4439 - DNA, 1947 bp, Drosophila simulans
  CDS (1)..(1947)
atggcgtggaaaatgggaggaaaccgggccgcaacgctggcgttgctcttcgccagcagtttgctgctgctgagtgcggccaattgcgccgatttggacacggagtcggacgacttcgaggacggctacgtggaggatgtgcaggaggagcccgtcgcaatcgatggtgatgagaaactggcctacgagagcccggtgatcgatgccaagaagttccacttcgcggaccacttcgacgacgtggaggcgtccaggaagcgatgggtgctgtcgcaggccaagaaggacgacatcgccgaggagatttccaagtacgatggcatctggaactgggagtcgccgcagcgcatcgtttgggctaacgacctgggtctggtgctcaagtcgaaggccaagcatgcggccatagccgcccccctccgccagccgttcgagttcaagtcggacaagccgctggtggtgcagtatgaggtcacgttgcaggagggtcaggagtgcggcggctcgtatctgaagcttttgtccgccggaaaagacacggagcaactaaaatcgttcaatgacaagacaccctataccatcatgtttggaccggacaagtgcggcaacgatgtgaaaatgcacttcatattccggcacgtcaatccaattaatggcaccatcaccgagaagcactgcaacaagccaaagaaccgtttggaggagccattcaaggacaagctaccccatctctaccagctggtggtccgtcccgataacagctttgagattcgcgttgaccacaagatcatcaacgagggttccctgctgaccgatttcaagccaccagtcaacccgccggcggagatcgacgaccccaatgaccataagcccgaatcgtgggatgagcgagagaagatcccagatcccactgcccacaagcccgaggattgggatgaggatgctccaccccagttgcccgacaccgatgccgtcatgcccaatggctggctcgaggatgagcccgacatgattttcgatccaactgccaccaaacccgaagattgggatgccgaaatcgatggcgagtgggaggccccattggtggacaacccagtgtgcgaaaaggctcccggctgtggcaagtggaaggctccgctcatccccaatcccaactacaagggcaagtggcgtgcaccaatgatcgagaaccccaactaccagggcaagtgggcccccaggaagattgccaatccagacttctttgaggatctgaagcccttccaaatgacgccaattagcgctgtgggtctggagctgtggtccatgtccagcgacattctttttgacaacctgatcataacggacgacgtggaggtggcccgtgactttgccgccaacagcttcgacatcaagcgtcgctacatcgatcgtgaatcgaaaaccttctggcaccgcctaatgcgccgcatgaactacaagcccggctggtgggccctgtacttcgtgtacctgctcattccggccagttgctatgtcttctatctctaccgacgcgccaaagaggactcattcgtgaataaggtagtcgagctagccaaggccaatccctcgatctggggcgttggcctggtggccattgtggcgctggttgccctcaccatctactgtagatttggtaccgctaagagtcaggactcggctgccaaaaaggctgctgccgaggccaagaagtccgacgatcctcagcccgacgatgagcccgaggccgaggaggaggagagcgacgaaagggccgctggcgataccagcaaggagagcacaccgctgtccgctagtcccaagaagaaccaaaagtctgatttagatgataacgaagaggagtccaaggcggcggagagccgagagcccgcacagactgaggagtctaacacaaaaacacgcaagcgtcaagcgcgcaaggagtaa

SEQ ID NO: 4440 - protein, 648 aa, Drosophila simulans
MAWKMGGNRAATLALLFASSLLLLSAANCADLDTESDDFEDGYVEDVQEEPVAIDGDEKLAYESPVIDAKKFHFADHFDDVEASRKRWVLSQAKKDDIAEEISKYDGIWNWESPQRIVWANDLGLVLKSKAKHAAIAAPLRQPFEFKSDKPLVVQYEVTLQEGQECGGSYLKLLSAGKDTEQLKSFNDKTPYTIMFGPDKCGNDVKMHFIFRHVNPINGTITEKHCNKPKNRLEEPFKDKLPHLYQLVVRPDNSFEIRVDHKIINEGSLLTDFKPPVNPPAEIDDPNDHKPESWDEREKIPDPTAHKPEDWDEDAPPQLPDTDAVMPNGWLEDEPDMIFDPTATKPEDWDAEIDGEWEAPLVDNPVCEKAPGCGKWKAPLIPNPNYKGKWRAPMIENPNYQGKWAPRKIANPDFFEDLKPFQMTPISAVGLELWSMSSDILFDNLIITDDVEVARDFAANSFDIKRRYIDRESKTFWHRLMRRMNYKPGWWALYFVYLLIPASCYVFYLYRRAKEDSFVNKVVELAKANPSIWGVGLVAIVALVALTIYCRFGTAKSQDSAAKKAAAEAKKSDDPQPDDEPEAEEEESDERAAGDTSKESTPLSASPKKNQKSDLDDNEEESKAAESREPAQTEESNTKTRKRQARKE

SEQ ID NO: 4441 - DNA, 1899 bp, Anopheles gambiae str. PEST
  CDS (1)..(1899)
atgatgaaattaaacagaccccggtggtcaccgctgctgtggcggattgctttgctgagcgccgtactactatttcatagccccgtggtacatggaaatgacgaaatttccaccgagcctcagccggctggggatgctgagcagtacgaaacaccgacggtagacccgaagcgtatgtattttgctgaacatttcgatgatctgttcgatggtgcgagtgatgccatcgagaagcggtgggtgaagtcaaaggccaagaaagacgacgctgccgaagaggtggccaaatacgacggcgaatgggcggtcgagcagccgcagcggccgattctatcgaacgattatgggttggtgctgaaatcgaaagcgaagcatgctgcgattgcttcgcctttgctgctgaaccgaccattcgtgttcgaggacaagccgctcgtggtacagtacgaggtcaacttgcaggagggccaggaatgcggcggctcctacataaagctcctttccgtgggcgacggtacgaaggatctgaagcagttccacgacaaaacaccgtacacgattatgttcggaccggacaagtgtggcaacgatgtaaagttgcatttcattttccgacacgttaacccgattaatggtaccatcacggagaagcattgcaacaagcagaaagatcggcttgatgatccgttcaaagacaaacgcccccatttgtaccaattgattattcgcccggacaacacgtacaccatacgagtggatcacaaaaccgtcaacgagggctcgttgctcaccaactttacgccggcagtgaacccgcctgctgaaatcgatgacccggaggaccgcaagccggagaactgggacgatcgcgaaaaaatccccgatcccgaagcgaccaaacccgacgactggaacgaggacgaaccggcacaaattcccgacccgaaggctaccaagccggccggctggttggacgatgtggaggagatggtaccggacagttcggccgtgaagccggaggactgggacaacgatatggatggtgagtgggaaccgcccctgattccgaacccgatgtgtgagaaggcggttggttgcggtttgtggaaggctccgatggtaccgaaccctaactacaagggtaaatggcgcccgccgcttatcgctaacgtaaactaccaaggaaagtgggccccgcgcaagattcctaatccggacttctttgaagatctaacgccgttccgaatgacaccgattgccgcggtaggcatcgaactttggtccatgtcaaacgatatactgtttgataacattgttatttgcgatgatgaatccgttgctgacgaatgggctgcacaaacgttcgatctcaaagtgaagacgcttgatcggcaggcggaaaccttcgtttcgcgtgtgcttaagtactgcaacagcaatccctggatgtgggctgtattgatagtagtagtaggattgccagttgctttaatgatctacttcatgtgctttaccaagggtgacgccaaggcggaaattggacgcaagaagaagaatgacgattatcctgcaccggagcaagagcaggacgagctggtcggtggtgctggtgaggaagcggaagacgacggacgatccagcaaaacaaagctgaatgccgcagccacggggtcctccggttcacggtcagccagcagtgccggcgaagcgtacgcagagaatgaggatgaacgtgacggcgatgaggctgaagaggatgaggaagacgacgaagcacaggaagaggctcaggaaatggaggccggtgaagaggaagcatcgtcaagcgatgcaccagtagatagcaagaattcggaaggcggggaaggccttaagaagagaagagcccgcaaggattag

SEQ ID NO: 4442 - protein, 632 aa, Anopheles gambiae str. PEST
MMKLNRPRWSPLLWRIALLSAVLLFHSPVVHGNDEISTEPQPAGDAEQYETPTVDPKRMYFAEHFDDLFDGASDAIEKRWVKSKAKKDDAAEEVAKYDGEWAVEQPQRPILSNDYGLVLKSKAKHAAIASPLLLNRPFVFEDKPLVVQYEVNLQEGQECGGSYIKLLSVGDGTKDLKQFHDKTPYTIMFGPDKCGNDVKLHFIFRHVNPINGTITEKHCNKQKDRLDDPFKDKRPHLYQLIIRPDNTYTIRVDHKTVNEGSLLTNFTPAVNPPAEIDDPEDRKPENWDDREKIPDPEATKPDDWNEDEPAQIPDPKATKPAGWLDDVEEMVPDSSAVKPEDWDNDMDGEWEPPLIPNPMCEKAVGCGLWKAPMVPNPNYKGKWRPPLIANVNYQGKWAPRKIPNPDFFEDLTPFRMTPIAAVGIELWSMSNDILFDNIVICDDESVADEWAAQTFDLKVKTLDRQAETFVSRVLKYCNSNPWMWAVLIVVVGLPVALMIYFMCFTKGDAKAEIGRKKKNDDYPAPEQEQDELVGGAGEEAEDDGRSSKTKLNAAATGSSGSRSASSAGEAYAENEDERDGDEAEEDEEDDEAQEEAQEMEAGEEEASSSDAPVDSKNSEGGEGLKKRRARKD

SEQ ID NO: 4443 - DNA, 1734 bp, Magnaporthe grisea 70-15
  CDS (1)..(1734)
atgcagtatcgcttcatcgcagctgcgctgtccacagctagcctctttgtcggcacctatgcggccgaagatgctcaaaaggtcatcaaggatgatgcgaccgctgcttccagtgctgccccgagctctacaagctcagcagcgccggagctttccacattcaagcctacaaagctcaaggctccattcctagagcagtttaccgaagactgggagacgcgatggaagccatcgcacgccaagaagaacatgaagggatccggaaaggatgaggaggagtgggctttcgtcggtgaatgggccgttgaggagcctacagtatacaagggcatggagggcgacaagggtctcgttgtgaagaacccggccgcccaccacgctatctccgccaagttccccaagaagattgacgccaagggcaagcctttggttgttcagtatgaggtcaagcttcagaagggcctcgagtgcggtggcgcctacatgaagctcctcagggacaacaaggctcttcaccaggacgagttcagcaacactaccccctacgtgatcatgttcggtcccgacaagtgcggtcacaccaacaaggttcactttatcttcaaccacaagaaccctaagacgggcgagtacgaggagaagcacctgaacagcccacccaccgctcgcatcgttaagacgaccgagctctacactctgattgttcacccgaacaacaccttcatcatccagcaaaatggagagcaggtgaagcagggcagccttctggaggactttacccctgcggtcaaccctcccgcggagatcgacgatgccaaggacaagaagcccgaggactgggttgacgaggcgcgtatcgctgaccccgaggccaagaagcctgaggactgggacgaggaagccccgtacgagattgttgatgaggaggctaccaagcctgaggattggcttgaggaggagcctttgagcattcccgaccctgagtccaagaagcccgaggactgggatgacgaggaggatggtgactggatcgccccgactgttcccaaccccaagtgtggcgaggtttctggctgtggtccctggactaagcccatgatcaagaacccggcctacaagggcaagtggaccgcgcctctcatcgacaaccctgcctacaagggcgagtgggctcctcgcaagattaagaaccctgactactttgaggacaagactcctgccaacttcgagcccatgggagctatcggctttgagatctggaccatgcagaacgacatcctctttgacaatatctacatcggccactccgtcgaggaggcccgcaagtttgccgaggagaccttcttcgagaagcaccccattgagcagcttcttgagctcgctgagaagcccaaggaggaggagacgcccaagccaaccggcgagaagactctcctggaggaccccgtcgcctacgccaaggagaggctcgacctgttcctcagcattgccaaggacagcgttccggatgccattcgtctggttccccaggttcctgcggccgctggtgccattctcgtcaccctgattgccctcctttcagctgttctcggcggtggctcggctgccccggccgctaagaaggttgcttctgatgtcaaggacaaggctaaggatgtcaaggcttccgccgtggccaccggagctgaggtcaaggagggcgctaccaagcgtgctacccgcagccagcagtaa

SEQ ID NO: 4444 - protein, 577 aa, Magnaporthe grisea 70-15
MQYRFIAAALSTASLFVGTYAAEDAQKVIKDDATAASSAAPSSTSSAAPELSTFKPTKLKAPFLEQFTEDWETRWKPSHAKKNMKGSGKDEEEWAFVGEWAVEEPTVYKGMEGDKGLVVKNPAAHHAISAKFPKKIDAKGKPLVVQYEVKLQKGLECGGAYMKLLRDNKALHQDEFSNTTPYVIMFGPDKCGHTNKVHFIFNHKNPKTGEYEEKHLNSPPTARIVKTTELYTLIVHPNNTFIIQQNGEQVKQGSLLEDFTPAVNPPAEIDDAKDKKPEDWVDEARIADPEAKKPEDWDEEAPYEIVDEEATKPEDWLEEEPLSIPDPESKKPEDWDDEEDGDWIAPTVPNPKCGEVSGCGPWTKPMIKNPAYKGKWTAPLIDNPAYKGEWAPRKIKNPDYFEDKTPANFEPMGAIGFEIWTMQNDILFDNIYIGHSVEEARKFAEETFFEKHPIEQLLELAEKPKEEETPKPTGEKTLLEDPVAYAKERLDLFLSIAKDSVPDAIRLVPQVPAAAGAILVTLIALLSAVLGGGSAAPAAKKVASDVKDKAKDVKASAVATGAEVKEGATKRATRSQQ

SEQ ID NO: 4445 - DNA, 1689 bp, Gibberella zeae PH-1 (Fusarium graminearum)
  CDS (1)..(1689)
atgaagttaaacgctgtcgcggcggccgtgtcggctgccatgcttacgggcaacgtccacgctgaggacgttaaggaggcttctccctccgtccctgataagcttcctacctttactcctaccaacctcaaggctgacttccttgaacaattcaccgacgactgggaccagcgatggcaaccctctcacgcaaagaaggatacgaccggctctgaggaggagtgggcatacgtcggcgagtgggccgttgaggagcctgtcaagtacaagggaattgacggcgataagggtcttgttgtcaagaaccccgccgctcaccacgctatctccgccaagttccccaagaagattgacaacaagggcaagactcttgttgttcagtacgaggtcaagctacagaatggcctcgagtgcggtggtgcttacatgaagctccttcgcgacaacaaggctcttcaccaggaggagttcgccaacacaaccccctacgtgatcatgttcggtcccgacaagtgtggccacaccaacaaggttcacttcattttcaaccataagaaccccaagaccggcgagtatgaggagaagcacctggagtctcccccttctgccaagatcactaagaccacagagctttacactctgatcgtccaccccaacaacacctatgccattaagcaaaacaacgaggaagtcaagactggcagcctcttggaggacttctcccctgccgtcaacccccccgccgagattgacgacgccgatgataagaagcccgaggactgggttgaccaggcccgtatccctgaccctgaggccaagaagcccgaggactgggatgaggaagcccccttcgaggtcgttgacgaggaggctaccaagcctgaggactggctcgaggaggaggccgttaccattcctgaccccgaggctgagaagcccgatgactgggatgatgaggaagatggtgactggattgcacctactgttcccaaccccaagtgtgccgatgcctctggctgtggcccctggaccaagcccatgaagcgcaaccctgactacaagggcaagtggaccgctccttacgtcgagaaccctgcctacaagggcacctgggctccccgcaagatcaagaaccccaactacttcgaggacaagacccctgccaactttgagcccatgggagctattggcttcgagatctggaccatgcagaacgacatcctctttgacaacatttacatcggccactccattgaggatgctaacaagctcgctgaggagaccttcggtgtcaagcaccctgtcgagaaggccctcgccgaggctgacaagcctaagcaggatgacaagccccgatcccccagcgacctgaacttcatggaagaccctgttcactacattaccgagaagcttgacctcttcaaggccattgctgctcaggaccccatccaggctattaagttcgttcccgaggtcgccggtggcttcgccgccatcatcctcgctgccgccggtctcattgctgtcctcttcaaccttggcaagtcatctcccgctgtccagaagactgctgagaaggcttccaacaaggccaagcaagtcaaggacaaggccgccgaggccagcgccaccggtgctgagaaggttaagggtgaggtcaacaagcgcaccacccgcagccagtcgtaa

SEQ ID NO: 4446 - protein, 562 aa, Gibberella zeae PH-1 (Fusarium graminearum)
MKLNAVAAAVSAAMLTGNVHAEDVKEASPSVPDKLPTFTPTNLKADFLEQFTDDWDQRWQPSHAKKDTTGSEEEWAYVGEWAVEEPVKYKGIDGDKGLVVKNPAAHHAISAKFPKKIDNKGKTLVVQYEVKLQNGLECGGAYMKLLRDNKALHQEEFANTTPYVIMFGPDKCGHTNKVHFIFNHKNPKTGEYEEKHLESPPSAKITKTTELYTLIVHPNNTYAIKQNNEEVKTGSLLEDFSPAVNPPAEIDDADDKKPEDWVDQARIPDPEAKKPEDWDEEAPFEVVDEEATKPEDWLEEEAVTIPDPEAEKPDDWDDEEDGDWIAPTVPNPKCADASGCGPWTKPMKRNPDYKGKWTAPYVENPAYKGTWAPRKIKNPNYFEDKTPANFEPMGAIGFEIWTMQNDILFDNIYIGHSIEDANKLAEETFGVKHPVEKALAEADKPKQDDKPRSPSDLNFMEDPVHYITEKLDLFKAIAAQDPIQAIKFVPEVAGGFAAIILAAAGLIAVLFNLGKSSPAVQKTAEKASNKAKQVKDKAAEASATGAEKVKGEVNKRTTRSQS

SEQ ID NO: 4447 - DNA, 1764 bp, Debaryomyces hansenii CBS767
  CDS (1)..(1764): transl_table=12
atgaaattgaattgcttttcaattggtgcctctgtattgttggcaactaatttagtaagtggagttaacgtcaatcacccctctttcaccccatttgacaaatctaaattagacaagtcctcattttttgaacaattcgattatatcaccctattgaattcggattggaagatctcccatgctcaaaaagacgataaggtcgcatatgttgggaagtggaacatagaagaacctactgtttatccagggtttgaaaatgacaaaggattggtcttgaagactccggctgcccatcatgctatttcatataaattggaacaaccatttgataatactgacaatgacttggttttacagtatgaaatcaaattacaagatggattggaatgtgggggaacttatatcaagttattggattatgatttcgataaggatgacgaattcaataatgacacgccgtatcaagttatgttcggacctgataaatgtggatctgagaataagattcatttcatcttgagaagatttaacccaatttccaaggaacatgaagaaaagcatttagtaaacacccctatgtctcgtactgggaaattatctaccttgtatactttgattttgaaaaagaatcaagattttgaaataagaataaatggtgaagttgcaaaagcaggcaatttgattcagaagccaaaacttatgaaacctccattaaacccacctaaagaaattgttgataaagatgacttcaaacctattgactgggatgatagaaagtttattcctgatccagaacaagctgagaaacctgatgattatgacataaaacacggtttatcattaattccagatcctaatgctgtcaagcctgcagattggaatgatgatgaacctgaattcgttgaggatccttcagcccataagcctgaagaatgggacgatgatgaagatggagtatggcttgccccagaaattcccaatcctaagtgttcttctggctgtggtacatgggaagcaccactaattattaacccaacatatgtcggaccatggattcaaccagtgattccaaatcctaattataatggagaatggaaaccaagatctaagctgaatccaaattattttgaagatttaaaaccatcaaatttggaactaattggagggttaggttttgaattatggagtatggatggcgacattttatttgataatatctatttaggtcactctatcaaggaggctgaattaattggaaacaagacatattctccaaagtatgatattgaagaatacgacttagagcacaataaaccccctgttaaaaatgaacccattgcacctcctccaactttcgaagattttgtgaataatgatcaatcaaccttcagcaggattcgtgaaattttcagcatgttgtatgccaatcaatattcagatataagctcgttctattataaatttatgagcaatccggtggaaaccataatccaagagccagtagtattctttatatactgttgtgcttttgtttcagtcttcacttttgcgtttggaatattcggtgctttggtattcatggtaaccggagcgtcccaggttacccaatatgagcaacaaccggaaacaatccccaaaattaatgagcctgatagtgacggaaatgaggataaacataaaattgaagatattattgatgatgatgaagtaaaggtatcatctattaagacttccgtaacatctgcgtctaagaggagggcataa

SEQ ID NO: 4448 - protein, 587 aa, Debaryomyces hansenii CBS767
MKLNCFSIGASVLLATNLVSGVNVNHPSFTPFDKSKLDKSSFFEQFDYITLLNSDWKISHAQKDDKVAYVGKWNIEEPTVYPGFENDKGLVLKTPAAHHAISYKLEQPFDNTDNDLVLQYEIKLQDGLECGGTYIKLLDYDFDKDDEFNNDTPYQVMFGPDKCGSENKIHFILRRFNPISKEHEEKHLVNTPMSRTGKLSTLYTLILKKNQDFEIRINGEVAKAGNLIQKPKLMKPPLNPPKEIVDKDDFKPIDWDDRKFIPDPEQAEKPDDYDIKHGLSLIPDPNAVKPADWNDDEPEFVEDPSAHKPEEWDDDEDGVWLAPEIPNPKCSSGCGTWEAPLIINPTYVGPWIQPVIPNPNYNGEWKPRSKLNPNYFEDLKPSNLELIGGLGFELWSMDGDILFDNIYLGHSIKEAELIGNKTYSPKYDIEEYDLEHNKPPVKNEPIAPPPTFEDFVNNDQSTFSRIREIFSMLYANQYSDISSFYYKFMSNPVETIIQEPVVFFIYCCAFVSVFTFAFGIFGALVFMVTGASQVTQYEQQPETIPKINEPDSDGNEDKHKIEDIIDDDEVKVSSIKTSVTSASKRRA

SEQ ID NO: 4449 - DNA, 1749 bp, Yarrowia lipolytica CLIB122
  CDS (1)..(1749)
atgcgactttccaaattggccgtttcttcggtgctggccgccgttgcttgtgctcaggacgccgacgctgctgctgatgctgctccttcctctcaggttgagcaccccgaatttactccttacactggagctgtgacgggcttctttgagcagttcctggatggccacaagtggcaaaagtcgtcggctatgaaggacgacgagttttcttacgtcggcgaatgggccgtggaggaaccctatgtgttccccggcttcaagggagacaagggtcttgtcgtcaagtctcctgctgctcaccacgccatcaccaccgcctttgacactcccatcaacaacaagggcaagactctggtggtgcagtacgaggtcaagctgcagaagggactcgagtgcggaggtgcttacgtcaagctgctgtctgctgaagttaacgccgatgataagggcgttgaggagttctcttccgaaactccttaccagatcatgtttggccctgacaaatgtggatccaccaacaaggtccacttcattgtcaagcgacctcttcccgatggtacctacgaggagaagcaccttgtttctcccgcccacgcccgtctcaacaagctcaccaacctctacaccctggtgatccgacccaagaacgagtttgagatccgaattaacggaaacgttgtcaagaccggcaacctgctagaggagggtctgttcaagccctctttcaaccctcctgctgagattgatgatcccgaggacacaaagcccgccgactgggttgaggagccttacatgcccgatcctgagcaggccgagaagcccgccgactgggacgagaaggctcccttctacattgccgaccccgaggctgtcatgcccgccgactggcaggaggataccccggattacattgtggatcctgaggccttcaagcccgaggactgggacgacgaggaggatggagagtgggttgcccccgagatccctaaccccgtttgcgaggagattggttgcggtccctgggtcgcccccaagatccagaaccccgactacaagggtgtgtggtctcagcccatgatcgagaaccccgactacaagggtacctgggcccccaagaagattcccaaccccaacttcaaggctgacgagcacgcctctgatcttgagcccattggtggtcttggcttcgagctctggaccatgcaggaggacattctgttcgacaacatctatgtcggacactctgtcgatgaggccgaggccattggaaacgccacctttgtgcccaagctggctctcgaggccgaggaggagaagctctctggtccccagaaggagactgctccttgggatactgatgagggtgttctttcctctgtcgacatgttccttgctgaccccgtttctttcgttctcgagcgggttcttggtttctttgaggtcttctctcaggatcccgtctccgctatccgagaggaccccgtcgttgcagcagcttctttcggtctccttctcatcacgtctgctaccgcctttggtctcctcaatgtgatcatcttcctcctgttcggcaagaagaagcagtcggctgctcccgccaagaagaccaagaagaccggtgacggtccttctaagctcaccaaggccgacgttgttgaggccgaggctgaggctgagcaggctgctgagaccgtcgttgcctctggtgtcgatgatggttctgccgagctcaagaagcgaaaggcttag

SEQ ID NO: 4450 - protein, 582 aa, Yarrowia lipolytica CLIB122
MRLSKLAVSSVLAAVACAQDADAAADAAPSSQVEHPEFTPYTGAVTGFFEQFLDGHKWQKSSAMKDDEFSYVGEWAVEEPYVFPGFKGDKGLVVKSPAAHHAITTAFDTPINNKGKTLVVQYEVKLQKGLECGGAYVKLLSAEVNADDKGVEEFSSETPYQIMFGPDKCGSTNKVHFIVKRPLPDGTYEEKHLVSPAHARLNKLTNLYTLVIRPKNEFEIRINGNVVKTGNLLEEGLFKPSFNPPAEIDDPEDTKPADWVEEPYMPDPEQAEKPADWDEKAPFYIADPEAVMPADWQEDTPDYIVDPEAFKPEDWDDEEDGEWVAPEIPNPVCEEIGCGPWVAPKIQNPDYKGVWSQPMIENPDYKGTWAPKKIPNPNFKADEHASDLEPIGGLGFELWTMQEDILFDNIYVGHSVDEAEAIGNATFVPKLALEAEEEKLSGPQKETAPWDTDEGVLSSVDMFLADPVSFVLERVLGFFEVFSQDPVSAIREDPVVAAASFGLLLITSATAFGLLNVIIFLLFGKKKQSAAPAKKTKKTGDGPSKLTKADVVEAEAEAEQAAETVVASGVDDGSAELKKRKA

SEQ ID NO: 4451 - DNA, 1683 bp, Apis mellifera (honey bee)
  CDS (1)..(1683)
atggccagatttgtagcgaatttaattatttatttatgtttattatgtagtagtattaatgctaatgaaagtgatgataataatgatcaaaatgtagcatcaaaagtagtatataagagacctgaaatcactggttttacatatttaatagaaacatttgatgatgaagaaaaatttaaagaacattggattttatctgaagctaaaaaagattctatagatgaagatatagcaaaatatgatggaatttggtctatagaagaacctaaaaagcatgctcaagagggagatctaggattagtgcttaaaagtaaagctagacatgctgctatatctactaaattatttacaccattttatttcaatgataaaccattaattgtacaatatgaagtgaattttcaagatagtcaagaatgtggaggagcttatttaaaattgcttactttacatccagaacatcaagatttaaaaaaattccatgataaaactccttatactataatgtttggtcctgataaatgtggaaatgatcataagctacattttatctttcgacataaaaatcctttaaatggttctatagaagagaagcattgcaaaaaaccaagagagcgtttagaagattttttcaaagataagcaacctcatctatatactttgatcattcggccagataatagttttgaaattaagattgataataaaatagtaaattctggatccttgttggatgattttactccaccagtcaatccacctttggaaatagaagatccaactgatattcaaccagaagattgggatgacaaagaaaaaattcctgatctatcagctattaaaccagatgattgggatgaagatgctccagcacaaattgttgatgaagatgatattatgcctgaaggatggcttgaagatgaaccaccaatgatacctaatcctgattctgtaaaacctgatgattgggatgttgaaatggatggagaatgggaacctccagaaattccaaatccaaaatgtgctgatgcacctggatgtggattatataagcaaaaaatgaaaaaaaatcctcgctataaaggcaaatggtcaccacctttgattaataatccaaattataaaggcaaatggaagccaaaattaatacataatcctaattattttaatgatgaacatccattccaaatgatgcctatctttgctgtaggctttgaactttggtcaatgtctacagacatcctctttgacaatattattattactcatgatgaagaagtagcaaaatattgggctgataatacatttgaagttcgtcgcgctcaaattgcagaggaaagttggagtgtatggcgtcaaattggtacatttactgcagaacatccttggatatggggtatatatataatagctcctggcttgcccatattgctagtaatatattgttgctgctttgcttctcaggataaatatgatttaaaagatgatgataaacaatctttagtgacaaatgaacaagtagtattaaaacaagaagaaacagaaaatctaccacctagtactgaagtagaagaagaaattgaaaaactaaatgaaaatgaagaaattatagaaagtgaagaaaatgataaaccagaaataggtagtgatggaccacgacgaagaaaaccaaataaagaatag

SEQ ID NO: 4452 - protein, 560 aa, Apis mellifera (honey bee)
MARFVANLIIYLCLLCSSINANESDDNNDQNVASKVVYKRPEITGFTYLIETFDDEEKFKEHWILSEAKKDSIDEDIAKYDGIWSIEEPKKHAQEGDLGLVLKSKARHAAISTKLFTPFYFNDKPLIVQYEVNFQDSQECGGAYLKLLTLHPEHQDLKKFHDKTPYTIMFGPDKCGNDHKLHFIFRHKNPLNGSIEEKHCKKPRERLEDFFKDKQPHLYTLIIRPDNSFEIKIDNKIVNSGSLLDDFTPPVNPPLEIEDPTDIQPEDWDDKEKIPDLSAIKPDDWDEDAPAQIVDEDDIMPEGWLEDEPPMIPNPDSVKPDDWDVEMDGEWEPPEIPNPKCADAPGCGLYKQKMKKNPRYKGKWSPPLINNPNYKGKWKPKLIHNPNYFNDEHPFQMMPIFAVGFELWSMSTDILFDNIIITHDEEVAKYWADNTFEVRRAQIAEESWSVWRQIGTFTAEHPWIWGIYIIAPGLPILLVIYCCCFASQDKYDLKDDDKQSLVTNEQVVLKQEETENLPPSTEVEEEIEKLNENEEIIESEENDKPEIGSDGPRRRKPNKE

SEQ ID NO: 4453 - DNA, 1698 bp, Aspergillus nidulans FGSC A4
  CDS (1)..(1698)
atgcgtctcaacacagctcttacctccgctttggtctcttcggcctccctcatgggctacgcccatgccgaagacgactcaaccgccgatgctacatcggtcgttgagagacctactttcacggtcagtccgatccccaccagccttgaagctcccttcctggaacagttcacggacgactgggaatcgaggtggactccttcgcacgccaagaaggaagactccaagtcggaggaggattgggcttatgtcggcgaatggtccgttgaggaacccaccgtctacaagggtattgacggagacaagggtctggttgttaagaatgtcgcggcccaccacgccatctctgccaagttcccgaagaagatcgataacaagggcaagactcttgttgtccagtatgaggtcaagccgcaaaactcccttgtttgtggtggtgcctacatgaagctgctccaggataacaagaaggctcttgcggacgatttctccaacaccaccccctacgtgatcatgtttggtcccgacaagtgcggtgccactaacaaggttcacttcatcttccgccacaagaaccccaagactggtgaatatgaggagaagcacctgaaggctcctcctgctgctcgcaccagcaagctgagctccctttacaccctcatcgtccgccctgaccagtccttccaaattctcattgacggcgccgctgtcaagaacggcactctcctcgaggacttcaaccctcccgtcaaccccgagaaggagatcgacgaccccaaggacaagaaacccgacgactgggtcgatgaggccaagatccctgaccccgacgctaccaagcctgatgactgggatgaagacgccccctacgagattgttgatgagtctgccgagaagcctgacgattggctagaggatgagccgaacagcattcctgaccctgaggccgagaagcctgaagactgggatgatgaggaggacggcgactggattcctcccactgtccctaaccccaagtgcagtgaagtctccggatgtggtccctggtctcctcccttgatcaagaaccctgcctacaagggcaagtggactgctccgctcattgacaaccctgcctacaagggaccttgggctccccgcaagatcgccaaccctgactactttgaggacaagaccccctctaacttcgagcccatgggcgctattggtttcgagatctggaccatgcagaacgatatcctgttcgacaacatctacattggacactccgttgaggatgctgagaagctccgcaaggagacctttgatattaagcgtcccatcgaggaggccgaggaggaagcttctaagcccaagaaggagacaaaggcagctggcactagcgttagctttaaggaggatcccgtcaccttcgttcgtgagaaggttgaccacttcgttggcctcgccaaggaagaccccataaacgccgtcaagcaggttcccgaggtcgctggtggccttggtgcccttctcgtcaccatgatcctcattattgttggtgccatcggagccagcagccccgcgcccgcccccgtcaagaagggcaaggaggccgccaaagcttcaaaggagaaggccagcgaagctgtcagctccgctgcggagaccgccaagggcggagcgaccaagcgcaccacccgatcgtctgcggagtaa

SEQ ID NO: 4454 - protein, 565 aa, Aspergillus nidulans FGSC A4
MRLNTALTSALVSSASLMGYAHAEDDSTADATSVVERPTFTVSPIPTSLEAPFLEQFTDDWESRWTPSHAKKEDSKSEEDWAYVGEWSVEEPTVYKGIDGDKGLVVKNVAAHHAISAKFPKKIDNKGKTLVVQYEVKPQNSLVCGGAYMKLLQDNKKALADDFSNTTPYVIMFGPDKCGATNKVHFIFRHKNPKTGEYEEKHLKAPPAARTSKLSSLYTLIVRPDQSFQILIDGAAVKNGTLLEDFNPPVNPEKEIDDPKDKKPDDWVDEAKIPDPDATKPDDWDEDAPYEIVDESAEKPDDWLEDEPNSIPDPEAEKPEDWDDEEDGDWIPPTVPNPKCSEVSGCGPWSPPLIKNPAYKGKWTAPLIDNPAYKGPWAPRKIANPDYFEDKTPSNFEPMGAIGFEIWTMQNDILFDNIYIGHSVEDAEKLRKETFDIKRPIEEAEEEASKPKKETKAAGTSVSFKEDPVTFVREKVDHFVGLAKEDPINAVKQVPEVAGGLGALLVTMILIIVGAIGASSPAPAPVKKGKEAAKASKEKASEAVSSAAETAKGGATKRTTRSSAE

SEQ ID NO: 4455 - DNA, 1749 bp, Candida albicans SC5314
  CDS (1)..(1749): transl_table=12
atgaaatatgcattagtgttgttactttcattagtaaacgctcttaaatatgtgccatttgataaaacacaattagatccatcatcggtattcgaacaatttgattatccttctttaaattcatccccctggcaagtatcaactgccaaaaaatttgatgagggaagagatgaaatagttcgttatagtggtgaatggaaaattgaatcttcgacttcgaaatatcctggtttagaaggtgatttaggattagttatgaaatcaagagcttctcattatgccatttcctataaattacctcatgaagtgacaaataccaatcccaataataataaaacccaagatttagttttacaatatgaagtcaaattacaacaaggtttgacttgtggtggtgcttatataaaattattggatagttcaccttcaggttataaatttttcaattcagaaactccatatcaaattatgtttggtcctgatgtttgtggtagtgaaaataaaatccatttcattataagaaaaaaacttcccaatggtgccattgaagaaaaacatttaaaacataaaccaatggcaagaacaaatgaattgactaatttatatacattaattattaaatcaaatcaagattttgaaattagagttaatggacaagttgccaaagctgggaatttatataagaatcaaaaattatttaatccaccatttgaaccaccaaaagagattcctgatgttgatgataaaaaacctgatgattgggatgatagagcatatattcccgatcctaatgttgaaaaaccagaagattatgaattgaaacatgaataccctcaaattagagatcccaatgctgttaaaccagatgaatgggatgaactggcaccaaggtatatacctgatccagatgccgtcaagcctaaagattggaatgacgccgaaaaacaatgggaaccaccattgattgttaatccgaaatgtgctactggttgtggaccatgggaagcaccattaattccaaatcatgattacattggtccatggttcccacctgatatcaaaaacccaaattataatggtatttggaccccaagattaattcctaatccttattattatcaagtgaaaactccagggaaattagataaaccaattggtggaattggatttgaactttggagtattgaaagtgatattttatttgataatatctatttgggtaactccatagcagaagcagaaataattggtaatactacatttaaaatcaaatacgaattagaagctgatcaaagacgtgaaaacaaaccacgagttaaaaatgaacctgtggctccaccacggaattttgaagatataattcgtgatgattctatttctacattccaacaatttttaatttttatcaaattattttggttaaaacaatatgttcaattaaaagatttttattttgaattaacgttagatccaattggtttaataatggcaaatccattgaaaactttattgtatgcatttttatttttgttttcatttacgattttctttgggtttgcaagcacaatcatgtttttattacaaggaggtgaagcgtttggtagtagtagtagtactactaccactactacgacaactgatctgaatcgtaaaaatgtattaactgcagaagaaattgaaatccccagcagtcatgtacaaaaaatagaaattcttgatgaacaaatacatgtgagacaaagaaaatag

SEQ ID NO: 4456 - protein, 582 aa, Candida albicans SC5314
MKYALVLLLSLVNALKYVPFDKTQLDPSSVFEQFDYPSLNSSPWQVSTAKKFDEGRDEIVRYSGEWKIESSTSKYPGLEGDLGLVMKSRASHYAISYKLPHEVTNTNPNNNKTQDLVLQYEVKLQQGLTCGGAYIKLLDSSPSGYKFFNSETPYQIMFGPDVCGSENKIHFIIRKKLPNGAIEEKHLKHKPMARTNELTNLYTLIIKSNQDFEIRVNGQVAKAGNLYKNQKLFNPPFEPPKEIPDVDDKKPDDWDDRAYIPDPNVEKPEDYELKHEYPQIRDPNAVKPDEWDESAPRYIPDPDAVKPKDWNDAEKQWEPPLIVNPKCATGCGPWEAPLIPNHDYIGPWFPPDIKNPNYNGIWTPRLIPNPYYYQVKTPGKLDKPIGGIGFELWSIESDILFDNIYLGNSIAEAEIIGNTTFKIKYELEADQRRENKPRVKNEPVAPPRNFEDIIRDDSISTFQQFLIFIKLFWLKQYVQLKDFYFELTLDPIGLIMANPLKTLLYAFLFLFSFTIFFGFASTIMFLLQGGEAFGSSSSTTTTTTTTDSNRKNVLTAEEIEIPSSHVQKIEILDEQIHVRQRK

SEQ ID NO: 4457 - DNA, 1746 bp, Candida albicans SC5314
  CDS (1)..(1746): transl_table=12
atgaaatatgcattagtgttgttactttcattagtaaacgctcttaaatatgtgccatttgataaaacacaattagatccatcatcggtattcgaacaatttgattatccttctttaaattcatccccctggcaagtatcaactgccaaaaaatttgatgagggaagagatgaaatagttcgttatagtggtgaatggaaaattgaatcttcgacttcgaaatatcctggtttagaaggtgatttaggattagttatgaaatcaagagcttctcattatgccatttcctataaattacctcatgaagtgacaaataccaatcccaataataataaaacccaagatttagttttacaatatgaagtcaaattacaacaaggtttgacttgtggtggtgcttatataaaattattggatagttcaccttcaggttataaatttttcaattcagaaactccatatcaaattatgtttggtcctgatgtttgtggtagtgaaaataaaatccatttcattataagaaaaaaacttcccaatggtgccattgaagaaaaacatttaaaacataaaccaatggcaagaacaaatgaattgactaatttatatacattaattattaaatcaaatcaagattttgaaattagagttaatggacaagttgccaaagctgggaatttatataagaatcaaaaattatttaatccaccatttgaaccaccaaaagagattcctgatgttgatgataaaaaacctgatgattgggatgatagagcatatattcccgatcctaatgttgaaaaaccagaagattatgaattgaaacatgaataccctcaaattagagatcccaatgctgttaaaccagatgaatgggatgaactggcaccaaggtatatacctgatccagatgccgtcaagcctaaagattggaatgacgccgaaaaacaatgggaaccaccattgattgttaatccgaaatgtgctactggttgtggaccatgggaagcaccattaattccaaatcatgattacattggtccatggttcccacctgatatcaaaaacccaaattataatggtatttggaccccaagattaattcctaatccttattattatcaagtgaaaactccagggaaattagataaaccaattggtggaattggatttgaactttggagtattgaaagtgatattttatttgataatatctatttgggtaactccatagcagaagcagaattaattggtaatactacatttaaaatcaaatacgaattagaagctgatcaaagacgtgaaaacaaaccacgagttaaaaatgaacctgtggctccaccacggaattttgaagatataattcgtgatgattctatttctacattccaacaatttttaattttcatcaaattattttggttaaaacaatatgttcaattaaaagatttttattttgaattaacgttggatccaattggtttaataatggcaaatccattgaaaactttattgtatgcatttttatttttgttttcatttacaattttctttgggtttgcaagcacaatcatgtttttattacaaggaggtgaagcgtttggtagtagtagtagtattaccactactacgacaactgatctgaatcgtaaaaatgtattaactgcagaagaaattgaaatgcccagcaatcatgtacaaaaaatagaaattcttgatgaacaaatacatgtaagacaaagaaaatag

SEQ ID NO: 4458 - protein, 581 aa, Candida albicans SC5314
MKYALVLLLSLVNALKYVPFDKTQLDPSSVFEQFDYPSLNSSPWQVSTAKKFDEGRDEIVRYSGEWKIESSTSKYPGLEGDLGLVMKSRASHYAISYKLPHEVTNTNPNNNKTQDLVLQYEVKLQQGLTCGGAYIKLLDSSPSGYKFFNSETPYQIMFGPDVCGSENKIHFIIRKKLPNGAIEEKHLKHKPMARTNELTNLYTLIIKSNQDFEIRVNGQVAKAGNLYKNQKLFNPPFEPPKEIPDVDDKKPDDWDDRAYIPDPNVEKPEDYELKHEYPQIRDPNAVKPDEWDESAPRYIPDPDAVKPKDWNDAEKQWEPPLIVNPKCATGCGPWEAPLIPNHDYIGPWFPPDIKNPNYNGIWTPRLIPNPYYYQVKTPGKLDKPIGGIGFELWSIESDILFDNIYLGNSIAEAELIGNTTFKIKYELEADQRRENKPRVKNEPVAPPRNFEDIIRDDSISTFQQFLIFIKLFWLKQYVQLKDFYFELTLDPIGLIMANPLKTLLYAFLFLFSFTIFFGFASTIMFLLQGGEAFGSSSSITTTTTTDSNRKNVLTAEEIEMPSNHVQKIEILDEQIHVRQRK

SEQ ID NO: 4459 - DNA, 1656 bp, Cryptococcus neoformans var. neoformans B-3501A
  CDS (1)..(1656)
atgcgtccccagaacgttgctggagtagctggtaccggtgcactcatcatggccgctggcgcccttgcagaccagactgtcttccatcccacctctctcaccgcgcccttcatcgagcagttcatcgagtctatccccgactctcgatggaccgtctctcgagctaccaaacagacccccgtcggcgacgagatcttctcttatgtgggtcagtgggaggttgaggaacccgaggtttaccccggtatccctggtgacaagggtctcgttttgaagaccaaggcggcccaccacgccatctccactctcttcaccgaacccattgaccccaagggcaagtccctcgtcgttcaatacgaagtcaagcttcaaaagggtctcgagtgcggtggtgcctatatcaagttgttgaccgaccaacaagacgaaggccttcgtgctggtgaggattacactgacaagacccccttcaccatcatgttcggtcccgacaagtgtggttccaccaacaaggttcacttcatcttccgacacaagaaccctcttaccggtgaatgggaagagaaacacttgaagaaccctccttcccccaagatcaccaagaccaccgctctttacaccttgatcaccaaccctgaccagacctttgagatcctcatcaatgatgagtctgtcaggaagggtagcttgctggaagactttgatcctgcggtcaacccccccaaggagattgatgaccccgaggacttcaagcccgagacttgggtcgatgaagcagaaatcgaagacgtcactgctaccaagcctgacgactgggatgaggacgctcctatgatgatcactgatgcctctgccaccaagcctgaggactggcttgaggaggagcccgagaccattcctgaccccgaggctgagaagcctgaagaatgggatgacgaggaagatggtgactggatcccacctatggtccccaaccccaagtgtgaggacgtttccggctgtggtccttggactgctcctaagatcaggaaccccgattacaagggcaaatggactgttcccaggatccccaaccccgagtacaagggcccctgggccccccgaaagattgccaaccctgctttctttgaggaccttcacccctctgactttaccaaaattggcggtgtcggtatcgagctctggaccatgaccgaagacatcctcttcgacaacttgtacattggccatgacgctgctcaggccaaaaagtttgctgaggaaacttaccacgtcaagaagcctatcgagaaggaggctgagggctcaaatgaggatgaattggaggagccttcttctcttgttgaaaaggtccagctcaaggtttacgagttccttcaccttgccacctttgacattgcccaagccgtcaagcaaatgcccgaagtcgccgccggtctcgccgcagcggtcttcactctcctcggtatgcttcttgcgctctttggctttattggttccgctcctaccaaggtcaggcagactaccgtaaagaccaaggccgtggctcccgttgctcccgcgggtgaggaggagaagaaggccctcgatcaggctggtgtggaggttcctgctgagggctcgaagaagagggttactaggtctacaaaagagtaa

SEQ ID NO: 4460 - protein, 551 aa, Cryptococcus neoformans var. neoformans B-3501A
MRPQNVAGVAGTGALIMAAGALADQTVFHPTSLTAPFIEQFIESIPDSRWTVSRATKQTPVGDEIFSYVGQWEVEEPEVYPGIPGDKGLVLKTKAAHHAISTLFTEPIDPKGKSLVVQYEVKLQKGLECGGAYIKLLTDQQDEGLRAGEDYTDKTPFTIMFGPDKCGSTNKVHFIFRHKNPLTGEWEEKHLKNPPSPKITKTTALYTLITNPDQTFEILINDESVRKGSLLEDFDPAVNPPKEIDDPEDFKPETWVDEAEIEDVTATKPDDWDEDAPMMITDASATKPEDWLEEEPETIPDPEAEKPEEWDDEEDGDWIPPMVPNPKCEDVSGCGPWTAPKIRNPDYKGKWTVPRIPNPEYKGPWAPRKIANPAFFEDLHPSDFTKIGGVGIELWTMTEDILFDNLYIGHDAAQAKKFAEETYHVKKPIEKEAEGSNEDELEEPSSLVEKVQLKVYEFLHLATFDIAQAVKQMPEVAAGLAAAVFTLLGMLLALFGFIGSAPTKVRQTTVKTKAVAPVAPAGEEEKKALDQAGVEVPAEGSKKRVTRSTKE

SEQ ID NO: 4461 - DNA, 1776 bp, Strongylocentrotus purpuratus
  CDS (1)..(1776)
atgaaactgaaattcatactcctgactatcctcctcttggggactctcacattcatccgttgccaagacgatgaagatgaagatgattttgatagtgaggacctggatgttcaagtagaggaggaggaagacgttgaaccgattgaacaggtggagtattcacctccggaaccaacaggtccacataaccttgctgaaccgtttgacagtgcagatgttcttggcacaagatggattccatccaaggctaagaaggacggtgtcgatgaagacatctcaaagtatgacggaaagtgggccattgaagaagcagagacttcccctcttgccggagacttgggacttgtattgaagtccaaggccaaacatcatgccatatctgccaagttgaacaagccttttgtttttgaaaatgaaccattcattgtccaatatgaggttaagttccagaactcccatgattgtggtggtgcatacgtgaagctcctgactgatacgccagatctgtctttggattctgtatttgacaaaacaccatacaccatcatgttcggacctgacaaatgtggtgcagattctaagcttcacttcatcttcagacataaaaatcccagtaccggtgaatttcaggagaagcatgctaagaagccaactggtgcattcagccatgtcttcaccgacaagaaggcccatctcttcactttagtgatcaacaccgacaacaccttccaagttctcgtggatcagaaggtcgtcaactccggcagtctgctttcagatatgagtccccctgtaaacccacctgctgaggttgaggatcctgatgacaagaagccagctgactgggatgacaagaagaagatccctgagcctggtgcagagaagcccgaggattgggatgaagatgaacccaaggagatcgttgatgagtctgctgtacagcccgatggatggctggaggatgaacccgagctcatggacgaccccgatgcagagaaacccgacgactgggatgatgaaatggatggagaatgggaaccaccaaagatcaacaacgcgctgtgtgaagacgtcggatgtggcgaatggaaggctcccatggtgcccaacccagaatacaagggcaagtggaaggcaccttacattgataaccctaactaccaaggggaatggaagcccagagtgatccctaatccagacttctttgaggatctagaaccattcaaaatgtctcctatcggagctgctgccctggagctatggtcaatgagtgataagatcttgtttgataacttcatcatcaccaccgatcgagaggtagctgaccagtatgctgctgatagctttggtctcaagcgcaaggaaggagtcgttgcatcagctgagtccttcgtatcaggtctaatcgatgctgccactgagaggccgtggctgtgggctgtgtttgctctcgtcgttgtcatccctctcttcttctgtataagattctgcttaaaatcgaatccagaggagtatgaagttaagaagagggatggagcaactccagacgatgagagggaaggagaagatgaggatgaagaaggagagaaggctgaagaggaggatgtatcagcggaaggagatgccgtagtgagacaacgaaagaagaccaccaaggcagacctagaaggtcccacagaacaggctgaggaggaggcgacaccagaagaagcaccagcaccaaaagaaaaagccaccacacccaagaagcctaagacgcgctcaagaaaggaatga

SEQ ID NO: 4462 - protein, 591 aa, Strongylocentrotus purpuratus
MKLKFILLTILLLGTLTFIRCQDDEDEDDFDSEDLDVQVEEEEDVEPIEQVEYSPPEPTGPHNLAEPFDSADVLGTRWIPSKAKKDGVDEDISKYDGKWAIEEAETSPLAGDLGLVLKSKAKHHAISAKLNKPFVFENEPFIVQYEVKFQNSHDCGGAYVKLLTDTPDLSLDSVFDKTPYTIMFGPDKCGADSKLHFIFRHKNPSTGEFQEKHAKKPTGAFSHVFTDKKAHLFTLVINTDNTFQVLVDQKVVNSGSLLSDMSPPVNPPAEVEDPDDKKPADWDDKKKIPEPGAEKPEDWDEDEPKEIVDESAVQPDGWLEDEPELMDDPDAEKPDDWDDEMDGEWEPPKINNALCEDVGCGEWKAPMVPNPEYKGKWKAPYIDNPNYQGEWKPRVIPNPDFFEDLEPFKMSPIGAAALELWSMSDKILFDNFIITTDREVADQYAADSFGLKRKEGVVASAESFVSGLIDAATERPWLWAVFALVVVIPLFFCIRFCLKSNPEEYEVKKRDGATPDDEREGEDEDEEGEKAEEEDVSAEGDAVVRQRKKTTKADLEGPTEQAEEEATPEEAPAPKEKATTPKKPKTRSRKE

SEQ ID NO: 4463 - DNA, 1758 bp, Tribolium castaneum (red flour beetle)
  CDS (1)..(1758)
atgcttagaagtctcgttccggcagtaatcacgttattgttgatattttcggcggtaaaatgtgacgaagtggacgattctgacgaggctactgtggaagtagaaccggaagaatcacacattgatatcccctacgaaagtccgagcccccttgacccgaaaaaggtctatttcgccgagcatttcgacgatccagaccagtttgcgaaacgttggataaaatcccaagcgaagaaagaagggatttccgaagacatcgcaaaatacgacggtgaatggcaacttgaaccaacccaaaaagacagtctagtgggcgacaaaggtttagtgcttaaatcaaaggctaaacacgctgctattgcctcctctctcctaaaaccgtttatttttgatactaaaccattaatcgtgcaatatgaagtaatattccaagacggccaagaatgtggcggagcctacttgaagctgctcacccaggactccgccagtaaaaacttgaacaacttccacgataaaaccccctactcgatcatgttcggccccgacaagtgcggtaacgaccacaagctccactttatcttcaagcaccgcaaccctctcaacgggagcgtcgaggaaaagcattgcaaaaaacccaaagaccgcattgaggaagtcttctccgacaaactcccccacttgttcacccttgtcctgcaccctgacaacaccttcgagatcctaatcgacaacaaagtggtcaattcgggaagtttgcttgaggatttcaccccggcagtgaatcctccgaaagaaattgacgatcctaatgacaagaaacctgaggattgggatgaaagggagaaaatccctgacccagatgccgtgaaacctgacgattgggatgaggatgcgccggctcagattgttgatgaatcagcggtgaaaccggaaggttggctggataatgaaccgtcgcatgttttcgatcctgatgcaaagaaaccagaagattgggattcggaaatggacggggagtgggaaccaccgcttattgataatcccgcttgtaaggatgctgtcgggtgtgggccttgggagcccccacttatcaataatcccgattataaggggaagtggagggcgccgcttatcgataatcctaattataaggggaagtggaggcccaggaggatccccaatcccgagttcttcgaagataagcatccctttaaaatgcagactgttaccgctgttggatttgagttatggtcaatgtcaaaggacattttcttcgacaatattattattaccgacgatattaccgttgcgaaccattgggcagacgccacttttgaaaaaaagaagcaaaagatcgccaaggattcggaaagcgtaattcaaaaattagctaccttgaccaatgattacccttggctttggggagtatacattatcgtactaggcatccctgttgtttttgtattatacctttgctgcaagcctggatcctctgctagtcaaattcaggagaaagaggagcttcgacaagcagcgcaacataaaaagactgacgaaacgactgaagatgttgtagaagaagaaggtaaagaagaagaagaagatgaagtagaagctgaaaatgcagaagacgacgatagagaaaagaattcagggcctgattccgacgaagaagaggaatcagaggaaaaaacagaggaacagtcatccaaaggtgcaggtgacggcgcgaggaaacgaaaagttcgtaaggagtga

SEQ ID NO: 4464 - protein, 585 aa, Tribolium castaneum (red flour beetle)
MLRSLVPAVITLLLIFSAVKCDEVDDSDEATVEVEPEESHIDIPYESPSPLDPKKVYFAEHFDDPDQFAKRWIKSQAKKEGISEDIAKYDGEWQLEPTQKDSLVGDKGLVLKSKAKHAAIASSLLKPFIFDTKPLIVQYEVIFQDGQECGGAYLKLLTQDSASKNLNNFHDKTPYSIMFGPDKCGNDHKLHFIFKHRNPLNGSVEEKHCKKPKDRIEEVFSDKLPHLFTLVLHPDNTFEILIDNKVVNSGSLLEDFTPAVNPPKEIDDPNDKKPEDWDEREKIPDPDAVKPDDWDEDAPAQIVDESAVKPEGWLDNEPSHVFDPDAKKPEDWDSEMDGEWEPPLIDNPACKDAVGCGPWEPPLINNPDYKGKWRAPLIDNPNYKGKWRPRRIPNPEFFEDKHPFKMQTVTAVGFELWSMSKDIFFDNIIITDDITVANHWADATFEKKKQKIAKDSESVIQKLATLTNDYPWLWGVYIIVLGIPVVFVLYLCCKPGSSASQIQEKEELRQAAQHKKTDETTEDVVEEEGKEEEEDEVEAENAEDDDREKNSGPDSDEEEESEEKTEEQSSKGAGDGARKRKVRKE

SEQ ID NO: 4465 - DNA, 2034 bp, Oryza sativa subsp. indica
  CDS (100)..(1713)
agccgcgagagagagagagagagagagagagagagacgcagctctgttcttcttctcctctctggaaatttctggatctcgcgagagatcgggaggacgatggtgggtgggcgcgcgctcctgccgctgcttctgctctccgcgctgctcgtccagatccgcgcctccgatccgctgttctacgagccgttcgacgagagcttcgaggggaggtgggttctctccgggaaggacgactacaaaggtgtatggaagcacgaaaagagtgatggacatgaagactatggcctgcttgttagtgagaaggccaagaaatatgccataatcaaggagcttgatgagcctgttactttgaaggatgggactgttgtcctgcagtttgaagtgaggcttcagagtggccttgagtgtggaggtgcatatcttaagtacattcgtcctcaggatgctgcatgggatgccaaggagtttgataatgagactccttacactattatgtttggtcctgacaaatgtggatcaactaacaaggtgcatttcatccttaagcacaagaaccccaagactggcaagtatgttgaacaccacctcaagttcccaccttctgtcccatatgataagctctctcatgtctacacggctatcttgaagcctgataatgaggtgagaattttggttgatggggaagagaagaagaaggcaaacttcctttctgctgatgattttgagccatcacttatcccatccaagaccattcctgatcctgatgacaaaaagccagaagactgggatgagagagctaaaatccctgatccagatgctgtgaagcctgatgactgggatgaggatgcccccatggaaattgaggacgaagaggccacaaagccagaggggtggctggatgatgagccagaggaaattgatgatccggaggctaacaagcctgaagactgggatgatgaggaggatggagaatgggaagcaccaaagattgacaaccccaagtgtgaagaggctcctggttgtggtgagtggaagaggccgatgaagcagaaccctgcttacaagggcaagtggcatgcgcctcttatcgacaaccccaactacaaaggaatctggaagccccaagagatccccaaccctgagtactttgagcttgacaagcctgactctgatccgattgccgctattgggattgagatctggacgatgcaagatggcatcctgtttgacaacattttgatcgctgatgatgagaaggttgccacttctatcctggagaagacttggaagcccaagtacgaagtagagaaggagaaggagaaggctgaggaggcagcagcggcagcaggtgatggtctttctgagttccagaagaagatctttgacgttctgtacaaactcgctgacattccattcttggaaccctacaagactaagatcattgatgtaattgagaagggagagaagcagcccaacatcaccattggaattctggtctccatcgttgtcgtctttgtgactgtgctcttcaggatcctgttcggcggcaagaagccagcggctcctgtgaagcccgtagccgaggtcaaaaaaccaaagtctaccgagtccgaagcagctggaagcagcggtgacaaggaggacgagaaggaagaggaagagaaggatggagctgctgccccacgccggaggtcccgaagggagacatgagacacaacataagcctttgattttgacgtcttatcgcggccattttggcggctgcttttttcctttttcgagaacttgggcttttatgttttttgagtgtataataggagattcatgtcgcctatgctccctgcagatgatgatttggtacccctgcttaaatggttagaacttcacggacagtagaagttagtcatgttgggtttatttgtgtgctgtgcctgacatataatcactttcttgatcacctagtgattattttctcgtagatagttgaaacatcaagagtctctttcagaagtgtgaggttcagtgcaagct

SEQ ID NO: 4466 - protein, 537 aa, Oryza sativa subsp. indica
MVGGRALLPLLLLSALLVQIRASDPLFYEPFDESFEGRWVLSGKDDYKGVWKHEKSDGHEDYGLLVSEKAKKYAIIKELDEPVTLKDGTVVLQFEVRLQSGLECGGAYLKYIRPQDAAWDAKEFDNETPYTIMFGPDKCGSTNKVHFILKHKNPKTGKYVEHHLKFPPSVPYDKLSHVYTAILKPDNEVRILVDGEEKKKANFLSADDFEPSLIPSKTIPDPDDKKPEDWDERAKIPDPDAVKPDDWDEDAPMEIEDEEATKPEGWLDDEPEEIDDPEANKPEDWDDEEDGEWEAPKIDNPKCEEAPGCGEWKRPMKQNPAYKGKWHAPLIDNPNYKGIWKPQEIPNPEYFELDKPDSDPIAAIGIEIWTMQDGILFDNILIADDEKVATSILEKTWKPKYEVEKEKEKAEEAAAAAGDGLSEFQKKIFDVLYKLADIPFLEPYKTKIIDVIEKGEKQPNITIGILVSIVVVFVTVLFRILFGGKKPAAPVKPVAEVKKPKSTESEAAGSSGDKEDEKEEEEKDGAAAPRRRSRRET

SEQ ID NO: 4467 - DNA, 1710 bp, Oryza sativa subsp. japonica
  CDS (1)..(1710)
atggcgagtgtcaccggatctgaaatcggcggaactcaccgtgatactaggacgagggaaactgaatgccgacaaccacttcgggaaccaaaagacaacaaacaacgacatgggaaccacgaccatacgcccatacgggaagacccgactagaattacaactaatagtaggctgttctatgagccgttcgacgagagcttcgaggggaggtgggttctctccgggaaggacgactacaaaggtgtatggaagcacgaaaagagtgatggacatgaagactatggcctgcttgttagtgagaaggccaagaaatatgccataatcaaggagcttgatgagcctgttactttgaaggatgggactgttgtcctgcagtttgaagtgaggcttcagaatggccttgagtgtggaggtgcatatcttaagtacattcgtcctcaggatgctgcatgggatgccaaggagtttgataatgagactccttacactattatgtttggtcctgacaaatgtggatcaactaacaaggtgcatttcatccttaagcacaagaaccccaagactggcaagtatgttgaacaccacctcaagttcccaccttctgtcccatatgataagctctctcatgtctacacggctatcttgaagcctgataatgaggtgagaattttggttgatggggaagagaagaagaaggcaaacttcctttctgctgatgattttgagccatcacttatcccatccaagaccattcctgatcctgatgacaaaaagccagaagactgggatgagagagctaaaatccctgatccagatgctgtgaagcctgatgactgggatgaggatgcccccatggaaattgaggacgaagaggccacaaagccagaggggtggctggatgatgagccagaggaaattgatgatccggaggctaacaagcctgaagactgggatgatgaggaggatggagaatgggaagcaccaaagattgacaaccccaagtgtgaagaggctcctggttgtggtgagtggaagaggccgatgaagcagaaccctgcttacaagggcaagtggcatgcgcctcttatcgacaaccccaactacaaaggaatctggaagccccaagagatccccaaccctgagtacttcgagcttgacaagcctgactctgatccgattgccgctattgggattgagatctggacgatgcaagatggcatcctgtttgacaacattttgatcgctgatgatgagaaggttgccacttctatcctggagaagtcttggaagcccaagtacgaagtagagaaggagaaggagaaggctgaggaggcagcagcggcagcaggtgatggtctttctgagttccagaagaagatctttgacgttctgtacaaactcgctgacattccattcttggaaccctacaagactaagatcattgatgtaattgagaagggagagaagcagcccaacatcaccattggaattctggtctccatcgttgtcgtctttgtgactgtgctcttcaggatcctgttcggcggcaagaagccagcggctcctgtgaagcccgtagccgaggtcaaaaaaccaaagtctaccgagtccgaagcagctggaagcagcggtggcaaggaggacgagaaggaagaggaagagaaggatggagctgctgccccacgccggaggtcccgaagggagacatga

SEQ ID NO: 4468 - protein, 569 aa, Oryza sativa subsp. japonica
MASVTGSEIGGTHRDTRTRETECRQPLREPKDNKQRHGNHDHTPIREDPTRITTNSRLFYEPFDESFEGRWVLSGKDDYKGVWKHEKSDGHEDYGLLVSEKAKKYAIIKELDEPVTLKDGTVVLQFEVRLQNGLECGGAYLKYIRPQDAAWDAKEFDNETPYTIMFGPDKCGSTNKVHFILKHKNPKTGKYVEHHLKFPPSVPYDKLSHVYTAILKPDNEVRILVDGEEKKKANFLSADDFEPSLIPSKTIPDPDDKKPEDWDERAKIPDPDAVKPDDWDEDAPMEIEDEEATKPEGWLDDEPEEIDDPEANKPEDWDDEEDGEWEAPKIDNPKCEEAPGCGEWKRPMKQNPAYKGKWHAPLIDNPNYKGIWKPQEIPNPEYFELDKPDSDPIAAIGIEIWTMQDGILFDNILIADDEKVATSILEKSWKPKYEVEKEKEKAEEAAAAAGDGLSEFQKKIFDVLYKLADIPFLEPYKTKIIDVIEKGEKQPNITIGILVSIVVVFVTVLFRILFGGKKPAAPVKPVAEVKKPKSTESEAAGSSGGKEDEKEEEEKDGAAAPRRRSRRET

SEQ ID NO: 4469 - DNA, 1674 bp, Pichia angusta
  CDS (1)..(1674)
atgaaagtcagccgtccaatcattcttctgtttctttcactggtctcgtatgcggcggatgttgagcggaaagacttcttgccattgagtcttgagtccgacgcttttttcgagcaatttaacgagacatgggcttcaaggtggaaaccttctcacagcaagcgcgatgaaaattttgtgtatcgaggcgaatgggatgttgaagagccaactgtgaatcctggattgaaaggcgacaagggtcttgttgcgaagacagaggccgcccatcatgctatcagtgcaagattgcctactcctttcgacaacaccaacaacaccttggtgttgcaatacgaggtcaagttgcaaaaaggacttgaatgcggtggtgcatatatcaagttgctgagccaggaaggtggagttagtgactcggttgagtttagcaacgacactccataccaggtcatgtttggtcctgacaaatgtggaatgtccaacaaggtccactttatacttcgcagaaaaaaccctaaaacaggtgaatacgaggaaaaacatctcaaagtgcctccaatggcaaggatcgtgaaaacatctacactttacacgttgataattaagcctaaccaagactttgagatcagaatcaacggcgaagttgcaaaagcaggctcactgttggattccagatacttcgatctgactcctccaaaggaaatcgacgatcctaacgacgagaagccagctgattgggttgacgacgagctgatcccagaccctaatgctgtcaagccggaggattgggatgaagacgctccatatttgatcccagatccaaacgcagttaagccggaggactgggatgaggatgctgaggcatacattcctgatccagatgcagtcaaacctgagtactgggacgaggaagaggacggagaatggattgctccgaaaatcccaaacccagcttgtgaacagcacggctgtggaccatggtctgcgccaaaaatcaggaacccagattacaaaggcaaatggaccccagaattgattgagaacccagattacaaggggccatggtctccaagaaagattcctaacccggaatactacgaggacccaactccctcgaatctcgagcctatcggtgcgttgggatttgagctttggactatgactgactccattatgtttgacaacatatatcttggccattccatcgaggaagcagagtacattggtaacaacacattccttccaaaggtcgagattgaagaacagatagctgctgccaatgctcctcaagccaagtatgatgctgaagagcctgaaaaacagattgaagagcaatctttggtctcggacttgttggataagtcggtggatagagttttgaaagtttatgcttctggaaaagcatattgggccgacctcttggacgacccaaccaaaactcttctgaaccgccctggtgaggcatttttctttgcttccgtggttgttggcactattaccacgacttttgctatttctactaccattgtcagtatatttgctactttgtttgctccatccactcctcagccagtcaaaagaagcgaggctaaagagcggatcgagtctgtgaaagagaaggctaccgcgtccgattcgaaggtcaatgagacagaagctgtcaagagaggatag

SEQ ID NO: 4470 - protein, 557 aa, Pichia angusta
MKVSRPIILLFLSLVSYAADVERKDFLPLSLESDAFFEQFNETWASRWKPSHSKRDENFVYRGEWDVEEPTVNPGLKGDKGLVAKTEAAHHAISARLPTPFDNTNNTLVLQYEVKLQKGLECGGAYIKLLSQEGGVSDSVEFSNDTPYQVMFGPDKCGMSNKVHFILRRKNPKTGEYEEKHLKVPPMARIVKTSTLYTLIIKPNQDFEIRINGEVAKAGSLLDSRYFDLTPPKEIDDPNDEKPADWVDDELIPDPNAVKPEDWDEDAPYLIPDPNAVKPEDWDEDAEAYIPDPDAVKPEYWDEEEDGEWIAPKIPNPACEQHGCGPWSAPKIRNPDYKGKWTPELIENPDYKGPWSPRKIPNPEYYEDPTPSNLEPIGALGFELWTMTDSIMFDNIYLGHSIEEAEYIGNNTFLPKVEIEEQIAAANAPQAKYDAEEPEKQIEEQSLVSDLLDKSVDRVLKVYASGKAYWADLLDDPTKTLLNRPGEAFFFASVVVGTITTTFAISTTIVSIFATLFAPSTPQPVKRSEAKERIESVKEKATASDSKVNETEAVKRG

SEQ ID NO: 4471 - DNA, 1620 bp, Vitis vinifera
  CDS (1)..(1620)
  misc_feature (1477)..(1477): k is g or t
atgggagaagggaaacgagtttctctgctacccctatatgttgtgtttgctgtaatagcttgcgcatcacttcagctatgcgcttctgattctatcttctacgagtctttcgacgacgattttgaagggcgttggatcgtttctgagaaagaagactataaaggtgtatggaaacatgcaaagagtgacggacatgaggatcatgggcttcttgtgagtgagaaagctaggaagtatgctatagtgaaagagcttgatgaggcagtgagtctaaaggatggaactgctgttctccagtttgagactaggctccagaatgggcttgagtgtggtggtgcatatctaaaatatcttcgacctcaggatgctacatggaaatccaaagaatttgacaatgaatctccctattctatcatgtttggacctgacaaatgtgggtctacaaacaaggtgcactttatcgtaaagcataagaacccgaagagtggggaatacattgaacaccatctcaagtatccaccctctgttccatctgacaaattatctcatgtctatactgcgattttgaagcctgatcatgaggtgcgaattctgattgatggtgaggaaaagaagaaggcaaatttcctctcatctgaagattttgagcctccatttatccctgctaagaccattcctgacccagatgataagaaaccagaggattgggatgagaggccaaaaattccagaccccaatgcggtaaagcctgatgactgggatgaggatgcacccatggaaattgaagatgaagaagcagtaaaacctgaaggatggttggatgatgaacctgaggagatagatgatcccgaagcctccaaaccagaagattgggatgatgaggaggatggtgaatgggaggcaccaaagatagataacccaaagtgtgagattgcacctggttgtggtgaatggaagaagccattgaagaggaatccagcttacaaggggaaatggcatgcccctcttattgacaaccccaattacaagggtatttggaagcctcagcagattccaaaccctgactattttgaacttgatcatcctgacattgagcctgttgctgccattggcattgagatttggacaatgcaggatggtatattgtttgacaatattttgataactagtgatgagaagactgcagaatcatatcgggagaccacatggaagccaaaatttgaagttgagaaagagaaacagaaagctgaggatgcagctgctggttttgatgttccctcaggcttccagaagaaggtatttgacctcctctacaagattgcggatatttccttcttaaatgcatataaacccaagcttttggatctaattgagaagggagagaaacaaccaaacctcacgattggaatccttgtctccattgtcatcgttttcttgactattatctttaagatcatttttggtgggaagaagccgktgaaaatcaccaggcaaacaaataactcaacagttgctgagacatcaaatgatcaaggaagcagcagagagaaagaagaagagaatgaggaggaagatactaatgctcctcctcgaaagaggtctacgaggcgcgaaaattga

SEQ ID NO: 4472 - protein, 539 aa, Vitis vinifera
  misc_feature (493)..(493): The Xaa at location 493 stands for Leu, or Val.
MGEGKRVSLLPLYVVFAVIACASLQLCASDSIFYESFDDDFEGRWIVSEKEDYKGVWKHAKSDGHEDHGLLVSEKARKYAIVKELDEAVSLKDGTAVLQFETRLQNGLECGGAYLKYLRPQDATWKSKEFDNESPYSIMFGPDKCGSTNKVHFIVKHKNPKSGEYIEHHLKYPPSVPSDKLSHVYTAILKPDHEVRILIDGEEKKKANFLSSEDFEPPFIPAKTIPDPDDKKPEDWDERPKIPDPNAVKPDDWDEDAPMEIEDEEAVKPEGWLDDEPEEIDDPEASKPEDWDDEEDGEWEAPKIDNPKCEIAPGCGEWKKPLKRNPAYKGKWHAPLIDNPNYKGIWKPQQIPNPDYFELDHPDIEPVAAIGIEIWTMQDGILFDNILITSDEKTAESYRETTWKPKFEVEKEKQKAEDAAAGFDVPSGFQKKVFDLLYKIADISFLNAYKPKLLDLIEKGEKQPNLTIGILVSIVIVFLTIIFKIIFGGKKPXKITRQTNNSTVAETSNDQGSSREKEEENEEEDTNAPPRKRSTRREN

SEQ ID NO: 4473 - DNA, 1767 bp, Crassostrea gigas
  CDS (1)..(1767)
atgaaatttaacacagtatatattgtattcctgggagtgtgtctgattggggcaacatcagcagatacagatgatgaagatgatgatgttcaggtagaagtagaggaggacgatgaagtaagagtggaaaagccacagtttgtgcctccaactatacagaagaatgtgcactttgcagattcatttaacaaaaaagatgaattcaaaagcagatggacagtttcacaagcaaagaaagatggggctgaggaaaatttatctaaatatgacggtaaatggaaggtggaggtacctaagagtagtgcagtggaaggagatctcggcctggtcctcaagtccaaagcaaagcatcacgctgtggcatccaaactgaataaacctttcaagtttgatggcaaacccttatttgtacagtatgaagtgaaatatcaagatggtatcgactgtggaggagcctacgtcaagcttctgtcagccgatccagctttagacttgaaacaatttcatgataaaactccatacactattatgtttggtccagacaaatgtggactagacaataagcttcacttcattttccgtcacaaaaatcccaagactggggaaattgaggaaaaacatgccaagaagccatccgctgctctggatagttacttcacagacaagaagacacatcaatactccctagttataaatccagataacagctttgaagtgtctgttgatggttctgttgtcaattctgggtcattgttggaagatgtcagccctccagttaacccccctaaagagatagaagatcccaatgacaagaagccagaggactgggacgagaaggaaaagattcctgacccagatgcagagaaaccagaagattgggatgaaaatgaaccagagaaaatagtcaattcagaagcaaccaaacctgatggatggctagaggatgaaaacaagcttgtcccagaccctgatgcagagaaacccaaggactgggatgaagaaatggatggtgaatgggaagctcctcttattgaaaaccctaagtgttcagatgctcctggatgtggaaaatgggaacaaccgatgatcaaaaatccaaaatacaagggcaaatggaggccccctatgatagataacccaaattatcagggtatatggaaaccaagaagaataccaaatcctaacttttttgaagatcttgatccatacaaattgaccccaataaatgctgtgggtctggagctgtggtcaatgacagatgagattgtgttcgacaactttttggtgacagatgataagggggtagcagagaaatggacagagccgacattccaaattaaatctgcagcagaaaaggcctcctctggtggtcgaagtgttatggatgccattagtgacgctactagagagagaccctggctatgggctcttatcttagtagtggtggtactgccaattgttcttattattgcatactgttgtatgtctaaatcagagcctgagactctagctgaagcaaagaaaaccgacgcagtgtcaccagatgatgaaaagaaagaggagtctgcggacaaggaggaaaagacaggaccagggggagacaacaaacccagcaccaagaaatccaaggccagtctagaggccacagaggatgatggagatgatgaagatgaagtggatgctgaagaagaggaggaagaagcacaggagaagaacagcgaatcaccaagacgatctccaagaaagaggaagtctagaaaggattga

SEQ ID NO: 4474 - protein, 588 aa, Crassostrea gigas
MKFNTVYIVFLGVCLIGATSADTDDEDDDVQVEVEEDDEVRVEKPQFVPPTIQKNVHFADSFNKKDEFKSRWTVSQAKKDGAEENLSKYDGKWKVEVPKSSAVEGDLGLVLKSKAKHHAVASKLNKPFKFDGKPLFVQYEVKYQDGIDCGGAYVKLLSADPALDLKQFHDKTPYTIMFGPDKCGLDNKLHFIFRHKNPKTGEIEEKHAKKPSAALDSYFTDKKTHQYSLVINPDNSFEVSVDGSVVNSGSLLEDVSPPVNPPKEIEDPNDKKPEDWDEKEKIPDPDAEKPEDWDENEPEKIVNSEATKPDGWLEDENKLVPDPDAEKPKDWDEEMDGEWEAPLIENPKCSDAPGCGKWEQPMIKNPKYKGKWRPPMIDNPNYQGIWKPRRIPNPNFFEDLDPYKLTPINAVGLELWSMTDEIVFDNFLVTDDKGVAEKWTEPTFQIKSAAEKASSGGRSVMDAISDATRERPWLWALILVVVVLPIVLIIAYCCMSKSEPETLAEAKKTDAVSPDDEKKEESADKEEKTGPGGDNKPSTKKSKASLEATEDDGDDEDEVDAEEEEEEAQEKNSESPRRSPRKRKSRKD

SEQ ID NO: 4475 - DNA, 1611 bp, Vitis vinifera
  CDS (1)..(1611)
atggaaggaaggcagatccgtgcggtgttggtgttggtagtgatttcttgcgttggcttccagatccgcgcttctgatccgatctttattgagtccttcgatgagtctttcgatgggcgctggattgtttctgagaaagacgactataaaggtatatggaaacactcaaagagcgagggacatgatgattatgggcttcttgtcagtgagcaggcaaagaagtatgcaatagtgaaagagcttgatgaagccgttagtctcaaagatggaaccattgttctgcaatttgaggtgcggctccagaaaggattggaatgtggtggtgcatacttgaaatacctccgaccccaggaggctggatggaaacctgctgagtttgataatgactctccatactccataatgtttggaccagacaaatgtgggtcgacaaacaaggtgcacttcatccttaagcacaagaaccccaaaagtgggaaatatgttgagcaccatctcaagtaccctccttctgtgccctctgacaaactgtctcatgtctacaccgcaatattgaaacctgataatgaactgcggattctgattgatggggaagagaagaagaaggcaaatttcctctcagctgaagattttgagccagctctaattcctgctgagactattccggatccaaatgataagaagccagaggattgggatgaaagggcaaagattccagacccagatgcagtgaagccagatgattgggatgaggatgcacccatggagattgaagatgaggaagctgtcaagcctgaagggtggttggatgatgagcctgaggagatcgatgatcctgatgcttcaaagccagaagattgggatgatgaggaggacggtgaatgggaagctcctaaaattgataacccaaagtgtgagatagcacctggatgtggtgagtggaagaggccaatgaagaggaatcctgcttacaaaggaaaatggcatgcccctctaattgacaatccagattataagggcatttggaagcctcagcagatcccaaaccctgattactttgagctcgacagacctgattttgaacctattactgccattggcatcgagatttggacaatgcaagatggtgttttgtttgataatattttgatagccaatgatgagaaggttgcagaagcatacagggacactacatggaagctgaagtttgaagtcgagaaagaaaaacaaaaggctgaggaagcagcatctggtctctcagatggcctctctggcttgcagaaggcagtttttgacattctctacaaaataggtggcttgcctttcttgagtgcttacaaagtccagatctttgatctcattgaaaagggagaaaaacaaccaaatttgacaattggcatcctcgtatccattgtggtggttatcttgtcggttttctttaaaatcctttttggtgggaaaaaaccagcggtcaatgtcactgagacaaagaatgaggtgcctgcagagacttctgataatcaaggaagcagtgcagagaaagaagatgagaatgagaatgaagatgcggctgctgctgctcctcgcaggaggactagaagggatacctga

SEQ ID NO: 4476 - protein, 536 aa, Vitis vinifera
MEGRQIRAVLVLVVISCVGFQIRASDPIFIESFDESFDGRWIVSEKDDYKGIWKHSKSEGHDDYGLLVSEQAKKYAIVKELDEAVSLKDGTIVLQFEVRLQKGLECGGAYLKYLRPQEAGWKPAEFDNDSPYSIMFGPDKCGSTNKVHFILKHKNPKSGKYVEHHLKYPPSVPSDKLSHVYTAILKPDNELRILIDGEEKKKANFLSAEDFEPALIPAETIPDPNDKKPEDWDERAKIPDPDAVKPDDWDEDAPMEIEDEEAVKPEGWLDDEPEEIDDPDASKPEDWDDEEDGEWEAPKIDNPKCEIAPGCGEWKRPMKRNPAYKGKWHAPLIDNPDYKGIWKPQQIPNPDYFELDRPDFEPITAIGIEIWTMQDGVLFDNILIANDEKVAEAYRDTTWKLKFEVEKEKQKAEEAASGLSDGLSGLQKAVFDILYKIGGLPFLSAYKVQIFDLIEKGEKQPNLTIGILVSIVVVILSVFFKILFGGKKPAVNVTETKNEVPAETSDNQGSSAEKEDENENEDAAAAAPRRRTRRDT

SEQ ID NO: 4477 - DNA, 1629 bp, Vitis vinifera
  CDS (1)..(1629)
atgggagaagggaaacgagtttctctgctacccctatatgttgtgtttgctgtaatagcttgcgcatcacttcagctatgcgcttctgattctatcttctacgagtctttcgacgacgattttgaagggcgttggatcgtttctgagaaagaagactataaaggtgtatggaaacatgcaaagagtgacggacatgaggatcatgggcttcttgtgagtgagaaagctaggaagtatgctatagtgaaagagcttgatgaggcagtgagtctaaaggatggaactgctgttctccagtttgagactaggctccagaatgggcttgagtgtggtggtgcatatctaaaatatcttcgacctcaggatgctacatggaaatccaaagaatttgacaatgaatctccctattctatcatgtttggacctgacaaatgtgggtctacaaacaaggtgcactttatcgtaaagcataagaacccgaagagtggggaatacattgaacaccatctcaagtatccaccctctgttccatctgacaaattatctcatgtctatactgcgattttgaagcctgatcatgaggtgcgaattctgattgatggtgaggaaaagaagaaggcaaatttcctctcatctgaagattttgagcctccatttatccctgctaagaccattcctgacccagatgataagaaaccagaggattgggatgagaggccaaaaattccagaccccaatgcggtaaagcctgatgactgggatgaggatgcacccatggaaattgaagatgaagaagcagtaaaacctgaaggatggttggatgatgaacctgaggagatagatgatcccgaagcctccaaaccagaagattgggatgatgaggaggatggtgaatgggaggcaccaaagatagataacccaaagtgtgagattgcacctggttgtggtgaatggaagaagccattgaagaggaatccagcttacaaggggaaatggcatgcccctcttattgacaaccccaattacaagggtatttggaagcctcagcagattccaaaccctgactattttgaacttgatcatcctgacattgagcctgttgctgccattggcattgagatttggacaatgcaggatggtatattgtttgacaatattttgataactagtgatgagaagactgcagaatcatatcgggagaccacatggaagccaaaatttgaagttgagaaagagaaacagaaagctgaggatgcagctgctggttttgatgttccctcaggcttccagaagaaggtatttgacctcctctacaagattgcggatatttccttcttaaatgcatataaacccaagcttttggatctaattgagaagggagagaaacaaccaaacctcacgattggaatccttgtctccattgtcatcgttttcttgactattatctttaagatcatttttggtgggaagaagccggtgagcaaacaaataactcaacagttgctgagacatcaaatgatcaaggaagcagcagagagaaagaagaagagaatgaggaggaagatactaatgctcctcctcgaaagaggtctacgaggcgcgaaaattgatttaaaaggaaaaaattag

SEQ ID NO: 4478 - protein, 542 aa, Vitis vinifera
MGEGKRVSLLPLYVVFAVIACASLQLCASDSIFYESFDDDFEGRWIVSEKEDYKGVWKHAKSDGHEDHGLLVSEKARKYAIVKELDEAVSLKDGTAVLQFETRLQNGLECGGAYLKYLRPQDATWKSKEFDNESPYSIMFGPDKCGSTNKVHFIVKHKNPKSGEYIEHHLKYPPSVPSDKLSHVYTAILKPDHEVRILIDGEEKKKANFLSSEDFEPPFIPAKTIPDPDDKKPEDWDERPKIPDPNAVKPDDWDEDAPMEIEDEEAVKPEGWLDDEPEEIDDPEASKPEDWDDEEDGEWEAPKIDNPKCEIAPGCGEWKKPLKRNPAYKGKWHAPLIDNPNYKGIWKPQQIPNPDYFELDHPDIEPVAAIGIEIWTMQDGILFDNILITSDEKTAESYRETTWKPKFEVEKEKQKAEDAAAGFDVPSGFQKKVFDLLYKIADISFLNAYKPKLLDLIEKGEKQPNLTIGILVSIVIVFLTIIFKIIFGGKKPVSKQITQQLLRHQMIKEAAERKKKRMRRKILMLLLERGLRGAKIDLKGKN

SEQ ID NO: 4479 - DNA, 1617 bp, Populus trichocarpa
  CDS (1)..(1617)
atgagagaagcgaaacgtatcactcttcgattggcgattgtgttgttgttagctttcgtttctttcaatcagctctttgctgacgatgatacgatctttcatgagacgtttgacgagtcgttcagtggaagatggattgtttcggagaaagaagactataaaggggtgtggaagcgtgaaaagagtgagggacatgatgattatggacttcttgtgagtgagccggctaagaagtatgccattgtgaaggaactcgatgagcctgtgagtcttaaggatggaattgtcctccaatttgagactcgccttcagagtgggcttgaatgtggtggtgcgtatttgaaatatctccgaccacaggaggctgggtgggtgcccaaggggtttgacagtgagtctccttattcgattatgtttggacctgacaaatgtggtaccacaaacaaggttcattttatcttgaagcataaaaacccaaagagtggggaatatgttgagcatcacctcaagttcccaccttccgttccacacgacaagcatactcatgtgtacaccgccatcttgaaatctgacaatgagttgcaaattctggttgatggagaggagaagaagaaggcaaacttcctcacatctgatgattttgagcccccacttgtccctgccaagacaattcctgatccagatgacgtgaaacctgaggattgggatgagagagcaaaaattcctgatcctgaggcagcgaagccagaggactgggacgaggatgcacctcttgaaattgtagatgaggatgctgtgaaacctgaaggttggttggatgatgagcctgaggagattgatgatcctgaagctacaaaaccagaagattgggatgaagaggaggatggtgaatgggaggcacccaagactgataacccaaagtgtgaggaagcccctggttgtggtgaatggaagaaaccaatgaagagaaatccagcatacaagggaaaatggcatgctccacttattgacaaccccaactacaagggtatctggaagcctcaggatattccaaaccccgactactttgagcttgaccagcctgactttgagcccattgctgctgttggtattgagatctggacaatgcaggatggcatattgtttgacaatatcttggttgcaaaggatgagaaggctgcagcttcaattagggatacaacatggaagccaaagtttgatgctgagaaggagaaacagaaggctgaggaagcagctactggcactgatggtcttgctggcttccagaagaaggtgttcgaactcctataccaggctgctgagctctctttcctaagcaagcacaaggacaaaattattgaactcatcgagaaggcagagaaacaaccgaacatcacaattggtgtccttgtctccgttgtggtggtgatccttactcttttcttcaggataatttttggtggaaagaaggctaaggtggagaagaaacctgagccagttgcggagacatccaacaaggaaggaagcagcagcggcgatgagaagaaagaagagactgaggccgagaatgaagctgctgctcctgctcgcaggaggccatcgaggcgtgagaactga

SEQ ID NO: 4480 - protein, 538 aa, Populus trichocarpa
MREAKRITLRLAIVLLLAFVSFNQLFADDDTIFHETFDESFSGRWIVSEKEDYKGVWKREKSEGHDDYGLLVSEPAKKYAIVKELDEPVSLKDGIVLQFETRLQSGLECGGAYLKYLRPQEAGWVPKGFDSESPYSIMFGPDKCGTTNKVHFILKHKNPKSGEYVEHHLKFPPSVPHDKHTHVYTAILKSDNELQILVDGEEKKKANFLTSDDFEPPLVPAKTIPDPDDVKPEDWDERAKIPDPEAAKPEDWDEDAPLEIVDEDAVKPEGWLDDEPEEIDDPEATKPEDWDEEEDGEWEAPKTDNPKCEEAPGCGEWKKPMKRNPAYKGKWHAPLIDNPNYKGIWKPQDIPNPDYFELDQPDFEPIAAVGIEIWTMQDGILFDNILVAKDEKAAASIRDTTWKPKFDAEKEKQKAEEAATGTDGLAGFQKKVFELLYQAAELSFLSKHKDKIIELIEKAEKQPNITIGVLVSVVVVILTLFFRIIFGGKKAKVEKKPEPVAETSNKEGSSSGDEKKEETEAENEAAAPARRRPSRREN

SEQ ID NO: 4481 - DNA, 1599 bp, Zea mays
  CDS (1)..(1599)
atgatgggagggcgcgctctgctgctgctcctggtctcggcgctgctcgttcagatccgcgcctctgacccgctgctgtacgagccgttcgatgaggacttcgagggaagatggatcgtctccaagaaggatgaataccaaggtgtatggaagcatgccaagagtgatgggcatgaggactatggtctccttgttagtgacaaagcaaggaaatacgccataatcaaggagcttgatgagccagttaccttaaatgatgggacagtggtcctgcagtttgaagtgagacttcagaatggccttgaatgtggaggtgcctacattaagtacatccgccctcaggatgctggatgggatgccaaggagtttgataatgagactccatacactattatgtttggtccagataaatgtgggtcaaccaacaaggttcatttcatccttaagcacaagaatcctaagactggaaagtatgttgagcatcacctcaaattcccaccttctgtcccatacgacaagctctctcatgtctacacagctatcttgaagccagacaatgaggtcagaattttgatcgatggggaagaaaagaagaaggcaaacttcctttctgctgatgactttgagccagcacttatcccatccaagaccattcctgaccctgatgacaagaagccggaggactgggatgagagagctaaaatccctgatccagatgcagtgaagcctgatgattgggatgaggatgcccccatggaaattgtggatgaggaagccaccaagcctgagggatggttggatgatgaacccgaggagattgatgatcctgaggcagccaagcccgaggactgggacgatgaagaggatggtgaatgggaggcaccaaagattgacaaccccaagtgtgaagaggcacctggatgtggcgagtggaagaggccgatgaagcagaatcctgcttacaaaggcaagtggcatgcacctatgattgacaaccccaactacaagggaatctggaagcctcaggagatacccaaccctgagtactttgagcttgacaggcctgattttgatccaattgctgctattgggattgagatctggacaatgcaggatggcatcctgttcgacaatatcttgattgctgatgatgagaaagttgccacctccattctggagaagacatggaagcccaagtatgatgttgagaaggaaaaggagaaggctgaggaggctgctgctggtgcagatggtctttctgacttccagaagaagatttttgacgtcctgtacaagattgctgatattccgttcttggcaccctacaagaccaagattattgatgttatcgagaagggagagaagcagcccaacatcactattggcattttggtctccgttgtcatcgtgttcgttaccgttctcttcaagatcctttttggtggcaagaagccggtggcacctgtgaaacctgcagctgaggcgaagaagcccaaggccgcggagacggacggtgctggaagcagtggtgacaaggatgagaaagaggatgaaaaggacgagacaggcccacgtcggaggacccgaagggagacatag

SEQ ID NO: 4482 - protein, 532 aa, Zea mays
MMGGRALLLLLVSALLVQIRASDPLLYEPFDEDFEGRWIVSKKDEYQGVWKHAKSDGHEDYGLLVSDKARKYAIIKELDEPVTLNDGTVVLQFEVRLQNGLECGGAYIKYIRPQDAGWDAKEFDNETPYTIMFGPDKCGSTNKVHFILKHKNPKTGKYVEHHLKFPPSVPYDKLSHVYTAILKPDNEVRILIDGEEKKKANFLSADDFEPALIPSKTIPDPDDKKPEDWDERAKIPDPDAVKPDDWDEDAPMEIVDEEATKPEGWLDDEPEEIDDPEAAKPEDWDDEEDGEWEAPKIDNPKCEEAPGCGEWKRPMKQNPAYKGKWHAPMIDNPNYKGIWKPQEIPNPEYFELDRPDFDPIAAIGIEIWTMQDGILFDNILIADDEKVATSILEKTWKPKYDVEKEKEKAEEAAAGADGLSDFQKKIFDVLYKIADIPFLAPYKTKIIDVIEKGEKQPNITIGILVSVVIVFVTVLFKILFGGKKPVAPVKPAAEAKKPKAAETDGAGSSGDKDEKEDEKDETGPRRRTRRET

SEQ ID NO: 4483 - DNA, 1818 bp, Drosophila melanogaster
  CDS (1)..(1818)
atggcgtggaaaatgggaggaaaccgggccgcaacgctggcgttgctcttcgccagcagtttgctgctgctgagttcggccaatgccgccgatttggacacggagtcggacgacttcgaggatggttatgtggaggatgtgcaggaggagcccgccgtcatcggtggcgatgagaagctggcctacgagagcccggttatcgatgccaagaagttccacttcgcggatcacttcgacgacgtggaggagtccaggaagaggtgggtgctgtcgcaggccaagaaggacgacatcgccgaggagatctccaagtacgacggcatctggaactgggagtcgccgcagcgcatcgtttgggctaacgacttgggtctggtgctcaagtcgaaggccaaacacgcggccatagccgcccccctccgcaaaccgttcgagttcaagtcggacaagccgctggtggtgcagtacgaggtcacgttgcaggagggtcaggagtgcggtggctcgtatctgaagcttttgtccgccggaaaagacacggagcaactaaaagcgttcaatgacaagacaccctataccatcatgtttggaccggacaagtgcggcaacgatgtgaaaatgcacttcatattccggcacgtcaatccaattaatggcaccatcaccgagaagcactgcaacaagccaaagaaccgtttggaagagccattcaaggacaagctaccccatctctaccagctggtggtccgtcccgataacagctttgagattcgcgttgaccacaagatcatcaatgagggttccctgctaaccgatttcaagccaccagtcaacccgccggcagagatcgacgaccccaatgaccacaagcccgaatcgtgggatgagcgagagaagatcccagatcccactgcccacaagcccgaggattgggatgaggatgctccaccccagttgcccgataccgatgccgtcatgcccaatggctggctcgaagatgagcccgacatgattttcgatccaactgccaccaaacccgaggattgggatgccgaaatcgatggcgagtgggaggctccattggtggacaatccagtgtgcgagaaggctcccggctgtggcaagtggaaggctccgctcatccccaatcccaactacaagggcaagtggcgtgccccaatgatcgagaaccccaactaccagggcaagtgggcacccaggaagattcccaatccagacttctttgaggatctgaagcccttccaaatgacgcccatcagcgctgtgggtctggaactgtggtccatgtccagcgatattctcttcgacaacctaatcatcacggacgacgtggaggtggcccgtgactttgccgccaacagcttcgacatcaagcgtcgctacatcgatcgtgaatcggactcattcgtgaataaggtagtcgagctagccaaggccaatccctcgatctggggcattggcttggtggccattgtggcgctggttgccctcaccatctactgtagatttggtaccgctaagagtcaggactcggctgccaaaaaggctgctgccgaggccaagaagtccgacgatcctcagcccgacgatgagcccgaggccgaggaggagagcgacgaaagggccgctggcgataccagcaaggagagcacaccgctgtccgctagtcccaagaagaaccaaaagtctgatttagatgataacgaagaggagtccaaggcggcggagagccgagagcccgcacagactgaggaatctaacacaaaaacacgcaagcgtcaagcgcgcaaggagtaa

SEQ ID NO: 4484 - protein, 605 aa, Drosophila melanogaster
MAWKMGGNRAATLALLFASSLLLLSSANAADLDTESDDFEDGYVEDVQEEPAVIGGDEKLAYESPVIDAKKFHFADHFDDVEESRKRWVLSQAKKDDIAEEISKYDGIWNWESPQRIVWANDLGLVLKSKAKHAAIAAPLRKPFEFKSDKPLVVQYEVTLQEGQECGGSYLKLLSAGKDTEQLKAFNDKTPYTIMFGPDKCGNDVKMHFIFRHVNPINGTITEKHCNKPKNRLEEPFKDKLPHLYQLVVRPDNSFEIRVDHKIINEGSLLTDFKPPVNPPAEIDDPNDHKPESWDEREKIPDPTAHKPEDWDEDAPPQLPDTDAVMPNGWLEDEPDMIFDPTATKPEDWDAEIDGEWEAPLVDNPVCEKAPGCGKWKAPLIPNPNYKGKWRAPMIENPNYQGKWAPRKIPNPDFFEDLKPFQMTPISAVGLELWSMSSDILFDNLIITDDVEVARDFAANSFDIKRRYIDRESDSFVNKVVELAKANPSIWGIGLVAIVALVALTIYCRFGTAKSQDSAAKKAAAEAKKSDDPQPDDEPEAEEESDERAAGDTSKESTPLSASPKKNQKSDLDDNEEESKAAESREPAQTEESNTKTRKRQARKE

SEQ ID NO: 4485 - DNA, 1686 bp, Coccidioides posadasii
  CDS (1)..(1686)
atgcgtctcaacgcccgcaccgcctcgctgatcctctcctacatagctctgcttggccaagtccatgctgagagcgaggccacaaaggaagagccaactgccacttctatcagtaggccaacattcacgcctaccacattgaaagctcccttcttggaacaattcacagacgattggcaaacgcgatggaccccttcccacgcgaagaaagaggactctaaatcggaagaggagtgggcatacgtcggagaatgggccgtcgaagaaccaaccgtcttcaagggcattgatggcgacaagggattggtggtgaagaatgctgccgctcaccatgccatctccgccaagttccctaaaaaaattgataacaagggcaagactcttgtcgttcagtacgaggtcaagcttcagaactccttggtttgcggtggcgcgtatatgaagctactccaggacaacaagaagcttcatgctgaagagttctctaatgcttctccttatgttatcatgtttggacctgacaagtgcggagccactaacaaggttcattttatcttcaagcacaagaacccaaagaccggtgaatatgaagagaagcatcttaacaatgctccgactgctcacgtttccaaactatccaccctctacacccttatcgtcaagccagaccagacatttcaaattcaaatcaatggtgaggctgtcaagaatggaactctccttgaagacttccagcctcctgtcaaccctccaaaggagattgatgatccaaacgacaaaaagccggccgattgggtcgatgaggccaagatcccagatccagaggccaagaaaccggaggactgggatgaagacgctccctttgaaattgttgatactgaggctaagaaacctgatgactggctggacgatgagccaagctcgatccccgatccagaggctcaaaagcctgaggactgggatgacgaggaagatggtgactggttcgctccaaccgttccaaatcccaagtgcgaggaagcctctggctgtggaaagtgggagcctcccatgaagagaaaccctgattataagggcaaatggactgcacctttgatcgacaacccagcgtacaagggcccatggtctccccgcaaaatcgccaatccggacttcttcgaggataagaagcccgctaactttgagccaatgggtgctattggcttcgaaatctggaccatgcaaaatgatatcctctttgacaacatttacattggtcactccatcgaagacgcgaagaagcttaaggccgaaacattcgatatcaagcaacccatcgaggttgccgaggaagaagccgctaagcccaaggatgaaccctctactgattctggtctcaacttcaaggatgacccagtcaagtacatccgcagcaaggtcgatcaattcatcctcatggcaaaagataatccagttgaggctgtcaagactgttcccgaagttgccggtggtttggccgctctcctcatcacgttgatcctcgttgtcttcggcgctattggtcttagcagccctgcacccgctccggctaagaaggacgctggaaagggaaaagagaaggccaaggaaaaggctgcggaagctgtgagtaccggagctgaaaacattaaggccggtgccacgaaacgatcaaagtctagtgagtga

SEQ ID NO: 4486 - protein, 561 aa, Coccidioides posadasii
MRLNARTASLILSYIALLGQVHAESEATKEEPTATSISRPTFTPTTLKAPFLEQFTDDWQTRWTPSHAKKEDSKSEEEWAYVGEWAVEEPTVFKGIDGDKGLVVKNAAAHHAISAKFPKKIDNKGKTLVVQYEVKLQNSLVCGGAYMKLLQDNKKLHAEEFSNASPYVIMFGPDKCGATNKVHFIFKHKNPKTGEYEEKHLNNAPTAHVSKLSTLYTLIVKPDQTFQIQINGEAVKNGTLLEDFQPPVNPPKEIDDPNDKKPADWVDEAKIPDPEAKKPEDWDEDAPFEIVDTEAKKPDDWLDDEPSSIPDPEAQKPEDWDDEEDGDWFAPTVPNPKCEEASGCGKWEPPMKRNPDYKGKWTAPLIDNPAYKGPWSPRKIANPDFFEDKKPANFEPMGAIGFEIWTMQNDILFDNIYIGHSIEDAKKLKAETFDIKQPIEVAEEEAAKPKDEPSTDSGLNFKDDPVKYIRSKVDQFILMAKDNPVEAVKTVPEVAGGLAALLITLILVVFGAIGLSSPAPAPAKKDAGKGKEKAKEKAAEAVSTGAENIKAGATKRSKSSE

SEQ ID NO: 4487 - DNA, 1674 bp, Penicillium chrysogenum
  CDS (1)..(1674)
atgcgctttaacactgcgttgacatcggctctggtttcctccgccagcctcatgggctacgcccatgcggaggaaactgccgataccaccgtcattgacaggcctacctttactcctaccagcctcaaagctccattcctggagcaattcacagacgattgggagtctcgttggaagccttcccacgcgaagaaggatgacaagtccgacgatgagtgggcttacgtcggtgaatgggcagtcgaggagccctctgtcttcaagggtattgatggcgacaagggtctggtcgtgaagaacgctgctgcccaccacgccatctccgccaagttccccaagaagattgacaacaagggcaagacattggtggttcagtacgaggtcaagccgcagaactccctggtttgcggcggtgcctaccttaagcttctccaggagaacaagaagctccaccaggacgagttctccaacggcactccctatgtcgtcatgttcggccctgacaagtgcggtgccactaacaaggttcacttcatcttctgccacaagaaccccaagaccggcgagtacgaagagaagcaccttaagactcctcctgtggcccgcaccgacaaggtcacctccctctacaccctgatcgtcaaccccgatcagacctttgagatcctgatcaatggtgactctgccaagaagggcagcctcctcgaggacttcaatcctcccgtgaaccctgagaaggagattgatgatcccaaggactctaagcctgccgattgggtcgatgaggttaagatccctgaccccgaagccactaagcccgccgactgggatgaagaagctcccttcgagatcctcgatgaggaggccacccagcccgctgactggctggaggatgagcccgagagcattcccgaccccgaggccgagaagcccgaggattgggatgacgaggaggatggagactggctcgctcccactatccccaaccctaagtgtgccgatgtctctggctgtggtacctggacccgccctatgatcaagaaccccgagtacaagggcaagtgggaggcccctctcatcgataaccctgcctacaagggtgtctgggccccccgtaagatcaagaaccccgcctacttcgaggacaagaccccatccaaccttgagcccatgggcgctattggcttcgagatctggaccatgcagaatgacattctgtttgacaacgtctacgttggtcactccgttgaggatgctgagaagctccgcaaggagaccttcgatgtcaagttccccatcgaggaggctgaagaggaggctagcaagcccaagcccgaggtcaacgaagagggtaccactgtcaccttccaggaggacccagtgaccttcgtccgccagaaggtcaaccacttcgttgagctggccaaggaggaccccgtcaacgctgccaagaccctccctgaggtggccggtggcctgggtgccctcctcttgaccatgatcctcgtcgttgtgggtgccattggcgccagcagccctgcggccccggccgagaagaagggcaagcagcccgccggtgctcccaaggagaagaaggaacaggctgttagctcctccgctgagaccagcaagggcggtgccaccaagcgcaccacccgttcctcggccgagtaa

SEQ ID NO: 4488 - protein, 557 aa, Penicillium chrysogenum
MRFNTALTSALVSSASLMGYAHAEETADTTVIDRPTFTPTSLKAPFLEQFTDDWESRWKPSHAKKDDKSDDEWAYVGEWAVEEPSVFKGIDGDKGLVVKNAAAHHAISAKFPKKIDNKGKTLVVQYEVKPQNSLVCGGAYLKLLQENKKLHQDEFSNGTPYVVMFGPDKCGATNKVHFIFCHKNPKTGEYEEKHLKTPPVARTDKVTSLYTLIVNPDQTFEILINGDSAKKGSLLEDFNPPVNPEKEIDDPKDSKPADWVDEVKIPDPEATKPADWDEEAPFEILDEEATQPADWLEDEPESIPDPEAEKPEDWDDEEDGDWLAPTIPNPKCADVSGCGTWTRPMIKNPEYKGKWEAPLIDNPAYKGVWAPRKIKNPAYFEDKTPSNLEPMGAIGFEIWTMQNDILFDNVYVGHSVEDAEKLRKETFDVKFPIEEAEEEASKPKPEVNEEGTTVTFQEDPVTFVRQKVNHFVELAKEDPVNAAKTLPEVAGGLGALLLTMILVVVGAIGASSPAAPAEKKGKQPAGAPKEKKEQAVSSSAETSKGGATKRTTRSSAE

SEQ ID NO: 4489 - DNA, 1704 bp, Paracoccidioides brasiliensis
  CDS (1)..(1704)
atgcgtcttaacgcttctctggcgtcgcttatcctaacctccatagctctcattggcaatgtccatgcggaggatgaggttgagggaaagccctcatccacatcttccgtgattgagaaacctcttttcactcccactactctcaaagctccattcctcgagcaattcaccgacgattgggagacacggtggacaccctctcatgccaagaagcaggactcatcatcagaggaggactgggcttatgttggaacttgggccgtcgaggagccacatgtcttcaacggcatgaagggcgacaagggcttggtgatcaagaatgccgccgcccatcatgccatttcagccaagttccccaagaagattgataacaagggcaataccctagtggttcaatatgaagttaagcttcagaacggtctcaattgcggtggcgcctacatgaagcttctccaggataacaagaagctccacgctgaggaattctcgaacgcttccccatatgtgatcatgtttggacccgacaagtgtggagttaccaataaagtccatttcatcttcagacacaagaacccaaagactggcgagtacgaagagaagcacctgaagaacccaccagccgcccgtgtcagcaagctgtccactctgtataccttgatcgtcaagccagatcagtccttccagatcttgatcgacggtgaagccgtgaagaatggcacactgcttgaagactttagccccgctgtcaatcctcaaaaggaaattgatgaccctgaagacaagaagccaaaggactgggttgatgaaactcgtatccccgatcccaccgctaccaagcccgatgactgggacgaggatgcgccctacgagattatagatactgaagcaaccaagcctgatgactggctggatagtgaacctgatagcattcctgacccagaggctcagaagcctgaggactgggatgatgaagaagacggagattgggcagccccgacaattcccaaccccaagtgcagcgaagtgtctggctgtggcaaatgggaggcacctatgaagaaaaacccagactacaagggcaaatggacccctcctatgatcgataatccggcctacaagggaccatggacgccgcgcaaaatccccaatcccaactacttcgaagacaagactcccgctaacttcgaacctatgggtgctatcggattcgaaatctggaccatgcaaaacgacattctcttcaacaacatctacatcggccactcaatcgaagatgcgcagaaactcaagtcagagacctgggacatcaaacacccaatcgaggttgcggaagaggaagccacacgccccaaggatgatgagaaggacagctcctttgtcagcttcaaggaggctcccgtacaattcgtacgtgagaagatcaatctcttcatcagcattgcgcgtaaggatcccgtgcaggcagccaaaagcgttccggaggtcgctggaggtctgggtgctcttgtcatcactcttgccctcatcattgtcggtgcgattggcctcagcagtcctgccccagcacccgctgttgcgaaaaaggtggatggaaaggagaaggatggtgcttccaaggagaaggctgcggaggcagttagcactacggcggataatgtgaagggggcagctacgcgaagatcgggcaaggctaataatgagtaa

SEQ ID NO: 4490 - protein, 567 aa, Paracoccidioides brasiliensis
MRLNASLASLILTSIALIGNVHAEDEVEGKPSSTSSVIEKPLFTPTTLKAPFLEQFTDDWETRWTPSHAKKQDSSSEEDWAYVGTWAVEEPHVFNGMKGDKGLVIKNAAAHHAISAKFPKKIDNKGNTLVVQYEVKLQNGLNCGGAYMKLLQDNKKLHAEEFSNASPYVIMFGPDKCGVTNKVHFIFRHKNPKTGEYEEKHLKNPPAARVSKLSTLYTLIVKPDQSFQILIDGEAVKNGTLLEDFSPAVNPQKEIDDPEDKKPKDWVDETRIPDPTATKPDDWDEDAPYEIIDTEATKPDDWLDSEPDSIPDPEAQKPEDWDDEEDGDWAAPTIPNPKCSEVSGCGKWEAPMKKNPDYKGKWTPPMIDNPAYKGPWTPRKIPNPNYFEDKTPANFEPMGAIGFEIWTMQNDILFNNIYIGHSIEDAQKLKSETWDIKHPIEVAEEEATRPKDDEKDSSFVSFKEAPVQFVREKINLFISIARKDPVQAAKSVPEVAGGLGALVITLALIIVGAIGLSSPAPAPAVAKKVDGKEKDGASKEKAAEAVSTTADNVKGAATRRSGKANNE

SEQ ID NO: 4491 - DNA, 1617 bp, Solanum lycopersicum
  CDS (1)..(1617)
atggaagaaactagaaggaagatctgggcgcaatatgcgttcctgttattggcttgttgctttttctctcaactctacgctacttcagatgtgaagttctacgagtcatttgacgaagcatttgatgggcgatggatcgtatctgagaaagaggactattcaggtgtgtggaaacatgccaagagtgagggacatgatgattatggacttcttgttagtgagaaggctaggaaatacgctattgtcaaggagcttgacaatgttgttgacctcaaagatggaactgtggttcttcaatatgaggttcgcctccaggatggacttgaatgtggtggtgcttacataaaatacctccgcccccaggaagcagggtggaccgcaaagggttttgataacgagtccccctacacaataatgtttggacctgataaatgcggagccacaaacaaggtgcacttcattttgaaacacaagaaccctaagagtggagaatacgttgagcaccacctcaagtttcctccctctgtaccagctgacaagctaactcatgtttacactgctgtgttgaaaccggacaatgatgttcttatcttggttgacggagaagaaaagaagaaggctaacttcctctcatctgatgattttgagccaccacttattcctgctgtgaccattccagacccagaagacaagaagccggaggactgggatgagagagccaagattccagacccagatgctaagaaacctgatgattgggatgaggatgcaccaatggaaattgaagatgaggaagctgtaaagcccgaaggatggttggatgatgagcctgaggatgttgatgatcctgaggctaccaagcctgaagattgggatgatgaggaggatggtgaatgggaggctccgaaggttgacaacccaaaatgtgcagaagctcctggttgtggggagtggaaaagaccaatgatcagaaatccagtatacaagggaaaatggcacgctccgcttattgacaaccccaattacaagggtatttggaagccaagagatatcccaaatcctgactattttgaacttgacaaacccaactttgagcctatcgcagccattggcattgagatctggacaatgcaagatggcatattgtttgacaatatcttgattgctagtgatgaagaagttgcagaatcatacaggaagactgcctggaaacccaagtttgatgtagaaaaggagaaacagaaagctgaggaagaagcagaatctggtggcctcaaaggataccagaaattagtatttgacctcctctacaaggtagctggtatcccattcttgggtgaacacaagaccaaagtattggatcttctcgagaaagctgagaaacagcccaatatcacagttggtgtcgttgtctcaattgtagtggttgtcttctcagttctattgaagctcattttcggtgggaagaagcagcaacctgctagagctagtgccgagactgagaaaactgacggagctgaaacctcgacttccaatagtcaagccgctgaggagaaggaagagcagagtgaggatgctggtgctgctcctcgtcgaaggactaggcgcgacaattag

SEQ ID NO: 4492 - protein, 538 aa, Solanum lycopersicum
MEETRRKIWAQYAFLLLACCFFSQLYATSDVKFYESFDEAFDGRWIVSEKEDYSGVWKHAKSEGHDDYGLLVSEKARKYAIVKELDNVVDLKDGTVVLQYEVRLQDGLECGGAYIKYLRPQEAGWTAKGFDNESPYTIMFGPDKCGATNKVHFILKHKNPKSGEYVEHHLKFPPSVPADKLTHVYTAVLKPDNDVLILVDGEEKKKANFLSSDDFEPPLIPAVTIPDPEDKKPEDWDERAKIPDPDAKKPDDWDEDAPMEIEDEEAVKPEGWLDDEPEDVDDPEATKPEDWDDEEDGEWEAPKVDNPKCAEAPGCGEWKRPMIRNPVYKGKWHAPLIDNPNYKGIWKPRDIPNPDYFELDKPNFEPIAAIGIEIWTMQDGILFDNILIASDEEVAESYRKTAWKPKFDVEKEKQKAEEEAESGGLKGYQKLVFDLLYKVAGIPFLGEHKTKVLDLLEKAEKQPNITVGVVVSIVVVVFSVLLKLIFGGKKQQPARASAETEKTDGAETSTSNSQAAEEKEEQSEDAGAAPRRRTRRDN

SEQ ID NO: 4493 - DNA, 1641 bp, Glycine max
  CDS (1)..(1641)
atgggagaacgaaaaggaatcccaatggctttggggctcttggcgatgatcctcttcttcattgcttcctcttcctctcacctcgttcgcgcttccggtgacgccgacgacgcgatcttctacgagtcgttcgacgaggattttgatggacggtggattgtatccgacaaggaggattacaatggtgtctggaagcatgccaagagtgatgggcatgatgattatggacttcttgttagtgaacaagccaggaaatatgctatagtcaaagaacttgccgagtctgtcagtcttaaggatggaacagttgttcttcagtttgagactcgccttcagaatggcctcgaatgtggtggtgcatatattaaatatcttcgaccccaggagagcggatggaaaccaaaggaatttgacaacgaatctccatattctatcatgtttggtcctgataagtgtggtgctacaaacaaggttcacttcattttcaagcataagaacccaaagagtggggagtatgttgagcatcatctcaagtatcccccttctgtcccatcggacaaactaactcatgtgtacactgcaattctgaagcctgataatgaattgcaaatcttgattgatggggaggagaagaaaaaggcaaatttcttgtcttctgaggactttgagcctcctcttataccttccaagacaatccctgatcctgatgataagaaacctgaggactgggacgaaagagccaaaatcccagacccaagtgctgtgaagccagatgactgggatgaggatgcacccatggaaatcttagatgaagaagcagagaaccctgaaggatggttggatgatgagccagaggaaattgatgacccagaggcaactaaaccagaagactgggatgatgaggaggatggtgaatgggaagccccaaagattgaaaacccaaagtgtgaggccgcccctggttgtggtgaatggaagaggccaacgaagaggaatccagcttataagggaaagtggagtgctccttacatcgataaccccagttacaagggcatatggaagcctcgcgagattccaaaccctgaatactttgaactcgcaaaacctgattttgagcctattgctgctattggcattgagatttggacaatgcaggatggcatcctatttgacaatgttctgatagctaacgatgataaagttgcagaatcctatcgggagactacatggaagcccaagtttaccgttgagaaagacaaactgaaggctgaagaggaggcggcaacgggttcagatggtatttcaggcttccagaagaaggtatttgacctcttgtacaagattgcagatattcccttcttgagcgagcacaaatctaagattttcgatctcattgagaaagctgagaaacagccaaatctcacaattggaattcttgtagctgttgtggttgtcttcgtgtcaattttcttgagactcatatttggtggcaagaaacctgcaaaggtggagaagaaaccagaacgcacagaagcttccaataaccaaggtagtggagagaatgaagaaaacaaagagaaggagaaacagaaagaggaagcatctaatgctgcgcgtcggaggccaaggcgagaaacttga

SEQ ID NO: 4494 - protein, 546 aa, Glycine max
MGERKGIPMALGLLAMILFFIASSSSHLVRASGDADDAIFYESFDEDFDGRWIVSDKEDYNGVWKHAKSDGHDDYGLLVSEQARKYAIVKELAESVSLKDGTVVLQFETRLQNGLECGGAYIKYLRPQESGWKPKEFDNESPYSIMFGPDKCGATNKVHFIFKHKNPKSGEYVEHHLKYPPSVPSDKLTHVYTAILKPDNELQILIDGEEKKKANFLSSEDFEPPLIPSKTIPDPDDKKPEDWDERAKIPDPSAVKPDDWDEDAPMEILDEEAENPEGWLDDEPEEIDDPEATKPEDWDDEEDGEWEAPKIENPKCEAAPGCGEWKRPTKRNPAYKGKWSAPYIDNPSYKGIWKPREIPNPEYFELAKPDFEPIAAIGIEIWTMQDGILFDNVLIANDDKVAESYRETTWKPKFTVEKDKLKAEEEAATGSDGISGFQKKVFDLLYKIADIPFLSEHKSKIFDLIEKAEKQPNLTIGILVAVVVVFVSIFLRLIFGGKKPAKVEKKPERTEASNNQGSGENEENKEKEKQKEEASNAARRRPRRET

SEQ ID NO: 4495 - DNA, 1737 bp, Neurospora crassa
  CDS (1)..(1737)
atgaggttcaacgtagctgccgctgccgccagcgccgccctccttgccggaggtgtcagcgccgacgacgcccaaaaggtgctcaaggacgagagctcctccagcactgtcgccgaggccgccacctcggtttctcccgccgagatccctacctttactcctaccaagctcaaggctcccttcctcgagcagtttaccgatggctgggatgcgcgctggaagccttcccacgccaagaaggagaccggccccgataccgaggaggagtgggcttacgtcggcgagtggtccgtcgaagagcccgtcgtcttcaagggcatggagggcgacaagggtctcgttgtcaagaacgcggctgctcaccacgccatctcggccaagttccccaaggcgatcgaccccaagggcaaggacctcgttgtccagtatgaggtcaagcttcagaacggcctcgagtgcggtggtgcctacctgaagctccttcgcgagaacaaggctctccaccaggacgagttctccaacaccactccctacgtcatcatgttcggccccgacaagtgcggccacaccaacaaggtgcacttcatcttcaaccacaagaaccccaagacgggcgagtacgaggagaagcacctcagcgctcccccgacggccaagatcgtcaagaccacggagctctacacgctcattgtccaccccaacaacaccttcctcatccagcaggatggcgagactgtcaaggagggcagcctcctcgaggactttgttccctcggtcaaccccgagaaggagattgacgaccccaacgacaccaagcccgaggactgggttgaccaggcccgtatccccgaccccgatgccaagaagcccgacgactgggatgaggaggccccgtacgagattgtcgacgaggaggccaccatgcccgaggactggctcgttgatgagccccagactatccccgaccccgaggcccagaagcctgaggattgggatgatgaggaggatggtgactggattgcccctaccgttcccaaccccaagtgcttcgaggtctctggttgcggcccctggaccaagcccatgaagaagaaccccgactacaagggcatctggagcgctcctctcattgacaaccccgcctacaagggaccctgggcccctcgcaagatcgccaaccccgactactacgaggacaagactcccgccaactttgagcccatgggcgctatcggtttcgagatctggaccatgcagaacaacattctctttgacaacatctacattggtcactcggttgaggacgccaaggctctcgctgacgagactttcttcaagaagcaccccgtcgaggagaagctcgaggaggctgagaagcccaagcccgaggagaacaagccttcttcgcccagcgaccttaagttcaccgaggaccccgttacctacatcaaggagaaggttgacctctttgtgaccattgccaagaaggaccccgtcgaggctatcaagtttgtccctgaggttgctggtggcgctgccgccctcctcgtcaccttcattgccatcctcgcttcccttgtctctggcggcagctctcctgcccctgctgtcaagaaggctgccaaggatgtcaaggagaaggccaaggacgtcaaggacaaggctgccgaggctgttgccactggcactgagaaggccaaggaggctaccaagcgcaacacccgcaaccagtcgtaa

SEQ ID NO: 4496 - protein, 578 aa, Neurospora crassa
MRFNVAAAAASAALLAGGVSADDAQKVLKDESSSSTVAEAATSVSPAEIPTFTPTKLKAPFLEQFTDGWDARWKPSHAKKETGPDTEEEWAYVGEWSVEEPVVFKGMEGDKGLVVKNAAAHHAISAKFPKAIDPKGKDLVVQYEVKLQNGLECGGAYLKLLRENKALHQDEFSNTTPYVIMFGPDKCGHTNKVHFIFNHKNPKTGEYEEKHLSAPPTAKIVKTTELYTLIVHPNNTFLIQQDGETVKEGSLLEDFVPSVNPEKEIDDPNDTKPEDWVDQARIPDPDAKKPDDWDEEAPYEIVDEEATMPEDWLVDEPQTIPDPEAQKPEDWDDEEDGDWIAPTVPNPKCFEVSGCGPWTKPMKKNPDYKGIWSAPLIDNPAYKGPWAPRKIANPDYYEDKTPANFEPMGAIGFEIWTMQNNILFDNIYIGHSVEDAKALADETFFKKHPVEEKLEEAEKPKPEENKPSSPSDLKFTEDPVTYIKEKVDLFVTIAKKDPVEAIKFVPEVAGGAAALLVTFIAILASLVSGGSSPAPAVKKAAKDVKEKAKDVKDKAAEAVATGTEKAKEATKRNTRNQS

SEQ ID NO: 4497 - DNA, 1602 bp, Brassica napus
  CDS (1)..(1602)
atgagagaccggcagctattctccgccgttttgcttgtcttagctttcgtttctctccagaagctttgctactgcgacgatcaaacggtgttgtatgaatcgttcgatgaggcatttgatggccgttggatcgtttcgaagaatggcgattacgaaggtgtgtggaagcatgagaagagtgagggacatgatgactatggacttctcgtaagcgagaaggctcgtaagtatggtatagtgaaagttctcgacgagccactaaaccttaaggacggaaccattgttcttcagtacgaggttcgtttccaggaggggcttgagtgtggtggtgcttacttgaaatacctccgtcctcaagaagctggatggacacctgagggattcgatagtgaatctccttactctatcatgtttggacccgacaagtgtggagctacgaacaaagttcatttcattttgaagcacaagaaccccaagagcggcgagtacgttgagcaccacctcaagttccctccctctgttccttatgacaagctttcccatgtctacaccgccatcttgaagccagacaacgaggttaggattttggttgatggagaggagaagaagaaggccaacttactctctggagaagactttgagcctgctttgatccctgacaagaccatccctgaccctgaagacaagaaaccagaagactgggatgagagagccaagattcctgaccctaacgccgtgaagcctgaggactgggacgaggatgcacccatggagatagaagacgacgaagctgagaagcccgaaggatggttagatgatgagcctgaggaggtggacgacccagaggcgaccaaacctgaagattgggatgatgaggaagatggtatgtgggaggcaccaaagattgacaaccccaagtgtgaagcagcaccaggatgcggtgaatggaagagaccgatgaagaagaacccagcttacaagggcaaatggagtgcacctatgattgataaccctgcttacaaaggaatctggaagcccagagacatccctaaccctgactacttcgagctagacagacctgattacgaacccattgcagctatcggtatagagatctggacgatgcaagacggtatcttgtttgacaacatattgatagcgaaagacgagaaggtcgctgagagttacagacagacaacgtggaagcctaagttcgatgttgagaaagagaaacaaaaggaggaagagaaggctgctgaatctgcagatggtctcaagagctaccagaaggttgtgttcgatctgttgaacaaggttgcagacatttccttcctaagtgcctacaagtccaagatcacagaattgattgagaaagctgaggaacaaccaaacttaaccattggtgtcctagtctccattgttatagtattcttctcgctcttcatcaagcttatcttcggtggcaaaaaggcgtcgccggcggcgagtgtggagaagaagaaaccagaagtaggagagagctcaaagagtggagatgagtcggagaagaaggaagaaaccgctgctgctccccgcaaaaggcaaccgagacgtgataattag

SEQ ID NO: 4498 - protein, 533 aa, Brassica napus
MRDRQLFSAVLLVLAFVSLQKLCYCDDQTVLYESFDEAFDGRWIVSKNGDYEGVWKHEKSEGHDDYGLLVSEKARKYGIVKVLDEPLNLKDGTIVLQYEVRFQEGLECGGAYLKYLRPQEAGWTPEGFDSESPYSIMFGPDKCGATNKVHFILKHKNPKSGEYVEHHLKFPPSVPYDKLSHVYTAILKPDNEVRILVDGEEKKKANLLSGEDFEPALIPDKTIPDPEDKKPEDWDERAKIPDPNAVKPEDWDEDAPMEIEDDEAEKPEGWLDDEPEEVDDPEATKPEDWDDEEDGMWEAPKIDNPKCEAAPGCGEWKRPMKKNPAYKGKWSAPMIDNPAYKGIWKPRDIPNPDYFELDRPDYEPIAAIGIEIWTMQDGILFDNILIAKDEKVAESYRQTTWKPKFDVEKEKQKEEEKAAESADGLKSYQKVVFDLLNKVADISFLSAYKSKITELIEKAEEQPNLTIGVLVSIVIVFFSLFIKLIFGGKKASPAASVEKKKPEVGESSKSGDESEKKEETAAAPRKRQPRRDN

SEQ ID NO: 4499 - DNA, 1818 bp, Drosophila melanogaster
  CDS (1)..(1818)
atggcgtggaaaatgggaggaaaccgggccgcaacgctggcgttgctcttcgccagcagtttgctgctgctgagtgcggccaatgccgccgatttggacacggagtcggacgacttcgaggatggttatgtggaggatgtgcaggaggagcccgccgtcatcggtggcgatgagaagctggcctacgagagcccggttatcgatgccaagaagttccacttcgcggatcacttcgacgacgtggaggagtccaggaagaggtgggtgctgtcgcaggccaagaaggacgacatcgccgaggagatctccaagtacgacggcatctggaactgggagtcgccgcagcgcatcgtttgggctaacgacttgggtctggtgctcaagtcgaaggccaaacacgcggccatagccgcccccctccgcaaaccgttcgagttcaagtcggacaagccgctggtggtgcagtacgaggtcacgttgcaggagggtcaggagtgcggtggctcgtatctgaagcttttgtccgccggaaaagacacggagcaactaaaagcgttcaatgacaagacaccctataccatcatgtttggaccggacaagtgcggcaacgatgtgaaaatgcacttcatattccggcacgtcaatccaattaatggcaccatcaccgagaagcactgcaacaagccaaagaaccgtttggaagagccattcaaggacaagctaccccatctctaccagctggtggtccgtcccgataacagctttgagattcgcgttgaccacaagatcatcaatgagggttccctgctaaccgatttcaagccaccagtcaacccgccggcagagatcgacgaccccaatgaccacaagcccgaatcgtgggatgagcgagagaagatcccagatcccactgcccacaagcccgaggattgggatgaggatgctccaccccagttgcccgataccgatgccgtcatgcccaatggctggctcgaagatgagcccgacatgattttcgatccaactgccaccaaacccgaggattgggatgccgaaatcgatggcgagtgggaggctccattggtggacaatccagtgtgcgagaaggctcccggctgtggcaagtggaaggctccgctcatccccaatcccaactacaagggcaagtggcgtgcaccaatgatcgggaaccccaactaccagggcaagtgggcacccaggaagattcccaatccagacttctttgaggatctgaagcccttccaaatgacgcccatcagcgctgtgggtctggaactgtggtccatgtccagcgatattctcttcgacaacctaatcatcacggacgacgtggaggtggcccgtgactttgccgccaacagcttcgacatcaagcgtcgctacatcgatcgtgaatcggactcattcgtgaataaggtagtcgagctagccaaggccaatccctcgatctggggcattggcttggtggccattgtggcgctggttgccctcaccatctactgtagatttggtaccgctaagagtcaggactcggctgccaaaaaggctgctgccgaggccaagaagtccgacgatcctcagcccgacgatgagcccgaggccgaggaggagagcgacgaaagggccgctggcgataccagcaaggagagcacaccgctgtccgctagtcccaagaagaaccaaaagtctgatttagatgataacgaagaggagtccaaggcggcggagagccgagagcccgcacagactgaggaatctaacacaaaaacacgcaagcgtcaagcgcgcaaggagtaa

SEQ ID NO: 4500 - protein, 605 aa, Drosophila melanogaster
MAWKMGGNRAATLALLFASSLLLLSAANAADLDTESDDFEDGYVEDVQEEPAVIGGDEKLAYESPVIDAKKFHFADHFDDVEESRKRWVLSQAKKDDIAEEISKYDGIWNWESPQRIVWANDLGLVLKSKAKHAAIAAPLRKPFEFKSDKPLVVQYEVTLQEGQECGGSYLKLLSAGKDTEQLKAFNDKTPYTIMFGPDKCGNDVKMHFIFRHVNPINGTITEKHCNKPKNRLEEPFKDKLPHLYQLVVRPDNSFEIRVDHKIINEGSLLTDFKPPVNPPAEIDDPNDHKPESWDEREKIPDPTAHKPEDWDEDAPPQLPDTDAVMPNGWLEDEPDMIFDPTATKPEDWDAEIDGEWEAPLVDNPVCEKAPGCGKWKAPLIPNPNYKGKWRAPMIGNPNYQGKWAPRKIPNPDFFEDLKPFQMTPISAVGLELWSMSSDILFDNLIITDDVEVARDFAANSFDIKRRYIDRESDSFVNKVVELAKANPSIWGIGLVAIVALVALTIYCRFGTAKSQDSAAKKAAAEAKKSDDPQPDDEPEAEEESDERAAGDTSKESTPLSASPKKNQKSDLDDNEEESKAAESREPAQTEESNTKTRKRQARKE

SEQ ID NO: 4501 - DNA, 1806 bp, Drosophila melanogaster
  CDS (1)..(1806)
atgggaggaaaccgggccgcaacgctggcgttgctcttcgccagcagtttgctgctgctgagtgcggccaatggcgccgatttggacacggagtcggacgacttcgaggatggctatgtggaagatgtgcaggaggagcccgccgtcatcgatggcgatgagaagctggcctacgagagcccggttatcgatgccaagaagttccactttgcggaccacttcgacgacgtcgaggagtccaggaagaggtgggtgctgtcgcaggccaagaaggacgacatcgccgaggagatctccaagtacgacggcatctggaactgggagtcgccgcagcgcatcgtttgggctaacgacttgggtctggtgctcaagtcgaaggccaaacacgcggccatagccgcccctctccgcaagccgttcgagttcaagtcggacaagccgctggtggtgcagtacgaggtcacgttgcaggagggtcaggagtgcggcggctcgtatctgaagcttttgtccgccggaaaagacacggagcaactaaaagcgttcaatgacaagacaccctataccatcatgtttggaccggacaagtgcggcaacgatgtgaaaatgcacttcatattccggcacgtcaatccaattaatggcaccatcaccgagaagcactgcaacaagccaaagaaccgtttggaagagccattcaaggacaagctaccccatctctaccagctggtggtccgtcccgataacagctttgagattcgcgttgaccataagatcatcaatgagggttccctgctaaccgatttcaagccaccggtcaacccgccggcggagatcgacgaccccaatgacctcaagcccgaatcgtgggatgagcgagagaagatcccagacccaactgcccacaagcccgaggattgggatgaggatgctccaccccagttgcccgataccgatgccgtcatgcccaacggctggctcgaagatgagcccgacatgattttcgatccaactgccaccaaacccgaggattgggatgccgaaatcgatggcgagtgggaggctccattggtggacaatccagtgtgcgagaaggctcccggctgtggcaagtggaaggctccgctcatccccaatcccaactacaagggcaagtggcgtgcaccaatgatcgagaaccccaactaccagggcaagtgggcacccaggaagattcccaatccagacttctttgaggatctgaagcccttccaaatgacgcccatcagcgctgtgggtctggaactgtggtccatgtccagcgatattctcttcgacaacctaatcatcacggacgacgtggaggtggcccgtgactttgccgccaacagcttcgacatcaagcgtcgctacatcgatcgtgaatcggactcattcgtgaataaggtagtcgagctagccaaggccaatccctcgatctggggcattggcttggtggccattgtggcgctggttgccctcaccatctactgtagatttggtaccgctaagagtcaggactcggctgccaaaaaggctgctgccgaggccaagaagtccgacgatcctcagcccgacgatgagcccgaggccgaggaggagagcgacgaaagggccgctggcgataccagcaaggagagcacaccgctgtccgctagtcccaagaagaaccaaaagtctgatttagatgataacgaagaggagtccaaagcggcggagagccgagagcccgcacagactgaggaatctaacacaaaaacacgcaagcgtcaagcgcgcaaggagtaa

SEQ ID NO: 4502 - protein, 601 aa, Drosophila melanogaster
MGGNRAATLALLFASSLLLLSAANGADLDTESDDFEDGYVEDVQEEPAVIDGDEKLAYESPVIDAKKFHFADHFDDVEESRKRWVLSQAKKDDIAEEISKYDGIWNWESPQRIVWANDLGLVLKSKAKHAAIAAPLRKPFEFKSDKPLVVQYEVTLQEGQECGGSYLKLLSAGKDTEQLKAFNDKTPYTIMFGPDKCGNDVKMHFIFRHVNPINGTITEKHCNKPKNRLEEPFKDKLPHLYQLVVRPDNSFEIRVDHKIINEGSLLTDFKPPVNPPAEIDDPNDLKPESWDEREKIPDPTAHKPEDWDEDAPPQLPDTDAVMPNGWLEDEPDMIFDPTATKPEDWDAEIDGEWEAPLVDNPVCEKAPGCGKWKAPLIPNPNYKGKWRAPMIENPNYQGKWAPRKIPNPDFFEDLKPFQMTPISAVGLELWSMSSDILFDNLIITDDVEVARDFAANSFDIKRRYIDRESDSFVNKVVELAKANPSIWGIGLVAIVALVALTIYCRFGTAKSQDSAAKKAAAEAKKSDDPQPDDEPEAEEESDERAAGDTSKESTPLSASPKKNQKSDLDDNEEESKAAESREPAQTEESNTKTRKRQARKE

SEQ ID NO: 4503 - DNA, 1746 bp, Halocynthia roretzi
  CDS (1)..(1746)
atgtgtcgttgtaatttgaaaaactacatttatgtaattctcgtatctcttctgctggagataaaagccgaagaagagccagtgactgctggacccgtatatgtgagcccgaaaccgagcgattttgtgaattttgcagcttcttttgacgaggatgattcaataaaaagttgggttctgtccgaaaccaaaaaagacggagtcgattcggacatcgaaaaatacaatggccgatgggaagtgaccgaaccggtgcagaaattattagatggagataagggattactgctcaaggataaagcaaggcacaatgcaattgctgccaaacttgagacacctttcgatttcgacgggaagcctttcgtggtgcaatatgaggttaactttcaaaacgggatcgagtgtggtggagcatatgttaagttgctgactgagaccccagatttgtccctgaaaaatttcaatgacaaaacaccatacaccattatgtttggaccggacaaatgcggcgaaagttacaagctccattttatatttcgccacaaaaatccaaaaaccggcgaatttgaggagaagcacgcgaagcagacaacctctgatctcaaaggtccttacttggacaaatcatcccatctttacacgctggttgtgaatccggacaacacatttcagatgtacatcgaccagaaagaagtgaatactggcagtttgctgaaagatatgagtcctcctatcaatccaccaaaggaaattgaggacaaggatgacaaaaaaccagaagattgggacgaaagagaaaaaattgcagacccagaggcagttaagcctgaagattgggatgaagatgctcccgctcaaattcaagatcccgatgctgaaatgcctgaagattggttggaagatgagccgacatatgttgatgatcctgatgcagagaaacccaatgactgggatgatgatatggacggtgaatgggaagccccaaagattgaaaatcctaaatgcaaagaagcatccggctgtggaacttgggaagcacccatgataccgaatccacaatacaaggggaaatggagaccggcaatgattgttaatccgaattacaagggaatctggaaaccaaggataattccgaacccaaacttcttcgaagatctcaaaccttatgaaatgacaagcattggggctctcggactcgagctttggtctatgagtgacagcattatgttcgacaatttcatcataacaaacgacaaggcggtcgcggatgattacgcaagacagacttgggaattcaaaaaggtggtgcgtgcaaataaagagcctggcattttccaagggttaattgatgcaacagctgaacgtccgtggctttgggctatctacgtcttggtagttggcttgccacttgtgctcatcttcactttctgctgcggaggcaagaagaaatcggaccctaagaagacagatgaacccactccagatgatccacatgattctgctgaggaggaggataaaaaggaagaaggaagtcaagaagaagaagatccaacaggagaaacggctgaagacaaagtcgatgatgctgatgagggagttgaagagggtgcaggagatgctgaggcaaaaacagcaactaaatcagacttggagaaggatgatgaagagagcgaacacgatgaagaagagcaggaaaacgcaacccgacgctcaccaaggaaaaaaaaagtacggaagcaagattga

SEQ ID NO: 4504 - protein, 581 aa, Halocynthia roretzi
MCRCNLKNYIYVILVSLLLEIKAEEEPVTAGPVYVSPKPSDFVNFAASFDEDDSIKSWVLSETKKDGVDSDIEKYNGRWEVTEPVQKLLDGDKGLLLKDKARHNAIAAKLETPFDFDGKPFVVQYEVNFQNGIECGGAYVKLLTETPDLSLKNFNDKTPYTIMFGPDKCGESYKLHFIFRHKNPKTGEFEEKHAKQTTSDLKGPYLDKSSHLYTLVVNPDNTFQMYIDQKEVNTGSLLKDMSPPINPPKEIEDKDDKKPEDWDEREKIADPEAVKPEDWDEDAPAQIQDPDAEMPEDWLEDEPTYVDDPDAEKPNDWDDDMDGEWEAPKIENPKCKEASGCGTWEAPMIPNPQYKGKWRPAMIVNPNYKGIWKPRIIPNPNFFEDLKPYEMTSIGALGLELWSMSDSIMFDNFIITNDKAVADDYARQTWEFKKVVRANKEPGIFQGLIDATAERPWLWAIYVLVVGLPLVLIFTFCCGGKKKSDPKKTDEPTPDDPHDSAEEEDKKEEGSQEEEDPTGETAEDKVDDADEGVEEGAGDAEAKTATKSDLEKDDEESEHDEEEQENATRRSPRKKKVRKQD

SEQ ID NO: 4505 - DNA, 1749 bp, Yarrowia lipolytica
  CDS (1)..(1749)
atgcgactttccaaattggccgtttcttcggtgctggccgccgttgcttgtgctcaggacgccgacgctgctgctgatgctgctccttcctctcaggttgagcaccccgaatttactccttacactggagctgtgacgggcttctttgagcagttcctggatggccacaagtggcaaaagtcgtcggctatgaaggacgacgagttttcttacgtcggcgaatgggccgtggaggaaccctatgtgttccccggcttcaagggagacaagggtcttgtcgtcaagtctcctgctgctcaccacgccatcaccaccgcctttgacactcccatcaacaacaagggcaagactctggtggtgcagtacgaggtcaagctgcagaagggactcgagtgcggaggtgcttacgtcaagctgctgtctgctgaagttaacgccgatgataagggcgttgaggagttctcttccgaaactccttaccagatcatgtttggccctgacaaatgtggatccaccaacaaggtccacttcattgtcaagcgacctcttcccgatggtacctacgaggagaagcaccttgtttctcccgcccacgcccgtctcaacaagctcaccaacctctacaccctggtgatccgacccaagaacgagtttgagatccgaattaacggaaacgttgtcaagaccggcaacctgctagaggagggtctgttcaagccctctttcaaccctcctgctgagattgatgatcccgaggacacaaagcccgccgactgggttgaggagccttacatgcccgatcctgagcaggccgagaagcccgccgactgggacgagaaggctcccttctacattgccgaccccgaggctgtcatgcccgccgactggcaggaggataccccggattacattgtggatcctgaggccttcaagcccgaggactgggacgacgaggaggatggagagtgggttgcccccgagatccctaaccccgtttgcgaggagattggttgcggtccctgggtcgcccccaagatccagaaccccgactacaagggtgtgtggtctcagcccatgatcgagaaccccgactacaagggtacctgggcccccaagaagattcccaaccccaacttcaaggctgacgagcacgcctctgatcttgagcccattggtggtcttggcttcgagctctggaccatgcaggaggacattctgttcgacaacatctatgtcggacactctgtcgatgaggccgaggccattggaaacgccacctttgtgcccaagctggctctcgaggccgaggaggagaagctctctggtccccagaaggagactgctccttgggatactgatgagggtgttctttcctctgtcgacatgttccttgctgaccccgtttctttcgttctcgagcgggttcttggtttctttgaggtcttctctcaggatcccgtctccgctatccgagaggaccccgtcggtgcagcagcttctttcggtctccttctcatcacgtctgctaccgcctttggtctcctcaatgtgatcatcttcctcctgttcggcaagaagaagcagtcggctgctcccgccaagaagaccaagaagaccggtgacggtccttctaagctcaccaaggccgacgttgttgaggccgaggctgaggctgagcaggctgctgagaccgtcgttgcctctggtgtcgatgatggtctgccgagctcaagaagcgaaagggcttag

SEQ ID NO: 4506 - protein, 582 aa, Yarrowia lipolytica
MRLSKLAVSSVLAAVACAQDADAAADAAPSSQVEHPEFTPYTGAVTGFFEQFLDGHKWQKSSAMKDDEFSYVGEWAVEEPYVFPGFKGDKGLVVKSPAAHHAITTAFDTPINNKGKTLVVQYEVKLQKGLECGGAYVKLLSAEVNADDKGVEEFSSETPYQIMFGPDKCGSTNKVHFIVKRPLPDGTYEEKHLVSPAHARLNKLTNLYTLVIRPKNEFEIRINGNVVKTGNLLEEGLFKPSFNPPAEIDDPEDTKPADWVEEPYMPDPEQAEKPADWDEKAPFYIADPEAVMPADWQEDTPDYIVDPEAFKPEDWDDEEDGEWVAPEIPNPVCEEIGCGPWVAPKIQNPDYKGVWSQPMIENPDYKGTWAPKKIPNPNFKADEHASDLEPIGGLGFELWTMQEDILFDNIYVGHSVDEAEAIGNATFVPKLALEAEEEKLSGPQKETAPWDTDEGVLSSVDMFLADPVSFVLERVLGFFEVFSQDPVSAIREDPVGAAASFGLLLITSATAFGLLNVIIFLLFGKKKQSAAPAKKTKKTGDGPSKLTKADVVEAEAEAEQAAETVVASGVDDGLPSSRSERA

SEQ ID NO: 4507 - DNA, 1593 bp, Arabidopsis thaliana
  CDS (1)..(1593)
atgagacaacggcaactattttccgtgtttttgcttctcttagctttcgtttcgttccagaagctttgctactgtgacgatcaaacggttctgtatgaatcgttcgatgagccttttgatggccgctggatcgtttcgaagaatagtgattacgaaggtgtatggaagcatgcaaagagtgaaggacatgaggattatggacttctcgtgagtgagaaggctaggaagtatggaattgtgaaagagcttgacgagcctctaaacctcaaggaaggaactgttgttcttcagtacgaggttcgtttccaggaaggacttgagtgtggtggtgcttacttgaagtacctccgtcctcaggaagctggatggacacctcagggattcgatagtgaatccccttactctatcatgtttgggcctgacaagtgtggaggtacgaacaaagtgcatttcatcttgaagcacaagaatcccaagagtggcgagtacgttgaacaccatctgaagttccctccctctgttccttatgacaagctttcccatgtctacaccgccatcttgaaacccgacaacgaggttagaattttggttgatggagaggagaagaaaaaggccaatttactctctggtgaagactttgagcctgcattgatccctgccaagaccatccctgaccctgaagacaagaaaccagaggattgggacgaaagagccaagattcctgatccaaatgccgtgaagcctgaggactgggatgaggatgcacctatggagattgaagatgaggaagctgagaaacccgaaggatggttagatgatgagcctgaggaggtcgacgaccccgaagcgaccaagcctgaagattgggatgatgaggaagatggtatgtgggaggctcctaaaattgacaaccccaagtgtgaagcagcacctggttgtggtgaatggaagagaccaatgaagaggaatcctgcttacaagggcaaatggagctcacctcttattgataacccggcttacaagggaatctggaaacccagagatatccctaaccctgactactttgagctagacagacccgattacgaacccattgcagccatcggtattgagatctggacaatgcaagatggtatcttgtttgacaacatcttgatagcgaaagacgagaaggtcgctgagacttacagacagaccacttggaagcccaaattcgatgttgagaaagagaaacaaaaggcagaagaggaagctgctggctctgcagatggtctcaagagctaccagaaggttgtattcgacctcttgaacaaggttgcagatttatctttcctaagtgcctacaagtctaagatcacggaactgattgagaaagccgagcaacaaccaaacttaaccattggtgtcctcgtcgccattgtggttgtattcttctcgctcttcctcaagcttatctttggtggcaaaaaggcggcggcacctgtggaaaagaagaaaccagaagtagcggagagttcaaagagtggggatgaggcggagaagaaggaagaaaccgcggcaccacgcaaaaggcaaccgagacgtgataattag

SEQ ID NO: 4508 - protein, 530 aa, Arabidopsis thaliana
MRQRQLFSVFLLLLAFVSFQKLCYCDDQTVLYESFDEPFDGRWIVSKNSDYEGVWKHAKSEGHEDYGLLVSEKARKYGIVKELDEPLNLKEGTVVLQYEVRFQEGLECGGAYLKYLRPQEAGWTPQGFDSESPYSIMFGPDKCGGTNKVHFILKHKNPKSGEYVEHHLKFPPSVPYDKLSHVYTAILKPDNEVRILVDGEEKKKANLLSGEDFEPALIPAKTIPDPEDKKPEDWDERAKIPDPNAVKPEDWDEDAPMEIEDEEAEKPEGWLDDEPEEVDDPEATKPEDWDDEEDGMWEAPKIDNPKCEAAPGCGEWKRPMKRNPAYKGKWSSPLIDNPAYKGIWKPRDIPNPDYFELDRPDYEPIAAIGIEIWTMQDGILFDNILIAKDEKVAETYRQTTWKPKFDVEKEKQKAEEEAAGSADGLKSYQKVVFDLLNKVADLSFLSAYKSKITELIEKAEQQPNLTIGVLVAIVVVFFSLFLKLIFGGKKAAAPVEKKKPEVAESSKSGDEAEKKEETAAPRKRQPRRDN

SEQ ID NO: 4509 - DNA, 1692 bp, Aspergillus fumigatus
  CDS (1)..(1692)
atgcgtttcaacgcagctatcactggcgctctcgtctcttcggccactttgatgggccaagctcatgctgaggagactgagaagaaggctgacgctacttcgctcgttgagaagcctaccttcacccctactaccatcgaagctcccttcctcgagcaatttaccgccgattgggactcgagatggaccccctctcacgccaagaaggaggactccaagtcggaggaggattgggcctacgtcggtgaatgggctgtcgaggagcctaccgtgctcaacggcatggttggcgacaagggtctggttgtcaagaacgtcgcggctcaccatgccatctctgcgaagttccccaagaagatcgacaacaagggcaagaccttggttgttcagtatgaggttaagccacagaactcccttgtttgcggcggtgcctacatgaagcttttgcaggagaacaagaagcttcacgccgaggagttttccaacgcgactccctacgtgatcatgttcggtcccgacaagtgcggtgctaccaacaaggttcacttcattttccgtcacaagaatcccaagaccggcgaatacgaggagaagcacatgacagcgcctcctgccgctcgtaccaccaagctcaccacgttgtacactttgattgtcaagcccgatcagtccttccagattctgattgacggtgaggctgtcaagaacggtaccctgcttgaggacttcgccccccctgtcaacccggagaaggagatcgacgaccccaaggacaagaagcccgccgattgggttgacgaagccaagattcccgacccggaggccaagaagcctgatgactgggatgaagacgctccttatgagatcgtggatgaggaggctactatgcccgaggactggcttgaggacgagcccaccagtattcctgatcccgaggccgagaagcccgaggactgggatgacgaggaggatggtgactggattcctcctactgttcctaaccccaagtgcaacgaagtctccggatgtggcccctggactcctcccatgaagaagaaccccgcctacaagggcaagtggaccgctcctttgattgacaaccccgcctacaagggcatttggaagcctcgcaagatccccaaccccgcctacttcgaggacaagactccttctaacttcgagcctatgggcgctgttggtttcgagatctggaccatgcagaacgacattcttttcgacaacatctacattggtcactccattgaagatgctgagaagctccgcaaggagacctttgatctcaagcaccccgtggaagttgctctggaggaagcctccaagcccaagcttgaggagaaggccgccactcccagcgtcagcttcaaggaggccccagtgacatacgttcgtgaaaaggttgactacttcgtgggtttggccaagcaagatcccatcaacgctgtcaagcaagttcctgaggtcgccggtggtctgggagctctccttctgaccatgatcctcgtcattgtgggcgctgttggagccagcagccctgcccctgccgccgccgctaagaagggcaaggaggccgcctctgccgccaaggagaaggccagtgaagccgtcagctctgcggccgacactgccaagggcgcagctaccaagcgtaacacccggtcgtctgcccagtaa

SEQ ID NO: 4510 - protein, 563 aa, Aspergillus fumigatus
MRFNAAITGALVSSATLMGQAHAEETEKKADATSLVEKPTFTPTTIEAPFLEQFTADWDSRWTPSHAKKEDSKSEEDWAYVGEWAVEEPTVLNGMVGDKGLVVKNVAAHHAISAKFPKKIDNKGKTLVVQYEVKPQNSLVCGGAYMKLLQENKKLHAEEFSNATPYVIMFGPDKCGATNKVHFIFRHKNPKTGEYEEKHMTAPPAARTTKLTTLYTLIVKPDQSFQILIDGEAVKNGTLLEDFAPPVNPEKEIDDPKDKKPADWVDEAKIPDPEAKKPDDWDEDAPYEIVDEEATMPEDWLEDEPTSIPDPEAEKPEDWDDEEDGDWIPPTVPNPKCNEVSGCGPWTPPMKKNPAYKGKWTAPLIDNPAYKGIWKPRKIPNPAYFEDKTPSNFEPMGAVGFEIWTMQNDILFDNIYIGHSIEDAEKLRKETFDLKHPVEVALEEASKPKLEEKAATPSVSFKEAPVTYVREKVDYFVGLAKQDPINAVKQVPEVAGGLGALLLTMILVIVGAVGASSPAPAAAAKKGKEAASAAKEKASEAVSSAADTAKGAATKRNTRSSAQ

SEQ ID NO: 4511 - DNA, 1623 bp, Helianthus tuberosus
  CDS (1)..(1623)
atggaattaagcaggaggaagatgtgttgttatatacagttttgttgttttgtgttgatcggatgcttcatttcgcagatttgtgcttcgtctgacgctatattttacgagtcgtttgatgaatcgttcgaggggagttggatcgtgtctgagaaggaagattatcccggtgaatggaaacactcaaagagcgagggacacgatgattacgggcttcttgtgagcgataaagcaagaaagtacgcaatcgtcaaggagctagaaaaacctgtcgagctcaaggacggtacaatcgttctccaatacgaagtccgtcttcaaaatggtctcgagtgcggtggtgcatatttgaaataccttcgaccgcaagacgctgggtggactgccaagggctttgacaacgagtctccttactcgatcatgttcggccccgacaaatgcggtgcaacaaacaaggttcatttcatcttaaagcacaaaaacccgaaaagcggagattacgttgaacaccatcttaagttccctccttctgtcccgtcagacaaattaacccatgtttacacagccgttataaaacccgacaacgagcttgttatcttgatcgatggagaagagaaaaagaaggctaattttctctcgtctgaagacttcgaacccgcgttaatccctacaaaaaccattccggaccctgatgataaaaagcccgaagattgggacgagcgtgctaaaatcccggacccggaagcaacaaagcctgacgattgggatgaggatgcacctatggaaattctagacgaagaagcagagaaacccgaaggatggttagacgacgagcctgaggagattgatgacccggaagcggttaaacccgaggattgggatgacgaggaggatggtgaatgggaagcaccgcaaatcgaaaacccgaaatgtgaatcggcacccgggtgtggagaatggaggagaccgttaaagaggaacccggcttacaagggtaaatggcatgctccgcttattgataatcccgcttacaaggggatatggaagccgcgtgagattccgaaccctgactactttgaacttgaaaagcccaactttgagccgattgctgcgattggtatcgaggatctggaccagcaagatggaatcttgtttgacaacattttgatagcgagtgatgagaaaaccgctgcgaaatcagggatactacttggaagccgaagtttaaggtggaagaagagaaacagaaggctgaagaaaaatcagccgttgcttgatgggctcaaaggaatccagaaagctgtgtttgatgtgctttacaagatcgctgacttgcccttcttgggtgaccacaaggtcaaagttttggaacttattgagaaggctgaaacacaaccaaacattacaattggtgtcatagtttcaatcattgttgtgatcttcagcatcttgttgaagttgttgtttggtggcaagaaagcggcaccaaaggtgaatgtggtaccgaagaagaaggaagaaccggaggcgtcaaacacagccgaagtaagggaaggtgaagaagagaaaaccgagggtgaagtggcggcagctcctcgtagaaggccaagacgtgacacctaa

SEQ ID NO: 4512 - protein, 540 aa, Helianthus tuberosus
MELSRRKMCCYIQFCCFVLIGCFISQICASSDAIFYESFDESFEGSWIVSEKEDYPGEWKHSKSEGHDDYGLLVSDKARKYAIVKELEKPVELKDGTIVLQYEVRLQNGLECGGAYLKYLRPQDAGWTAKGFDNESPYSIMFGPDKCGATNKVHFILKHKNPKSGDYVEHHLKFPPSVPSDKLTHVYTAVIKPDNELVILIDGEEKKKANFLSSEDFEPALIPTKTIPDPDDKKPEDWDERAKIPDPEATKPDDWDEDAPMEILDEEAEKPEGWLDDEPEEIDDPEAVKPEDWDDEEDGEWEAPQIENPKCESAPGCGEWRRPLKRNPAYKGKWHAPLIDNPAYKGIWKPREIPNPDYFELEKPNFEPIAAIGIEDLDQQDGILFDNILIASDEKTAAKSGILLGSRSLRWKKRNRRLKKNQPLLDGLKGIQKAVFDVLYKIADLPFLGDHKVKVLELIEKAETQPNITIGVIVSIIVVIFSILLKLLFGGKKAAPKVNVVPKKKEEPEASNTAEVREGEEEKTEGEVAAAPRRRPRRDT

SEQ ID NO: 4513 - DNA, 1656 bp, Pisum sativum
  CDS (1)..(1656)
atggtggatcgtaaggaaatccctttggctatggggctattggcggtgctccttttcttcgttgcttcttcctcttcgtttcatctcgttcgcgcttctgatgaagtagatgacgcgatcttttatgaatcgttcgatgaggattttgataaccgatggatcgtatctggcaaggaggaatacaatggtgtatggaagcattcaaagagtgaagggcatgatgattttggacttcttgtcagtgaaccagcaaggaagtatgctatagttaaagagcttgatgcacctgtcagtcttaaggacggaacagttgttcttcagtttgagactcgccttcaaaatggacttgaatgtggtggtgcatatattaaatatcttcaaactcaggagagtggttggaagcccaaggggtttgacaatgaatctggttattctatcatgtttggtccagataggtgtggggcaaccaacaaggtgcattttatcttcaggcataagaatcccaagactgggaagcatgttgaacaccacctcaagtttcctccttctgtcccgtctgacaaactatctcatgtgtacactgctgttctaaaggatgataatgaagtgagcattttaattgatggcgaggaaaagaaaaaggcaaatttcttatcttctgaagattttgagcctgcccttatcccttccaagacaatcccagaccccgatgataagaaacccgaggactgggacgagagagccaaaattcctgacccagaagctgtaaagccagaggactgggatgaggatgcacctagggaaattattgatgaagaagctgagaaacctgaaccatggttggatcatgagccagaagtagatgacccagaggcaaaacctgaagattgggatgatgaggaggatggtgaatgggaagctcccaaaatcgaaaacccaaagtgtgaagcagcccctggttgtggtgaatggaagaggccaaccaagagcaacccagcttataagggaaaatggagtgccccctacattgataaccccaattataagggtatttggaagcctcaggagattccaaacccagagtactttgaacttgagaaaccagactttgagcctattgctgctattggcattgaaatttggacaatgcaagatggcatcctatttgataatgttctcatagctaaagatgataagattgccgagtcctatagggaaactacttggaaacccaagtttaacattgagaaagagaaacaaaaacacgaagaggaggcagcggctgcagctgcggcacgctctgagtcagagggtattgctggcatccagaagaaggcattcgatctcttgtacaagatcgcagacattgccttcctaagtggccaaaaggagaagattattgaaatcattgaaaagggggagaagcaaccgaatctgactattggaattattgtatctgttgtgattgtctttgtgtcaatcttcttcagactcatattcggtggaaagaaacctgctaatgtggaggctaatgttgagaagaagaagaccaacacagaaactaccagtaaacaagatggcggagagaaggaagataacaaagaaaaggaggaaacagccaaccctccacgtcggaggccaaagagagacaattga

SEQ ID NO: 4514 - protein, 551 aa, Pisum sativum
MVDRKEIPLAMGLLAVLLFFVASSSSFHLVRASDEVDDAIFYESFDEDFDNRWIVSGKEEYNGVWKHSKSEGHDDFGLLVSEPARKYAIVKELDAPVSLKDGTVVLQFETRLQNGLECGGAYIKYLQTQESGWKPKGFDNESGYSIMFGPDRCGATNKVHFIFRHKNPKTGKHVEHHLKFPPSVPSDKLSHVYTAVLKDDNEVSILIDGEEKKKANFLSSEDFEPALIPSKTIPDPDDKKPEDWDERAKIPDPEAVKPEDWDEDAPREIIDEEAEKPEPWLDHEPEVDDPEAKPEDWDDEEDGEWEAPKIENPKCEAAPGCGEWKRPTKSNPAYKGKWSAPYIDNPNYKGIWKPQEIPNPEYFELEKPDFEPIAAIGIEIWTMQDGILFDNVLIAKDDKIAESYRETTWKPKFNIEKEKQKHEEEAAAAAAARSESEGIAGIQKKAFDLLYKIADIAFLSGQKEKIIEIIEKGEKQPNLTIGIIVSVVIVFVSIFFRLIFGGKKPANVEANVEKKKTNTETTSKQDGGEKEDNKEKEETANPPRRRPKRDN

SEQ ID NO: 4515 - DNA, 1683 bp, Schizosaccharomyces pombe
  CDS (1)..(1683)
atgaagtacggaaaggtatcttttctagcgcttttgtgctctttatatgttcggggatcacttgctgatcctgaatccgaacaagaacctttggtttttaacccaactgaagtgaaagcgcctcttgttgagcagtttcaaggtgcatggtctgaacgttggattccttcacatgctaaacgatttgtaaatggtattgaagaaatgagctatgtaggtgaatggactgttgaggaaagttctggtcccggtgcccttaagggtgaagccggtctcgttatgaaagacgaagccgctcatcatgctatttcttatgaatttgatgaacccataaatgaaccagaaaaggatttggtagttcaatatgaggttaaccccgaagagggtctgaactgtggtggtgcatatttaaagctcttagcagaacccactcatggtgaaatgtcaaactccatcgattacagaatcatgtttggacccgacaaatgtggtgttaatgaccgtgttcattttatcttcaagcataagaatccccttacgggtgagtattccgagaagcatctcgactctagacccgccagccttttgaaacctggtattacaaacctttacactttaattgtgaagcctgaccaaaccttcgaagtccgtattaatggcgatgttgtccgtcaaggatctttgttttatgattttatacctcctgttcttcctcccgttgaaatttacgatcccgaagatatcaagcctgctgattgggttgacgaacctgaaattcctgaccccaatgcggttaagcctgatgattgggatgaagacgctccccgtatgattcctgatcctgacgcagtgaaacctgaggattggttagaggatgaacctctttacattcctgatcctgaagctcagaagcctgaggattgggatgatgaagaagatggtgattggattccaagtgaaatcatcaatcctaaatgcattgaaggtgctggctgtggtgaatggaagccaccgatgattcgtaaccctaactatcgtggcccttggtctcctcctatgatccctaatcctgaattcattggtgaatggtatcctcgtaaaattcctaaccctgactattttgatgatgatcatccttctcatttcggtccactctacggtgttggtttcgaactttggactatgcagcccaacatccgctttagcaatatctatgtcggccattcaattgaggacgctgaacgtcttggaaatgaaactttcctacctaaattgaaagctgaaagagaattactttctaagcaagagtccatggaaaagcaatcaatgcatgttgacgaagagtctaatcaaattcttgagaagtttcttgacgtatatgatattattaaagctaaacttcctccaaatgttgccgaaaaagttgactactatgttgaaaccatcatcgagactcctgaaattgggattgcaattgttgccgttcttggctctttaaccgctgttattcttacttgttacttttatttctttgcttcctcttccccggcttctttatctactggaactacggaagctgagaaagagcagcaagagaagtttaagcaagagactgagactgagaagatagacgtttcttacgctcccgaaactgaatcaccaactgcgaagaatgaagactaa

SEQ ID NO: 4516 - protein, 560 aa, Schizosaccharomyces pombe
MKYGKVSFLALLCSLYVRGSLADPESEQEPLVFNPTEVKAPLVEQFQGAWSERWIPSHAKRFVNGIEEMSYVGEWTVEESSGPGALKGEAGLVMKDEAAHHAISYEFDEPINEPEKDLVVQYEVNPEEGLNCGGAYLKLLAEPTHGEMSNSIDYRIMFGPDKCGVNDRVHFIFKHKNPLTGEYSEKHLDSRPASLLKPGITNLYTLIVKPDQTFEVRINGDVVRQGSLFYDFIPPVLPPVEIYDPEDIKPADWVDEPEIPDPNAVKPDDWDEDAPRMIPDPDAVKPEDWLEDEPLYIPDPEAQKPEDWDDEEDGDWIPSEIINPKCIEGAGCGEWKPPMIRNPNYRGPWSPPMIPNPEFIGEWYPRKIPNPDYFDDDHPSHFGPLYGVGFELWTMQPNIRFSNIYVGHSIEDAERLGNETFLPKLKAERELLSKQESMEKQSMHVDEESNQILEKFLDVYDIIKAKLPPNVAEKVDYYVETIIETPEIGIAIVAVLGSLTAVILTCYFYFFASSSPASLSTGTTEAEKEQQEKFKQETETEKIDVSYAPETESPTAKNED

SEQ ID NO: 4517 - DNA, 1641 bp, Glycine max
  CDS (1)..(1641)
atgggagaacgaaaaggaatcccaatggctttggggctcttggcgatgatcctcttcttcattgcttcctcttcctctcacctcgttcgcgcttccgatgacgccgacgacgcgatcttctacgagtcgttcgacgaggattttgatggacggtggattgtatccgacaaggaggattacaatggtgtctggaagcatgccaagagtgatgggcatgatgattatggacttcttgttagtgaacaagccaggaaatatgctatagtcaaagaacttgccgagtctgtcagtcttaaggatggaacagttgttcttcagtttgagactcgccttcagaatggcctcgaatgtggtggtgcatatattaaatatcttcgaccccaggagagcggatggaaaccaaaggaatttgacaacgaatctccatattctatcatgtttggtcctgataagtgtggtgctacaaacaaggttcacttcattttcaagcataagaacccaaagagtggggagtatgttgagcatcatctcaagtatcccccttctgtcccatcggacaaactaactcatgtgtacactgcaattctgaagcctgataatgaattgcaaatcttgattgatggggaggagaagaaaaaggcaaatttcttgtcttctgaggactttgagcctcctcttataccttccaagacaatccctgatcctgatgataagaaacctgaggactgggacgaaagagccaaaatcccagacccaagtgctgtgaagccagatgactgggatgaggatgcacccatggaaatcttagatgaagaagcagagaaacctgaaggatggttggatgatgagccagaggaaattgatgacccagaggcaactaaaccagaagactgggatgatgaggaggatggtgaatgggaagccccaaagattgaaaacccaaagtgtgaggccgcccctggttgtggtgaatggaagaggccaacgaagaggaatccagcttataagggaaagtggagtgctccttacatcgataaccccagttacaagggcatatggaagcctcgcgagattccaaaccctgaatactttgaactcgcaaaacctgattttgagcctattgctgctattggcattgagatttggacaatgcaggatggcatcctatttgacaatgttctgatagctaacgatgataaagttgcagaatcctatcgggagactacatggaagcccaagtttaccgttgagaaagacaaactgaaggctgaagaggaggcggcaacgggttcagatggtatttcaggcttccagaagaaggtatttgacctcttgtacaagattgcagatattcccttcttgagcgagcacaaatctaagattttcgatctcattgagaaagctgagaaacagccaaatctcacaattggaattcttgtagctgttgtggttgtcttcgtgtcaattttcttcagactcatatttggtggcaagaaacctgcaaaggtggagaagaaaccagaacgcacagaagcttccaataaccaaggtagtggagagaatgaagaaaacaaagagaaggagaaacagaaagaggaagcatctaatgctgcgcgtcggaggccaaggcgagaaacttga

SEQ ID NO: 4518 - protein, 546 aa, Glycine max
MGERKGIPMALGLLAMILFFIASSSSHLVRASDDADDAIFYESFDEDFDGRWIVSDKEDYNGVWKHAKSDGHDDYGLLVSEQARKYAIVKELAESVSLKDGTVVLQFETRLQNGLECGGAYIKYLRPQESGWKPKEFDNESPYSIMFGPDKCGATNKVHFIFKHKNPKSGEYVEHHLKYPPSVPSDKLTHVYTAILKPDNELQILIDGEEKKKANFLSSEDFEPPLIPSKTIPDPDDKKPEDWDERAKIPDPSAVKPDDWDEDAPMEILDEEAEKPEGWLDDEPEEIDDPEATKPEDWDDEEDGEWEAPKIENPKCEAAPGCGEWKRPTKRNPAYKGKWSAPYIDNPSYKGIWKPREIPNPEYFELAKPDFEPIAAIGIEIWTMQDGILFDNVLIANDDKVAESYRETTWKPKFTVEKDKLKAEEEAATGSDGISGFQKKVFDLLYKIADIPFLSEHKSKIFDLIEKAEKQPNLTIGILVAVVVVFVSIFFRLIFGGKKPAKVEKKPERTEASNNQGSGENEENKEKEKQKEEASNAARRRPRRET

SEQ ID NO: 4519 - DNA, 1614 bp, Oryza sativa
  CDS (1)..(1614)
atggtgggtgggcgcgcgctcctgccgctgcttctgctctccgcgctgctcgtccagatccgcgcctccgatccgctgttctatgagccgttcgacgagagcttcgaggggaggtgggttctctccgggaaggacgactacaaaggtgtatggaagcacgaaaagagtgatggacatgaagactatggcctgcttgttagtgagaaggccaagaaatatgccataatcaaggagcttgatgagcctgttactttgaaggatgggactgttgtcctgcagtttgaagtgaggcttcagaatggccttgagtgtggaggtgcatatcttaagtacattcgtcctcaggatgctgcatgggatgccaaggagtttgataatgagactccttacactattatgtttggtcctgacaaatgtggatcaactaacaaggtgcatttcatccttaagcacaagaaccccaagactggcaagtatgttgaacaccacctcaagttcccaccttctgtcccatatgataagctctctcatgtctacacggctatcttgaagcctgataatgaggtgagaattttggttgatggggaagagaagaagaaggcaaacttcctttctgctgatgattttgagccatcacttatcccatccaagaccattcctgatcctgatgacaaaaagccagaagactgggatgagagagctaaaatccctgatccagatgctgtgaagcctgatgactgggatgaggatgcccccatggaaattgaggacgaagaggccacaaagccagaggggtggctggatgatgagccagaggaaattgatgatccggaggctaacaagcctgaagactgggatgatgaggaggatggagaatgggaagcaccaaagattgacaaccccaagtgtgaagaggctcctggttgtggtgagtggaagaggccgatgaagcagaaccctgcttacaagggcaagtggcatgcgcctcttatcgacaaccccaactacaaaggaatctggaagccccaagagatccccaaccctgagtacttcgagcttgacaagcctgactctgatccgattgccgctattgggattgagatctggacgatgcaagatggcatcctgtttgacaacattttgatcgctgatgatgagaaggttgccacttctatcctggagaagtcttggaagcccaagtacgaagtagagaaggagaaggagaaggctgaggaggcagcagcggcagcaggtgatggtctttctgagttccagaagaagatctttgacgttctgtacaaactcgctgacattccattcttggaaccctacaagactaagatcattgatgtaattgagaagggagagaagcagcccaacatcaccattggaattctggtctccatcgttgtcgtctttgtgactgtgctcttcaggatcctgttcggcggcaagaagccagcggctcctgtgaagcccgtagccgaggtcaaaaaaccaaagtctaccgagtccgaagcagctggaagcagcggtggcaaggaggacgagaaggaagaggaagagaaggatggagctgctgccccacgccggaggtcccgaagggagacatga

SEQ ID NO: 4520 - protein, 537 aa, Oryza sativa
MVGGRALLPLLLLSALLVQIRASDPLFYEPFDESFEGRWVLSGKDDYKGVWKHEKSDGHEDYGLLVSEKAKKYAIIKELDEPVTLKDGTVVLQFEVRLQNGLECGGAYLKYIRPQDAAWDAKEFDNETPYTIMFGPDKCGSTNKVHFILKHKNPKTGKYVEHHLKFPPSVPYDKLSHVYTAILKPDNEVRILVDGEEKKKANFLSADDFEPSLIPSKTIPDPDDKKPEDWDERAKIPDPDAVKPDDWDEDAPMEIEDEEATKPEGWLDDEPEEIDDPEANKPEDWDDEEDGEWEAPKIDNPKCEEAPGCGEWKRPMKQNPAYKGKWHAPLIDNPNYKGIWKPQEIPNPEYFELDKPDSDPIAAIGIEIWTMQDGILFDNILIADDEKVATSILEKSWKPKYEVEKEKEKAEEAAAAAGDGLSEFQKKIFDVLYKLADIPFLEPYKTKIIDVIEKGEKQPNITIGILVSIVVVFVTVLFRILFGGKKPAAPVKPVAEVKKPKSTESEAAGSSGGKEDEKEEEEKDGAAAPRRRSRRET

SEQ ID NO: 4521 - DNA, 1497 bp, Oryza sativa
  CDS (1)..(1497)
atggtgatgtacttactgtggtttgcaggtgtatggaagcacgaaaagagtgatggacatgaagactatggcctgcttgttagtgagaaggccaagaaatatgccataatcaaggagcttgatgagcctgttactttgaaggatgggactgttgtcctgcagtttgaagtgaggcttcagaatggccttgagtgtggaggtgcatatcttaagtacattcgtcctcaggatgctgcatgggatgccaaggagtttgataatgagactccttacactattatgtttggtcctgacaaatgtggatcaactaacaaggtgcatttcatccttaagcacaagaaccccaagactggcaagtatgttgaacaccacctcaagttcccaccttctgtcccatatgataagctctctcatgtctacacggctatcttgaagcctgataatgaggtgagaattttggttgatggggaagagaagaagaaggcaaacttcctttctgctgatgattttgagccatcacttatcccatccaagaccattcctgatcctgatgacaaaaagccagaagactgggatgagagagctaaaatccctgatccagatgctgtgaagcctgatgactgggatgaggatgcccccatggaaattgaggacgaagaggccacaaagccagaggggtggctggatgatgagccagaggaaattgatgatccggaggctaacaagcctgaagactgggatgatgaggaggatggagaatgggaagcaccaaagattgacaaccccaagtgtgaagaggctcctggttgtggtgagtggaagaggccgatgaagcagaaccctgcttacaagggcaagtggcatgcgcctcttatcgacaaccccaactacaaaggaatctggaagccccaagagatccccaaccctgagtacttcgagcttgacaagcctgactctgatccgattgccgctattgggattgagatctggacgatgcaagatggcatcctgtttgacaacattttgatcgctgatgatgagaaggttgccacttctatcctggagaagtcttggaagcccaagtacgaagtagagaaggagaaggagaaggctgaggaggcagcagcggcagcaggtgatggtctttctgagttccagaagaagatctttgacgttctgtacaaactcgctgacattccattcttggaaccctacaagactaagatcattgatgtaattgagaagggagagaagcagcccaacatcaccattggaattctggtctccatcgttgtcgtctttgtgactgtgctcttcaggatcctgttcggcggcaagaagccagcggctcctgtgaagcccgtagccgaggtcaaaaaaccaaagtctaccgagtccgaagcagctggaagcagcggtggcaaggaggacgagaaggaagaggaagagaaggatggagctgctgccccacgccggaggtcccgaagggagacatga

SEQ ID NO: 4522 - protein, 498 aa, Oryza sativa
MVMYLLWFAGVWKHEKSDGHEDYGLLVSEKAKKYAIIKELDEPVTLKDGTVVLQFEVRLQNGLECGGAYLKYIRPQDAAWDAKEFDNETPYTIMFGPDKCGSTNKVHFILKHKNPKTGKYVEHHLKFPPSVPYDKLSHVYTAILKPDNEVRILVDGEEKKKANFLSADDFEPSLIPSKTIPDPDDKKPEDWDERAKIPDPDAVKPDDWDEDAPMEIEDEEATKPEGWLDDEPEEIDDPEANKPEDWDDEEDGEWEAPKIDNPKCEEAPGCGEWKRPMKQNPAYKGKWHAPLIDNPNYKGIWKPQEIPNPEYFELDKPDSDPIAAIGIEIWTMQDGILFDNILIADDEKVATSILEKSWKPKYEVEKEKEKAEEAAAAAGDGLSEFQKKIFDVLYKLADIPFLEPYKTKIIDVIEKGEKQPNITIGILVSIVVVFVTVLFRILFGGKKPAAPVKPVAEVKKPKSTESEAAGSSGGKEDEKEEEEKDGAAAPRRRSRRET

SEQ ID NO: 4523 - DNA, 1470 bp, Oryza sativa
  CDS (1)..(1470)
atggtgggtgggcgcgcgctcctgccgctgcttctgctctccgcgctgctcgtccagatccgcgcctccgatccgctgttctatgagccgttcgacgagagcttcgaggggaggtgggttctctccgggaaggacgactacaaaggtgtatggaagcacgaaaagagtgatggacatgaagactatggcctgcttgttagtgagaaggccaagaaatatgccataatcaaggagcttgatgagcctgttactttgaaggatgggactgttgtcctgcagtttgaagtgaggcttcagaatggccttgagtgtggaggtgcatatcttaagtacattcgtcctcaggatgctgcatgggatgccaaggagtttgataatgagactccttacactattatgtttggtcctgacaaatgtggatcaactaacaaggtgcatttcatccttaagcacaagaaccccaagactggcaagtatgttgaacaccacctcaagttcccaccttctgtcccatatgataagctctctcatgtctacacggctatcttgaagcctgataatgaggtgagaattttggttgatggggaagagaagaagaaggcaaacttcctttctgctgatgattttgagccatcacttatcccatccaagaccattcctgatcctgatgacaaaaagccagaagactgggatgagagagctaaaatccctgatccagatgctgtgaagcctgatgactgggatgaggatgcccccatggaaattgaggacgaagaggccacaaagccagaggggtggctggatgatgagccagaggaaattgatgatccggaggctaacaagcctgaagactgggatgatgaggaggatggagaatgggaagcaccaaagattgacaaccccaagtgtgaagaggctcctggttgtggtgagtggaagaggccgatgaagcagaaccctgcttacaagggcaagtggcatgcgcctcttatcgacaaccccaactacaaaggaatctggaagccccaagagatccccaaccctgagtacttcgagcttgacaagcctgactctgatccgattgccgctattgggattgagatctggacgatgcaagatggcatcctgtttgacaacattttgatcgctgatgatgagaaggttgccacttctatcctggagaagtcttggaagcccaagtacgaagtagagaaggagaaggagaaggctgaggaggcagcagcggcagcaggtgatggtctttctgagttccagaagaagatctttgacgttctgtacaaactcgctgacattccattcttggaaccctacaagactaagatcattgtaagaatttctatcctctgtgacttcttttgtgttcaaagctcttacggtggattactagctgttaggtttatccttctggaaggtgacatcttaccttcgtcttcccttcacaggatgtaa

SEQ ID NO: 4524 - protein, 489 aa, Oryza sativa
MVGGRALLPLLLLSALLVQIRASDPLFYEPFDESFEGRWVLSGKDDYKGVWKHEKSDGHEDYGLLVSEKAKKYAIIKELDEPVTLKDGTVVLQFEVRLQNGLECGGAYLKYIRPQDAAWDAKEFDNETPYTIMFGPDKCGSTNKVHFILKHKNPKTGKYVEHHLKFPPSVPYDKLSHVYTAILKPDNEVRILVDGEEKKKANFLSADDFEPSLIPSKTIPDPDDKKPEDWDERAKIPDPDAVKPDDWDEDAPMEIEDEEATKPEGWLDDEPEEIDDPEANKPEDWDDEEDGEWEAPKIDNPKCEEAPGCGEWKRPMKQNPAYKGKWHAPLIDNPNYKGIWKPQEIPNPEYFELDKPDSDPIAAIGIEIWTMQDGILFDNILIADDEKVATSILEKSWKPKYEVEKEKEKAEEAAAAAGDGLSEFQKKIFDVLYKLADIPFLEPYKTKIIVRISILCDFFCVQSSYGGLLAVRFILLEGDILPSSSLHRM

SEQ ID NO: 4525 - DNA, 1323 bp, Oryza sativa
  CDS (1)..(1323)
atggcgatccgcgcgaggtcctcctcctacgccgccgcggcggtcgcgctggcgctcgcgctggcgtccgtcgccgctgtcgccggcgaggtcttcttccaggagaagttcgaagatggatgggaaagtcggtgggtcaagtcagaatggaagaaggatgagaacatggctggtgaatggaaccacacatctgggaagtggaatggagatcctgaggacaaaggtatccaaacctctgaggactacaggttctacgctatttcagcggagtacccagaattcagcaacaaggataaaaccctggtgctgcagttctctgtaaagcatgagcaaaagcttgactgtggtggtggatatgtcaagttgcttggtggtgatgttgaccagaagaaatttggtggggacacaccgtacagcattatgtttggaccagacatctgtgggtacagcaccaagaaggtccatactatctttactaagaatgacaagaaccatttgatcaagaaggatgtcccctgcgagactgatcagctgtcccatgtgtacactttgatcatccatcctgatgctacatacaccatacttattgacaatgttgagaagcaatctggcagcatctacgagcactgggatattctgcctccgaagcaaatcaaggacccagaagctaagaagccagaggactgggatgacaaggagtacattcctgaccctgaggacaagaagcctgagggatacgatgatattcccaaggaaatccctgaccctgatgctaagaagcctgaggactgggatgatgaggaagatggtgagtggactgcaccaaccattcctaaccctgagtacaagggaccatggaagcaaaagaaaatcaagaaccctaactaccaaggcaaatggaaggcaccgatgatcgacaacccagacttcaaggatgatccatacatctatgcttttgacagcctgaagtacattggcattgagttgtggcaggtcaaatcaggtactctgtttgacaacttccttattactgacgaccctgagttggccaagacattcgcagaggagacatggggcaagcacaaggatgctgagaaggctgcttttgacgaggcagagaaaaagaaggaagaggaggtaaattccttcaccttacaatgttctaatatgaggatgatggatgtacaactgtccttgtcattgcatttcagtctgtgctccatttcactgtctttgctatacgttttgatttttgttggcatgaacaccagttccttgatgatcagtgggccattgcttccacttaattatactatggtgtga

SEQ ID NO: 4526 - protein, 440 aa, Oryza sativa
MAIRARSSSYAAAAVALALALASVAAVAGEVFFQEKFEDGWESRWVKSEWKKDENMAGEWNHTSGKWNGDPEDKGIQTSEDYRFYAISAEYPEFSNKDKTLVLQFSVKHEQKLDCGGGYVKLLGGDVDQKKFGGDTPYSIMFGPDICGYSTKKVHTIFTKNDKNHLIKKDVPCETDQLSHVYTLIIHPDATYTILIDNVEKQSGSIYEHWDILPPKQIKDPEAKKPEDWDDKEYIPDPEDKKPEGYDDIPKEIPDPDAKKPEDWDDEEDGEWTAPTIPNPEYKGPWKQKKIKNPNYQGKWKAPMIDNPDFKDDPYIYAFDSLKYIGIELWQVKSGTLFDNFLITDDPELAKTFAEETWGKHKDAEKAAFDEAEKKKEEEVNSFTLQCSNMRMMDVQLSLSLHFSLCSISLSLLYVLIFVGMNTSSLMISGPLLPLNYTMV

SEQ ID NO: 4527 - DNA, 1218 bp, Oryza sativa
  CDS (1)..(1218)
atggcgatccgcgcgaggtcctcctcctacgccgccgcggcggtcgcgctggcgctcgcgctggcgtccgtcgccgctgtcgccggcgaggtcttcttccaggagaagttcgaagatggatgggaaagtcggtgggtcaagtcagaatggaagaaggatgagaacatggctggtgaatggaaccacacatctgggaagtggaatggagatcctgaggacaaaggtatccaaacctctgaggactacaggttctacgctatttcagcggagtacccagaattcagcaacaaggataaaaccctggtgctgcagttctctgtaaagcatgagcaaaagcttgactgtggtggtggatatgtcaagttgcttggtggtgatgttgaccagaagaaatttggtggggacacaccgtacagcattatgtttggaccagacatctgtgggtacagcaccaagaaggtccatactatctttactaagaatgacaagaaccatttgatcaagaaggatgtcccctgcgagactgatcagctgtcccatgtgtacactttgatcatccatcctgatgctacatacaccatacttattgacaatgttgagaagcaatctggcagcatctacgagcactgggatattctgcctccgaagcaaatcaaggacccagaagctaagaagccagaggactgggatgacaaggagtacattcctgaccctgaggacaagaagcctgagggatacgatgatattcccaaggaaatccctgaccctgatgctaagaagcctgaggactgggatgatgaggaagatggtgagtggactgcaccaaccattcctaaccctgagtacaagggaccatggaagcaaaagaaaatcaagaaccctaactaccaaggcaaatggaaggcaccgatgatcgacaacccagacttcaaggatgatccatacatctatgcttttgacagcctgaagtacattggcattgagttgtggcaggtcaaatcaggtactctgtttgacaacttccttattactgacgaccctgagttggccaagacattcgcagaggagacatggggcaagcacaaggatgctgagaaggctgcttttgacgaggcagagaaaaagaaggaagaggaggaagctgccaaggccggtgaggacgatgatgatttggatgatggcaaggattctgatgatgagaagcatgatgagctctaa

SEQ ID NO: 4528 - protein, 405 aa, Oryza sativa
MAIRARSSSYAAAAVALALALASVAAVAGEVFFQEKFEDGWESRWVKSEWKKDENMAGEWNHTSGKWNGDPEDKGIQTSEDYRFYAISAEYPEFSNKDKTLVLQFSVKHEQKLDCGGGYVKLLGGDVDQKKFGGDTPYSIMFGPDICGYSTKKVHTIFTKNDKNHLIKKDVPCETDQLSHVYTLIIHPDATYTILIDNVEKQSGSIYEHWDILPPKQIKDPEAKKPEDWDDKEYIPDPEDKKPEGYDDIPKEIPDPDAKKPEDWDDEEDGEWTAPTIPNPEYKGPWKQKKIKNPNYQGKWKAPMIDNPDFKDDPYIYAFDSLKYIGIELWQVKSGTLFDNFLITDDPELAKTFAEETWGKHKDAEKAAFDEAEKKKEEEEAAKAGEDDDDLDDGKDSDDEKHDEL

SEQ ID NO: 4529 - DNA, 1272 bp, Brassica napus
  CDS (1)..(1272)
atggcgaaactaaaccccaacttcatctctctgattcttatcggcctcgtcgcgatcgcctctgctagtgttatattcgaggaaaaattcgaagatggatgggagaagagatgggtaaaatctgactggaagaaagatgacaacactgctggggaatggagccacacagctggcaactggtctggtgacgctaacgacaaaggtatccagactagcgaggactacagattctacgccatatcagctgagttccctgagttcagcaacaaggacaagacccttgtcttccaattctccgtcaagcacgagcagaagcttgactgtggcggtggatacatgaagcttctcagtggtgatgttgaccagaagaaattcggtggagacactccttacagcatcatgtttggtcctgatatctgtggctacgacactaagaaagtgcatgctatccttacctacaatggaacaaaccatctgatcaagaaggaggttccatgtgagactgatcagctcacgcatgtctacacgttcatcctccgcccggatgctacttacagtattcttattgataacgttgagaagcaaactggtagcctctactctgactgggatctcctcccagccaagaagattaaggatcctagcgccaagaagcctgaggactgggatgacaaagagtacattcctgatcctgaagacacaaagccagctggatacgatgacatcccaaaggagatcccagacgctgatgcaaagaagcctgaggattgggatgatgaggaagatggtgagtggactgcccctaccattcccaaccccgagtacaacggtgaatggaagcccaagaaaattaagaaccctaactacaagggaaaatggaaggctccaatgattgacaaccctgacttcaaggatgacccagaactctatgtcttccccaaattgaagtatgttggagtggagttgtggcaggtgaaatctggatcattgttcgacaatgtcttggtctgcgacgacccggagtacgctaagcagatggctgaggaaacctggggaaagctcaaggatgctgagaaagcagcattcgacgaagctgagaagaagagagaggaagaggaatcaaaggatgctcccactgctgattctgacgctgaggatgaacaagaggacgatgaccatgaaggagatgaatccgacactgattcaaaaactgaggaaaccaaggtagaaacctcctcagacaaggatgatgccgcccatgacgagctctga

SEQ ID NO: 4530 - protein, 423 aa, Brassica napus
MAKLNPNFISLILIGLVAIASASVIFEEKFEDGWEKRWVKSDWKKDDNTAGEWSHTAGNWSGDANDKGIQTSEDYRFYAISAEFPEFSNKDKTLVFQFSVKHEQKLDCGGGYMKLLSGDVDQKKFGGDTPYSIMFGPDICGYDTKKVHAILTYNGTNHLIKKEVPCETDQLTHVYTFILRPDATYSILIDNVEKQTGSLYSDWDLLPAKKIKDPSAKKPEDWDDKEYIPDPEDTKPAGYDDIPKEIPDADAKKPEDWDDEEDGEWTAPTIPNPEYNGEWKPKKIKNPNYKGKWKAPMIDNPDFKDDPELYVFPKLKYVGVELWQVKSGSLFDNVLVCDDPEYAKQMAEETWGKLKDAEKAAFDEAEKKREEEESKDAPTADSDAEDEQEDDDHEGDESDTDSKTEETKVETSSDKDDAAHDEL

SEQ ID NO: 4531 - DNA, 1602 bp, Brassica napus
  CDS (1)..(1602)
atgatgagagaccggcagctattctccgccgttttgcttatcttagctttcgtttctctccagaagctttgctactgcgacgatcaaacggtgttgtatgaatcgttcgatgaggcgtttgatggtcgctggatcgtctcgaagaatggcgattacgaaggtgtgtggaagcatgagaagagtgagggacatgatgattatggacttctcgtaagcgagaaggctcgtaagtatggtatagtgaaagttctcgacgagccactaaacctcaaggacggaaccattgttcttcagtacgaggttcgtttccaggaagggcttgagtgcggtggtgcttacttgaagtacctccgtcctcaggaagctggatggacacctgagggattcgatagtgaatctccttactctatcatgtttggacccgacaagtgtggagctacgaacaaagttcatttcatcttgaaacacaagaaccccaagagcggcgagtacgttgagcaccatctcaagttcccaccctctgttccttatgacaagctttcccatgtctacaccgccatcttgaagccagacaacgaggttaggattttggttgatggagaggagaagaagaaggccaacttactctctggggaagactttgagcctgctttgatccctgacaagaccatccccgaccctgaagacaagaaaccagaagactgggatgagagagccaagatccctgaccctaacgctgtgaagcctgacgactgggacgaggaagcaccgatggagatagaagatgaagaagccgagaaacccgaaggatggttagacgatgagcctgaggaggtggacgacccagaggcaaccaaacctgaagattgggatgatgaggaagatggtatgtgggaggcaccaaagattaacaaccccaaatgtgaagcagcaccaggatgcggtgaatggaagagaccgatgaagaagaaccctgcttacaagggcaaatggagtgcacctatgatagataaccctgcttacaagggaatctggaagcccagagacatccctaaccctgactactttgagctagacagacctgattacgaacccattgcagctatcggtatagagatctggacgatgcaagacggtatcttgtttgacaacattttgatagcgaaagacgagaaggtcgctgagagttacagacagacaacgtggaagcctaagttcgatgttgagaaagagaaacaaaaggaggaagagaaggctgctgaatctgcagatggtctcaagagctaccagaaggttgtgttcgatctgttgaacaaggttgcagacatttctttcctaagtgcctacaagtctaagatcacggaactgattgagaaagctgaggaacaaccaaacttaacaattggtgtcctagtctccattgttgttgtattcttctcgctcttcatcaagcttatcttcggtggcaaaaaggcggcaccggcggcgagtgtggagaagaagaaaccagaagtaggagagagctcaaagagtggagatgagtcagagaataaggaagaaaccgctgctccccgcaaaaggcaaccgagacgtgataattag

SEQ ID NO: 4532 - protein, 533 aa, Brassica napus
MMRDRQLFSAVLLILAFVSLQKLCYCDDQTVLYESFDEAFDGRWIVSKNGDYEGVWKHEKSEGHDDYGLLVSEKARKYGIVKVLDEPLNLKDGTIVLQYEVRFQEGLECGGAYLKYLRPQEAGWTPEGFDSESPYSIMFGPDKCGATNKVHFILKHKNPKSGEYVEHHLKFPPSVPYDKLSHVYTAILKPDNEVRILVDGEEKKKANLLSGEDFEPALIPDKTIPDPEDKKPEDWDERAKIPDPNAVKPDDWDEEAPMEIEDEEAEKPEGWLDDEPEEVDDPEATKPEDWDDEEDGMWEAPKINNPKCEAAPGCGEWKRPMKKNPAYKGKWSAPMIDNPAYKGIWKPRDIPNPDYFELDRPDYEPIAAIGIEIWTMQDGILFDNILIAKDEKVAESYRQTTWKPKFDVEKEKQKEEEKAAESADGLKSYQKVVFDLLNKVADISFLSAYKSKITELIEKAEEQPNLTIGVLVSIVVVFFSLFIKLIFGGKKAAPAASVEKKKPEVGESSKSGDESENKEETAAPRKRQPRRDN

SEQ ID NO: 4533 - DNA, 1608 bp, Brassica napus
  CDS (1)..(1608)
atgatgagagaccggcagctattctccggccttatgcttatcctagctctcctctcgctccagaacctttgccactgcgacgataatacggtgttgtatgaatcgttcgatgaggcgtttgatggtcgctggatcgtttcgaagaatggtgattacgaaggtgtgtggaagcatgcgaagagtgagggacatgatgattacggacttctcgtaagcgagaaggctcgtaagtacggtatagtgaaggagcttgacgagcctctaaacctcaaggaaggaaccattgttcttcagtacgaggttcgtttccaggaagggcttgagtgtggtggtgcttacttgaagtacctccgtcctcaggaagctggatggacacctgaagggttcgatagcgaatctccttactctatcatgtttgggcctgacaagtgtggagccacaaacaaagttcatttcatcttgaaacacaagaacccaaagagcggcgagtacgttgagcaccatctcaagttccctccctctgttccttacgacaagctttcccatgtctacaccgctatcttgaagccagacaacgaggttaggattctggttgatggagaggagaagaagaaggctaatttactttctggggaggactttgagcctgcgttgatccctgccaagaccatccctgaccctgaagacaagaaaccagaagactgggatgagagagccaagatccctgatcctaacgccgtgaagcctgaagactgggacgaggaggcgcccatggagatcgaagacgaggaagctgagaaacccgaaggatggttagatgacgagcctgaggaggtggacgacccagaggcgaccaagcctgaagactgggatgatgaggaagatggtatgtgggagactccaaagattgacaaccccaagtgtgaagcagcaccaggctgtggtgaatggaagagacccatgaagaagaatcctgcttacaagggcaaatggagtgcgcctatgatagacaaccctgcttacaagggaatctggaagcccagagacatccctaaccctgactactttgagctggacagacctgacttcgaacccattgcggcaatcggtattgagatctggacgatgcaagacggtatcttgtttgataacatgttgatagcgaaagacgagaaggtcgctgagagttacagacagacgacatggaagccgaagttcgatgttgagaaagagaaacaaaaggcggaagaggaggctgctagctctgctgatggtctcaagagctaccagaaggttgtgttcgacctcttgaacaaggttgcagacatttctttcctaagtgcctacaagtctaagatcacagaactgattgagaaagctaaggaacaaccaaacttaaccattggtgtcctagtctccattgtcgtagtattcttctcgctcttcatcaagcttatcttcggtggcaaaaaggcggcgccggcagcaaccgtggagaagaagaagaaaccagaagtaggagagagctcaaagagtgaagatgagacagagaagaaggaagaaaccgctgctgctcctcgcaaaaggcaaccgaggcgtgacaattag

SEQ ID NO: 4534 - protein, 535 aa, Brassica napus
MMRDRQLFSGLMLILALLSLQNLCHCDDNTVLYESFDEAFDGRWIVSKNGDYEGVWKHAKSEGHDDYGLLVSEKARKYGIVKELDEPLNLKEGTIVLQYEVRFQEGLECGGAYLKYLRPQEAGWTPEGFDSESPYSIMFGPDKCGATNKVHFILKHKNPKSGEYVEHHLKFPPSVPYDKLSHVYTAILKPDNEVRILVDGEEKKKANLLSGEDFEPALIPAKTIPDPEDKKPEDWDERAKIPDPNAVKPEDWDEEAPMEIEDEEAEKPEGWLDDEPEEVDDPEATKPEDWDDEEDGMWETPKIDNPKCEAAPGCGEWKRPMKKNPAYKGKWSAPMIDNPAYKGIWKPRDIPNPDYFELDRPDFEPIAAIGIEIWTMQDGILFDNMLIAKDEKVAESYRQTTWKPKFDVEKEKQKAEEEAASSADGLKSYQKVVFDLLNKVADISFLSAYKSKITELIEKAKEQPNLTIGVLVSIVVVFFSLFIKLIFGGKKAAPAATVEKKKKPEVGESSKSEDETEKKEETAAAPRKRQPRRDN

SEQ ID NO: 4535 - DNA, 1269 bp, Brassica napus
  CDS (1)..(1269)
atggcgaaactaatccttggcctcgtatccttgattcttatcggactcgtcgcgatcgcttccgccgcagttatcttcgaggagcgctttgatgatggatgggagaacaggtgggttaaatctgagtggaagaaagatgaccaggctgctggggagtggaaccacacttctggaaattggtctggtgatgctaatgataaaggtatccagaccagtgaggactacagattctacgccatttcagctgagttccctgaattcagcaacaaggacaaaaccttagtcttccagttctcagtcaagcacgagcaaaagcttgactgtggtggtggctacatgaagctccttagtggcgatgttgaccagaagaaatttggtggcgacactccatacagcatcatgtttggtcccgatatctgtggctacagcacgaagaaagtgcatgctatccttacctacaatgacgccaaccacctgatcaagaaggatgttccatgtgaaactgaccagctcacccatgtctacacattcatcctccgtccagatgctacttacagcattctcattgacaatgttgagaagcaaaccggtagcctttactctgactgggatcttctcccacccaagaagatcaaagaccccaatgccaagaagcctgaggactgggacgagcaagagtacattccagaccctgaagacaagaaacctaacggatacgatgatatccctaaggagatcccagataccgatgcaaagaagcctgaggactgggatgaagaagaagatggtgagtggactgccccgaccgttcccaaccctgagtacatgggtgaatggaagcccaagcaaatcaagaaccccaattacaagggcaagtgggaggctccagaaattgacaaccctgactttaagaatgactcagagccgtatgtcttccccaagctaaagtatgttggaatcgaattgtggcaggtgaaatcaggatcattgttcgacaatgttttgatctgcgatgacccagactacgccaagaagttggcagatgaaacatggggcaagctcaaggatgcggagaaagcagctttcgatgagattgagaagaagaaagaggaagaggaatccaaggacgctcctgcggaaactgatgctgaagatgaagcagaggaagatgaaggagatgagtctgacactgaagctaagaccgaagccaaatcagaagttagcgaggagacctcagacaaagacgccactgctcatgatgagctgtga

SEQ ID NO: 4536 - protein, 422 aa, Brassica napus
MAKLILGLVSLILIGLVAIASAAVIFEERFDDGWENRWVKSEWKKDDQAAGEWNHTSGNWSGDANDKGIQTSEDYRFYAISAEFPEFSNKDKTLVFQFSVKHEQKLDCGGGYMKLLSGDVDQKKFGGDTPYSIMFGPDICGYSTKKVHAILTYNDANHLIKKDVPCETDQLTHVYTFILRPDATYSILIDNVEKQTGSLYSDWDLLPPKKIKDPNAKKPEDWDEQEYIPDPEDKKPNGYDDIPKEIPDTDAKKPEDWDEEEDGEWTAPTVPNPEYMGEWKPKQIKNPNYKGKWEAPEIDNPDFKNDSEPYVFPKLKYVGIELWQVKSGSLFDNVLICDDPDYAKKLADETWGKLKDAEKAAFDEIEKKKEEEESKDAPAETDAEDEAEEDEGDESDTEAKTEAKSEVSEETSDKDATAHDEL

SEQ ID NO: 4537 - DNA, 1245 bp, Linum usitatissimum
  CDS (1)..(1245)
atggccaaccctactgcacactgtctgattctgctctcgctccttgccgtcgcctccgccaccatcttcttcgaagagaagttcgaagacggatgggaaaaaagatgggttaaatccgattggaagaaagatgagaacatggctggagagtggaaccacaccactggtaaatggaatgggggtgctgatgacaaaggtatccagacaagtgaagactacagattctatgctatttcagctgagtaccctgaactcagcaacaaggacaagactcttgtcttccagttctccgtcaagcatgagcagaagcttgactgtggtggtggctacatgaaattgctcagtggtgatgttgaccagaccaagtttggcggtgacactccatacagtattatgtttggacctgatatctgtgggtacagcaccaagaaagttcatgccattctcacctacaacggaacaaaccacttgatcaagaaggaagttccttgcgagactgaccagctctctcatgtttacacattcatcatccgcccggatgccacttacagtatccttattgacaacgtcgagaagcaaactggcagtctgtacactgactggagccttctcccgccaaagaagatcaaggacccagaagctaagaagcccgaggattgggatgacaaggagtacattgctgaccctgaggacatcaagccagagggatatgatgacatccctaaggagattcccgatcctgaagccaagaagcctgaagattgggatgatgaggaagatggtgagtggactgcccccaccatgcccaaccctgagtacaaaggtccatggactgcaaagaaaattaagaaccccgcctacaagggcaagtggaaggctccaatgatcgacaacccagagttcaaggacgatcccgagatctacgtcttccccaacctcaagtacgtcggcattgagttgtggcaggtgaaatccgggaccttgttcgacaacgtcttgatctgcgacgatcctgagtacgccaagaagttcgccgaagaaacatgggcaaagaacaaagatgctgagaaggcagcatttgatgaagctgagaagaagagagaagaggaggaatccaagagcgatccagctgacaccgacgccgatgatgacgacgacgacgactctgcagaagacgacgccgaagatgactcggaactcaaaggggaggaaacagatgacgagggagtacatgacgagctatag

SEQ ID NO: 4538 - protein, 414 aa, Linum usitatissimum
MANPTAHCLILLSLLAVASATIFFEEKFEDGWEKRWVKSDWKKDENMAGEWNHTTGKWNGGADDKGIQTSEDYRFYAISAEYPELSNKDKTLVFQFSVKHEQKLDCGGGYMKLLSGDVDQTKFGGDTPYSIMFGPDICGYSTKKVHAILTYNGTNHLIKKEVPCETDQLSHVYTFIIRPDATYSILIDNVEKQTGSLYTDWSLLPPKKIKDPEAKKPEDWDDKEYIADPEDIKPEGYDDIPKEIPDPEAKKPEDWDDEEDGEWTAPTMPNPEYKGPWTAKKIKNPAYKGKWKAPMIDNPEFKDDPEIYVFPNLKYVGIELWQVKSGTLFDNVLICDDPEYAKKFAEETWAKNKDAEKAAFDEAEKKREEEESKSDPADTDADDDDDDDSAEDDAEDDSELKGEETDDEGVHDEL

SEQ ID NO: 4539 - DNA, 1272 bp, Brassica napus
  CDS (1)..(1272)
atggcgaaattaacgcttagcgtcatctccgtggttcttatcggtctcgtcgcgatcgcttccgccgcggttatcttcgaggagcgctttgatgatggatgggagaacagatgggttaaatcagagtggaagaaagaggacaagtctgctggggagtggagccacactgctggaaactggtctggtgatgctaacgataaaggtatccagaccagtgaggactacagattctacgccatctcagctgagttccctgaattcagcaacaaggacaaaaccttagtcttccaattctcagtcaagcacgagcaaaagcttgactgtggtggtggctacatgaagcttctcagtggtgatgttgaccagaagaaatttggtggtgacaccccatacagcatcatgtttggtcccgatatctgtgggtacaccacgaagaaagtgcatgctatccttacctacaatgacgccaaccacctgatcaagaaggatgttccgtgtgaaactgaccagctcacccatgtctacacgttcatcctccgcccagatgctacttacagcattctcattgacaatgttgagaagcaaaccggtagcctgtactctgactgggatcttcttccacccaagaagatcaaggaccccagcgccaagaagcctgaggactgggacgagcaagagtacattccagaccctgaagacaagaaacctgacggatacgatgatatcccaaaggagatcccagacaccgatgcaaagaagcctgaggactgggatgatgaagaagatggtgagtggactgcccctaccattcccaaccccgagtacaacggtgaatggaagcccaagaaaattaagaaccctaactacaagggaaaatggaaggctccaatgattgacaaccctgacttcaaggatgacccagaactctatgtcttccccaaattgaagtatgttggagtggagttgtggcaggtgaaatctggatcattgttcgacaatgtcttggtctgcgacgacccggagtacgctaagcagatggctgaggaaacctggggaaagctcaaggatgctgagaaagcagcattcgacgaagctgagaagaagagagaggaagaggaatcaaaggatgctcccactgctgattctgacgctgaggatgaacaagaggacgatgaccatgaaggagatgaatccgacactgattcaaaaactgaggaaaccaaggaagaaacctcctcagacaaggatgatgccgcccatgacgagctctga

SEQ ID NO: 4540 - protein, 423 aa, Brassica napus
MAKLTLSVISVVLIGLVAIASAAVIFEERFDDGWENRWVKSEWKKEDKSAGEWSHTAGNWSGDANDKGIQTSEDYRFYAISAEFPEFSNKDKTLVFQFSVKHEQKLDCGGGYMKLLSGDVDQKKFGGDTPYSIMFGPDICGYTTKKVHAILTYNDANHLIKKDVPCETDQLTHVYTFILRPDATYSILIDNVEKQTGSLYSDWDLLPPKKIKDPSAKKPEDWDEQEYIPDPEDKKPDGYDDIPKEIPDTDAKKPEDWDDEEDGEWTAPTIPNPEYNGEWKPKKIKNPNYKGKWKAPMIDNPDFKDDPELYVFPKLKYVGVELWQVKSGSLFDNVLVCDDPEYAKQMAEETWGKLKDAEKAAFDEAEKKREEEESKDAPTADSDAEDEQEDDDHEGDESDTDSKTEETKEETSSDKDDAAHDEL

SEQ ID NO: 4541 - DNA, 1605 bp, Brassica napus
  CDS (1)..(1605)
atgatgagagaccggcagctattctccgccgttttgcttatcttagctttcgtttctctccagaagctttgctactgcgacgatcaaacggtgttgtatgaatcgttcgatgaggcgtttgatggtcgctggatcgtctcgaagaatggcgattacgaaggtgtgtggaagcatgagaagagtgagggacatgatgattatggacttctcgtaagcgagaaggctcgtaagtacggtatagtgaaagttctcgacgagccactaaacctcaaggacggaaccattgttcttcagtacgaggttcgtttccaggaagggcttgagtgtggtggtgcttacttgaagtacctccgtcctcaggaagctggatggacacctgagggattcgatagtgaatctccttactctatcatgtttggacccgacaagtgtggagccacgaacaaagtgcatttcatcttgaagcacaagaatcccaagagcggcgagtacgttgagcaccacctcaagttccctccctctgttccttatgacaagctttcccatgtctacaccgccatcttgaagccagacaacgaggttagaattttggttgatggagaggagaagaagaaggctaatttactctctggagaagactttgagcctgcattgatccctgacaagaccatccctgaccctgaggacaagaaaccagaagactgggatgaaagagccaagattcctgatcctagtgccgtgaagcctgacgactgggacgaggatgcacccatggagatcgaagatgaggaagctgagaaaccagaaggatggttagacgatgagcctgaggaggttgacgacccagaggcgaccaaacctgaagattgggatgatgaggaagatggtatgtgggaggctccaaagattgacaaccccaagtgtgaaacagcaccaggttgtggtgaatggaagagaccgatgaagaagaaccctgcttacaagggcaagtggagtgcacctctcatagataaccctgcttacaagggaatctggaaacccagagacatccctaaccctgactactttgagctagacagacccgactacgaacccattgcagccataggtatagagatctggacaatgcaagacggtatcttgtttgacaacatgttgatagcgaaagacgagaaggtcgccgagacttacagacagacaacgtggaagcctaagttcgatgttgagaaagagaaacaaaaggaggaagagaaggctgctgaatctgcagatggtctcaagagctaccagaaggttgtgttcgatctgttgaacaaggttgcagacatttccttcctaagtgcctacaagtccaagaccacagaactgattgagaaagctgaggaacaaccaaacttaacaattggtgtcctagtctccattgttatagtattcttctcgctcttcatcaagcttatcttcggtggcaaaaaggcggcaccggcggcgagtgtggagaagaagaaaccagaagtaggagagagctcaaagagtggagatgagtcagagaagaaggaagaaaccgctgctgctccccgcaaaaggcaaccgagacgtgataattag

SEQ ID NO: 4542 - protein, 534 aa, Brassica napus
MMRDRQLFSAVLLILAFVSLQKLCYCDDQTVLYESFDEAFDGRWIVSKNGDYEGVWKHEKSEGHDDYGLLVSEKARKYGIVKVLDEPLNLKDGTIVLQYEVRFQEGLECGGAYLKYLRPQEAGWTPEGFDSESPYSIMFGPDKCGATNKVHFILKHKNPKSGEYVEHHLKFPPSVPYDKLSHVYTAILKPDNEVRILVDGEEKKKANLLSGEDFEPALIPDKTIPDPEDKKPEDWDERAKIPDPSAVKPDDWDEDAPMEIEDEEAEKPEGWLDDEPEEVDDPEATKPEDWDDEEDGMWEAPKIDNPKCETAPGCGEWKRPMKKNPAYKGKWSAPLIDNPAYKGIWKPRDIPNPDYFELDRPDYEPIAAIGIEIWTMQDGILFDNMLIAKDEKVAETYRQTTWKPKFDVEKEKQKEEEKAAESADGLKSYQKVVFDLLNKVADISFLSAYKSKTTELIEKAEEQPNLTIGVLVSIVIVFFSLFIKLIFGGKKAAPAASVEKKKPEVGESSKSGDESEKKEETAAAPRKRQPRRDN

SEQ ID NO: 4543 - DNA, 1605 bp, Brassica napus
  CDS (1)..(1605)
atgatgagagaccggcagctattctccgccgttttgcttatcttagctttcgtttctctccagaagctttgctactgcgacgatcaaacggtgttgtatgaatcgttcgatgaggcgtttgatggtcgctggatcgtctcgaagaatggcgattacgaaggtgtgtggaagcatgagaagagtgagggacatgatgattatggacttctcgtaagcgagaaggctcgtaagtatggtatagtgaaagttctcgacgagccactaaacctcaaggacggaaccattgttcttcagtacgaggttcgtttccaggaagggcttgagtgcggtggtgcttacttgaagtacctccgtcctcaggaagctggatggacacctgagggattcgatagtgaatctccttactctatcatgtttggacccgacaagtgtggagctacgaacaaagttcatttcatcttgaaacacaagaaccccaagagcggcgagtacgttgagcaccatctcaagttcccaccctctgttccttatgacaagctttcccatgtctacaccgccatcttgaagccagacaacgaggttaggattttggttgatggagaggagaagaagaaggccaacttactctctggggaagactttgagcctgctttgatccctgacaagaccatccccgaccctgaagacaagaaaccagaagactgggatgagagagccaagatccctgaccctaacgctgtgaagcctgacgactgggacgaggaagcaccgatggagatagaagatgaagaagccgagaaacccgaaggatggttagacgatgagcctgaggaggtggacgacccagaggcaaccaaacctgaagattgggatgatgaggaagatggtatgtgggaggcaccaaagattaacaaccccaagtgtgaagcagcaccaggatgcggtgaatggaagagacccatgaagaagaacccagcttacaagggcaagtggagtgcacctatgattgataaccctgcttacaaaggaatctggaagcccagagacatccctaaccctgactactttgagctagacagacctgactacgagcccattgcagctatcggtatagagatctggacgatgcaagacggtatcttgtttgacaacattttgatagcgaaagacgagaaggtcgctgagagttacagacagacaacgtggaagcctaagttcgatgttgagaaagagaaacaaaaggaggaagagaaggctgctgaatctgcagatggtcttaagagctaccagaaggttgtgttcgatctgttgaacaaggttgcagacatttccttcctaagtgcctacaagtccaagaccacagaattgattgagaaagctgaggaacaaccaaacttaaccattggtgtcctagtctccattgttatagtattcttctcgctcttcatcaagcttatcttcggtggcaaaaaggcgtcggcggcggcgagtgtggagaagaagaaaccagaagtaggagagagctcaaagagtggagatgagtcggagaagaaggaagaaaccgctgctgctccccgcaaaaggcaaccgagacgtgataattag

SEQ ID NO: 4544 - protein, 534 aa, Brassica napus
MMRDRQLFSAVLLILAFVSLQKLCYCDDQTVLYESFDEAFDGRWIVSKNGDYEGVWKHEKSEGHDDYGLLVSEKARKYGIVKVLDEPLNLKDGTIVLQYEVRFQEGLECGGAYLKYLRPQEAGWTPEGFDSESPYSIMFGPDKCGATNKVHFILKHKNPKSGEYVEHHLKFPPSVPYDKLSHVYTAILKPDNEVRILVDGEEKKKANLLSGEDFEPALIPDKTIPDPEDKKPEDWDERAKIPDPNAVKPDDWDEEAPMEIEDEEAEKPEGWLDDEPEEVDDPEATKPEDWDDEEDGMWEAPKINNPKCEAAPGCGEWKRPMKKNPAYKGKWSAPMIDNPAYKGIWKPRDIPNPDYFELDRPDYEPIAAIGIEIWTMQDGILFDNILIAKDEKVAESYRQTTWKPKFDVEKEKQKEEEKAAESADGLKSYQKVVFDLLNKVADISFLSAYKSKTTELIEKAEEQPNLTIGVLVSIVIVFFSLFIKLIFGGKKASAAASVEKKKPEVGESSKSGDESEKKEETAAAPRKRQPRRDN

SEQ ID NO: 4545 - DNA, 1272 bp, Brassica napus
  CDS (1)..(1272)
atggcgaaactaatccttggcctcgtatccttgattcttatcggactcgtcgcgatcgcttccgccgcagttatcttcgaggagcgctttgatgatggatgggagaacaggtgggttaaatctgagtggaagaaagatgaccaggctgctggggagtggaaccacacttctggaaattggtctggtgatgctaatgataaaggtatccagaccagtgaggactacagattctacgccatttcagctgagttccctgaattcagcaacaaggacaaaaccttagtcttccagttctcagtcaagcacgagcaaaagcttgactgtggtggtggctacatgaagctcctcagtggtgatgttgaccagaagaaatttggtggcgacactccatacagcatcatgtttggtccagatatctgtggctacaccacgaagaaagtgcatgctatccttacctacaatgacgccaaccacctgatcaagaaggatgttccctgtgaaactgaccagctcacccatgtctacacattcatcctccgcccagatgctacttacagcattctcattgacaatgttgagaagcaaaccggtagcttgtactctgactgggatcttcttccacccaagaagatcaaggaccccagtgccaagaagcctgaggactgggacgagcaagagtacattccagaccctgaagacaagaaacctgacggatacgatgatatcccaaaggagatcccagataccgatgcaaagaagcctgaggactgggatgatgaagaagatggtgagtggactgcccctaccattcccaaccccgagtacaatggtgaatggaagcccaagcaaatcaagaaccctaactacaagggaaaatggaaggctccaatgattgacaaccctgagttcaaggatgacccagagctctatgtcttccccaaattgaagtatgttggagtggagttgtggcaggtgaaatctggatcattgttcgacaatgtcttggtctgcgatgacccggagtacgctaagcagttggctgaggaaacctggggaaagctcaaggatgctgagaaagcagcattcgacgaagctgagaagaagagagaggaagaggaatcaaaggatgctcccactgctgattctgatgctgaggatgaacaagaggacgatgaccatgaaggagatgaatccgacactgattcaaaaactgaggaaaccaaggaagaaacctcctcagacaaggatgatgccgcccatgacgagctctga

SEQ ID NO: 4546 - protein, 423 aa, Brassica napus
MAKLILGLVSLILIGLVAIASAAVIFEERFDDGWENRWVKSEWKKDDQAAGEWNHTSGNWSGDANDKGIQTSEDYRFYAISAEFPEFSNKDKTLVFQFSVKHEQKLDCGGGYMKLLSGDVDQKKFGGDTPYSIMFGPDICGYTTKKVHAILTYNDANHLIKKDVPCETDQLTHVYTFILRPDATYSILIDNVEKQTGSLYSDWDLLPPKKIKDPSAKKPEDWDEQEYIPDPEDKKPDGYDDIPKEIPDTDAKKPEDWDDEEDGEWTAPTIPNPEYNGEWKPKQIKNPNYKGKWKAPMIDNPEFKDDPELYVFPKLKYVGVELWQVKSGSLFDNVLVCDDPEYAKQLAEETWGKLKDAEKAAFDEAEKKREEEESKDAPTADSDAEDEQEDDDHEGDESDTDSKTEETKEETSSDKDDAAHDEL

SEQ ID NO: 4547 - DNA, 1272 bp, Brassica napus
  CDS (1)..(1272)
atggcgaaactaaaccccaacttcatctctctgattcttatcggcctcgtcgcgatcgcctctgctagtgttatcttcgaggaaaaattcgaagatggatgggagaagagatgggtaaaatctgactggaagaaagatgacaacactgctggggaatggagccacacagctggcaactggtctggtgacgctaacgacaaaggtatccagactagcgaggactacagattctacgccatatcagctgagttccctgagttcagcaacaaggacaagacccttgtcttccaattctctgtcaagcacgagcagaagcttgactgtggtggtggatacatgaagcttctcagtggtgatgttgaccagaagaaattcggtggagacactccttacagcatcatgtttggtcctgatatctgtggctacaacactaagaaagtgcatgctatccttacctacaatggaacaaaccatctgctcaagaaggaggttccatgtgagactgatcagctcacacatgtctacacgttcatccttcgcccggatgctacttacagtattcttatcgataacgttgagaagcaaactggtagcctctactctgactgggatctcctcccagctaagaagattaaggatcctagcgccaagaagcctgaggactgggatgacaaagagtacattcctgatcctgaagacacaaagccagctggatacgatgacatcccaaaggagatcccagacactgatgcaaagaagcctgaggactgggatgatgaagaagatggtgagtggactgcccctaccattcccaaccccgagtacaacggtgaatggaagcccaagaaaattaagaaccctaactacaagggaaaatggaaggctccaatgattgacaaccctgacttcaaggatgacccagaactctatgtcttccccaaattgaagtatgttggagtggagttgtggcaggtgaaatctggatcattgttcgacaatgtcttggtctgcgatgacccggagtacgctaagcagttggctgaggaaacctggggaaagctcaaggatgctgagaaagcagcattcgacgaagctgagaagaagagagaggaagaggaatcaaaggatgctcccactgctgattctgatgctgaggatgaacaagaggacgatgaccatgaaggagatgaatccgacactgattcaaaaactgaggaaaccaaggaagaaacctcctcagacaaggatgatgccgcccatgacgagctctga

SEQ ID NO: 4548 - protein, 423 aa, Brassica napus
MAKLNPNFISLILIGLVAIASASVIFEEKFEDGWEKRWVKSDWKKDDNTAGEWSHTAGNWSGDANDKGIQTSEDYRFYAISAEFPEFSNKDKTLVFQFSVKHEQKLDCGGGYMKLLSGDVDQKKFGGDTPYSIMFGPDICGYNTKKVHAILTYNGTNHLLKKEVPCETDQLTHVYTFILRPDATYSILIDNVEKQTGSLYSDWDLLPAKKIKDPSAKKPEDWDDKEYIPDPEDTKPAGYDDIPKEIPDTDAKKPEDWDDEEDGEWTAPTIPNPEYNGEWKPKKIKNPNYKGKWKAPMIDNPDFKDDPELYVFPKLKYVGVELWQVKSGSLFDNVLVCDDPEYAKQLAEETWGKLKDAEKAAFDEAEKKREEEESKDAPTADSDAEDEQEDDDHEGDESDTDSKTEETKEETSSDKDDAAHDEL

SEQ ID NO: 4549 - DNA, 1596 bp, Brassica napus
  CDS (1)..(1596)
atgatgagagaccggcagctattctccggccttatgcttatcctagctctcctctcgctccagaacctttgccactgcgacgataatacggtgttgtatgaatcgttcgatgaggcgtttgatggtcgctggatcgtttcgaagaatggtgattacgaaggtgtgtggaagcatgcgaagagtgagggacatgatgattacggacttctcgtaagcgagaaggctcgtaagtacggtatagtgaaggagcttgacgagcctctaaacctcaaggacggaaccattgttcttcagtacgaggttcgtttccaggaagggcttgagtgtggcggtgcttacttgaagtacctccgtcctcaggaagctggatggacacctgaagggtttgacagtgaatctccttactctatcatgtttgggcctgacaagtgtggagccacaaacaaagttcatttcatcttgaaacacaagaacccaaagagcggcgagtacgttgagcaccatctcaagttccctccctctgttccttacgacaagctttcccatgtctacaccgctatcttgaagccagacaacgaggttaggattctggttgatggagaggagaagaagaaggctaatttactttctggggaggactttgagcctgcgttgatccctgccaagaccatccctgaccctgaagacaagaaaccagaagactgggatgagagagccaagatccctgatcctaacgccgtgaagcctgaagactgggacgaggaggcgcccatggagatcgaagacgaggaagctgagaaacccgaaggatggttagatgacgagcctgaggaggtcgacgacccagaggcgaccaaacctgaagactgggatgatgaggaagatggtatgtgggaggctccaaagattgacaaccccaagtgtgaagcagcaccaggctgtggtgaatggaagagacccatgaagaagaatcctgcttacaagggcaaatggagtgcacctatgatagataaccctgcttacaagggaatctggaagcccagagacatccctaaccctgactacttcgagctagacagacctgactacgaacccattgcggcaatcggtatagagatctggacgatgcaagacggtatcttgtttgacaacatgttgatagcgaaagacgagaaggtcgctgagagttacagacagacgacatggaagccgaagttcgatgttgagaaagagaaacaaaaggcggaagaggaggctgctagctctgctgatggtctcaagagctaccagaaggttgtgttcgacctcttgaacaaggttgcagacatttctttcctaagtgcctacaagtctaagatcacagaactgattgagaaagctgaggaacaaccaaacttaaccattggtgtcctcgtctccattgtcatagtattcttctcgctcttcatcaagcttatcttcggtggcaaaaaggcggcagcaactgtggaaaagaagaaaccagaagtaggagagagctcaaaaagtgaagatgagacagagaagaaggaagaaaccgctgctccacgcaaaaggcaaccgagacgtgataattag

SEQ ID NO: 4550 - protein, 531 aa, Brassica napus
MMRDRQLFSGLMLILALLSLQNLCHCDDNTVLYESFDEAFDGRWIVSKNGDYEGVWKHAKSEGHDDYGLLVSEKARKYGIVKELDEPLNLKDGTIVLQYEVRFQEGLECGGAYLKYLRPQEAGWTPEGFDSESPYSIMFGPDKCGATNKVHFILKHKNPKSGEYVEHHLKFPPSVPYDKLSHVYTAILKPDNEVRILVDGEEKKKANLLSGEDFEPALIPAKTIPDPEDKKPEDWDERAKIPDPNAVKPEDWDEEAPMEIEDEEAEKPEGWLDDEPEEVDDPEATKPEDWDDEEDGMWEAPKIDNPKCEAAPGCGEWKRPMKKNPAYKGKWSAPMIDNPAYKGIWKPRDIPNPDYFELDRPDYEPIAAIGIEIWTMQDGILFDNMLIAKDEKVAESYRQTTWKPKFDVEKEKQKAEEEAASSADGLKSYQKVVFDLLNKVADISFLSAYKSKITELIEKAEEQPNLTIGVLVSIVIVFFSLFIKLIFGGKKAAATVEKKKPEVGESSKSEDETEKKEETAAPRKRQPRRDN

SEQ ID NO: 4551 - DNA, 1269 bp, Brassica napus
  CDS (1)..(1269)
atggcgaaattaacgcttagcgtcatctccgtggttcttatcggtctcgtcgcgatcgcttccgccgcggttatcttcgaggagcgctttgatgatggatgggagaacagatgggttaaatcagagtggaagaaagaggacaagtctgctggggagtggagccacactgctggaaactggtctggtgatgctaacgataaaggtatccagaccagtgaggactacagattctacgccatctcagctgagttccctgaattcagcaacaaggacaagaccttagtcttccaattctcagtcaagcacgagcagaagcttgactgtggtggtggctacatgaagcttctcagtggtgatgttgaccagaagaaatttggtggtgacaccccatacagcatcatgtttggtcccgatatctgtgggtacaccacgaagaaagtgcatgctatccttacctacaatgacgccaaccacctgatcaagaaggatgttccgtgtgaaactgaccagctcacccatgtctacacgttcatcctccgcccagatgctacttacaccattctcattgacaatgttgagaagcaaaccggtagcctgtactctgactgggatcttctcccacccaagaagatcaaggaccccaacgccaagaagcctgaggactgggacgagcaagagtacattcccgaccctgaagacaagaaacctgacggatacgatgatatcccaaaggagatcccagataccgatgcaaagaagcctgaggactgggatgaagaagaagatggtgagtggactgcccctaccattcccaaccctgagtacatgggtgaatggaagcccaagcaaatcaagaaccccaactacaagggcaagtgggaggctccagagattgacaaccctgacttcaaggacgacccagagctctatgtcttccccaagctgaagtatgttggaatcgaattgtggcaggtgaaatcaggatcattgttcgacaatgtcctgatctgcgatgacccagactacgccaagaagttggcagaagaaacatggggaaagctcaaggatgcggagaaagcagcttttgatgagattgagaagaagaaagaggaagaggaatccaaggacgctcctgcggaaactgatggtgaagatgaagcagaggaagatgaaggagaggaatcagatactgaatcaaagacggaggccaaatcagaagttagcgaggaaaccgctgagaaagacgccaccgctcatgatgaactgtaa

SEQ ID NO: 4552 - protein, 422 aa, Brassica napus
MAKLTLSVISVVLIGLVAIASAAVIFEERFDDGWENRWVKSEWKKEDKSAGEWSHTAGNWSGDANDKGIQTSEDYRFYAISAEFPEFSNKDKTLVFQFSVKHEQKLDCGGGYMKLLSGDVDQKKFGGDTPYSIMFGPDICGYTTKKVHAILTYNDANHLIKKDVPCETDQLTHVYTFILRPDATYTILIDNVEKQTGSLYSDWDLLPPKKIKDPNAKKPEDWDEQEYIPDPEDKKPDGYDDIPKEIPDTDAKKPEDWDEEEDGEWTAPTIPNPEYMGEWKPKQIKNPNYKGKWEAPEIDNPDFKDDPELYVFPKLKYVGIELWQVKSGSLFDNVLICDDPDYAKKLAEETWGKLKDAEKAAFDEIEKKKEEEESKDAPAETDGEDEAEEDEGEESDTESKTEAKSEVSEETAEKDATAHDEL

SEQ ID NO: 4553 - DNA, 1284 bp, Brassica napus
  CDS (1)..(1284)
atgggtttaacccaaaacaagctcaagtctttccacctcttcctcttcctcttcctcttctctcttctcactctaactcccttggctttctctgagatcttctttgaagagcatttcgaaggtggatggaaaagcagatgggtcttatctgattggaagagaaacgaaggcaaagctggcacctttaagcacaccgccggcaaatggcccggcgatcccgacaataaaggtatccagacgtataatgacgccaagcattatgccatttctgcaaagattcaagagttcagcaacaagaaccggactcttgttgtccagtactctgtcaaaatcgaacaggacatagaatgtggtggcgcttacatcaagctcctctctggctacgttaaccagaagcagtttggtggtgatactccttacagtctaatgtttggaccagacatatgtggaacgcagacgaagaagcttcatgtgattctatcataccagggacagaactatccgattaaaaaggatctgcagtgtgaaacagacaagctaaaccatttctacacgtttatcttgcggcctgatgcttcttacagcgttctggttgataacaaagagagggagtttggaagtatgtacacagactgggacatccttcctccaaggaagatcaaggttaaaaatgcaaagaagccagtggactgggatgacagagagtatattgatgaccctgatgatgtcaaacctgagggttatgattcgattcctcgagaaattagagatcaaaaagctgaagagcctgaggactgggacgaggaagagaatggtccctgggaagccccaaagatcccaaatccagcgtacaaaggtccttggaaagcaaagaaaatcaagaacccgaactacaagggaaaatggaagaacccatggatagataatccagagtttgaagatgatccagatctttatgttctgaagcctataaaatacataggcattgaagtatggcaggtgaaggctggttcgatatttgacaatatcttgatcactgatgaccctcaatatgcaagaaccatggtggatgactattttgaacagcacagggagtctgagaaggagttatttgcggaagctgagaaagaaagaaaagctagagaagatgaggaatcacggaaggcaagagaagaaggggaacgtagaaggaaggagagggaccaccggtatggagacaggaggaggcgttacaaaaggcctaatccacgtgattacatggatgattaccatgacgagctgtaa

SEQ ID NO: 4554 - protein, 427 aa, Brassica napus
MGLTQNKLKSFHLFLFLFLFSLLTLTPLAFSEIFFEEHFEGGWKSRWVLSDWKRNEGKAGTFKHTAGKWPGDPDNKGIQTYNDAKHYAISAKIQEFSNKNRTLVVQYSVKIEQDIECGGAYIKLLSGYVNQKQFGGDTPYSLMFGPDICGTQTKKLHVILSYQGQNYPIKKDLQCETDKLNHFYTFILRPDASYSVLVDNKEREFGSMYTDWDILPPRKIKVKNAKKPVDWDDREYIDDPDDVKPEGYDSIPREIRDQKAEEPEDWDEEENGPWEAPKIPNPAYKGPWKAKKIKNPNYKGKWKNPWIDNPEFEDDPDLYVLKPIKYIGIEVWQVKAGSIFDNILITDDPQYARTMVDDYFEQHRESEKELFAEAEKERKAREDEESRKAREEGERRRKERDHRYGDRRRRYKRPNPRDYMDDYHDEL

SEQ ID NO: 4555 - DNA, 1608 bp, Brassica napus
  CDS (1)..(1608)
atgatgagagaccggcagctattctccggccttatgcttatcctagctctcctctcgctccagaacctttgccactgcgacgataatacggtgttgtatgaatcgttcgatgaggcgtttgatggtcgctggatcgtttcgaagaatggtgattacgaaggtgtgtggaagcatgcgaagagtgagggacatgatgattacggacttctcgtaagcgagaaggctcgtaagtacggtatagtgaaggagcttgacgagcctctaaacctcaaggaaggaaccattgttcttcagtacgaggttcgtttccaggaagggcttgagtgtggtggtgcttacttgaagtacctccgtcctcaggaagctggatggacacctgaagggttcgatagcgaatctccttactctatcatgtttgggcctgacaagtgtggagccacaaacaaagttcatttcatcttgaaacacaagaacccaaagagcggcgagtacgttgagcaccatctcaagttccctccctctgttccttacgacaagctttcccatgtctacaccgctatcttgaagccagacaacgaggttaggattctggttgatggagaggagaagaagaaggctaatttactttctggggaggactttgagcctgcgttgatccctgccaagaccatccctgaccctgaagacaagaaaccagaagactgggatgagagagccaagatccctgatcctaacgccgtgaagcctgaagactgggacgaggaggcgcccatggagatcgaagacgaggaagctgagaaacccgaaggatggttagatgacgagcctgaggaggtggacgacccagaggcgaccaagcctgaagactgggatgatgaggaagatggtatgtgggaggctccaaagattgacaaccccaagtgtgaagcagcaccaggatgtggtgaatggaagagacccatgaagaagaatcctgcttacaagggcaaatggagtgcacctatgatagataaccctgcttacaagggaatctggaagcccagagacatccctaaccctgactactttgagctggacagacctgactacgaacccattgcggcaatcggtatagagatctggacgatgcaagacggtatcttgtttgacaacatgttgatagcgaaagacgagaaggtcgctgagagttacagacagacgacatggaagccgaagttcgatgttgagaaagagaaacaaaaggcggaagaggaggctgctagctctgctgatggtctcaagagctaccagaaggttgtgttcgacctcttgaacaaggttgcagacatttctttcctaagtgcctacaagtctaagatcacagaactgattgagaaagctgaggaacaaccaaacttaaccattggtgtcctagtctccattgtcgtagtattcttctcgctcttcatcaagcttatcttcggtggcaaaaaggcggcgccggcagcaaccgtggagaagaagaagaaaccagaagtaggagagagctcaaagagtgaagatgagacagagaagaaggaagaaaccgctgctgctcctcgcaaaaggcaaccgaggcgtgacaattag

SEQ ID NO: 4556 - protein, 535 aa, Brassica napus
MMRDRQLFSGLMLILALLSLQNLCHCDDNTVLYESFDEAFDGRWIVSKNGDYEGVWKHAKSEGHDDYGLLVSEKARKYGIVKELDEPLNLKEGTIVLQYEVRFQEGLECGGAYLKYLRPQEAGWTPEGFDSESPYSIMFGPDKCGATNKVHFILKHKNPKSGEYVEHHLKFPPSVPYDKLSHVYTAILKPDNEVRILVDGEEKKKANLLSGEDFEPALIPAKTIPDPEDKKPEDWDERAKIPDPNAVKPEDWDEEAPMEIEDEEAEKPEGWLDDEPEEVDDPEATKPEDWDDEEDGMWEAPKIDNPKCEAAPGCGEWKRPMKKNPAYKGKWSAPMIDNPAYKGIWKPRDIPNPDYFELDRPDYEPIAAIGIEIWTMQDGILFDNMLIAKDEKVAESYRQTTWKPKFDVEKEKQKAEEEAASSADGLKSYQKVVFDLLNKVADISFLSAYKSKITELIEKAEEQPNLTIGVLVSIVVVFFSLFIKLIFGGKKAAPAATVEKKKKPEVGESSKSEDETEKKEETAAAPRKRQPRRDN

SEQ ID NO: 4557 - DNA, 1605 bp, Brassica napus
  CDS (1)..(1605)
atgatgagagaccggcagctattctccgccgttttgcttatcttagctttcgtttctctccagaagctttgctactgcgacgatcaaacggtgttgtatgaatcgttcgatgaggcatttgatggtcgctggatcgtctcgaagaatggcgattacgaaggtgtgtggaagcatgagaagagtgagggacatgatgattatggacttctcgtaagcgagaaggctcgtaagtatggtatagtgaaagttctcgacgagccactaaacctcaaggacggaaccattgttcttcagtacgaggttcgtttccaggaagggcttgagtgcggtggtgcttacttgaagtacctccgtcctcaggaagctggatggacacctgagggattcgatagtgaatctccttactctatcatgtttggacccgacaagtgtggagctacgaacaaagttcatttcatcttgaaacacaagaaccccaagagcggcgagtacgttgagcaccatctcaagttcccaccctctgttccttatgacaagctttcccatgtctacaccgccatcttgaagccagacaacgaggttaggattttggttgatggagaggagaagaagaaggccaacttactctctggggaagactttgagcctgctttgatccctgacaagaccatccccgaccctgaagacaagaaaccagaagactgggatgagagagccaagatccctgaccctaacgctgtgaagcctgacgactgggacgaggaagcaccgatggagatagaagatgaagaagccgagaaacccgaaggatggttagacgatgagcctgaggaggtggacgacccagaggcaaccaaacctgaagattgggatgatgaggaagatggtatgtgggaggctccaaagattgacaaccccaagtgtgaaacagcaccaggttgtggtgaatggaagagaccgatgaagaagaaccctgcttacaagggaaagtggagtgcacctatcatagataaccctgcttacaagggaatctggaaacccagagacatccctaaccctgactactttgagctagacagacccgattacgaacccattgcagctatcggtatagagatctggacgatgcaagacggtatcttgtttgacaacattttgatagcgaaagacgagaaggtcgctgagagttacagacagacaacgtggaagcctaagttcgatgttgagaaagagaaacaaaaggaggaagagaaggctgctgaatctgcagatggtcttaagagctaccagaaggttgtgttcgatctgttgaacaaggttgcagacatttctttcctaagtgcctacaagtccaagatcacagaattgattgagaaagctgaggaacaaccaaacttaaccattggtgtcctagtctccattgttatagtattcttctcgctcttcatcaagcttatcttcggtggcaaaaaggcgtcggcggcggcgagtgtggagaagaagaaaccagaagtaggagagagctcaaagagtggagatgagtcggagaagaaggaagaaaccgctgctgctccccgcaaaaggcaaccgagacgtgataattag

SEQ ID NO: 4558 - protein, 534 aa, Brassica napus
MMRDRQLFSAVLLILAFVSLQKLCYCDDQTVLYESFDEAFDGRWIVSKNGDYEGVWKHEKSEGHDDYGLLVSEKARKYGIVKVLDEPLNLKDGTIVLQYEVRFQEGLECGGAYLKYLRPQEAGWTPEGFDSESPYSIMFGPDKCGATNKVHFILKHKNPKSGEYVEHHLKFPPSVPYDKLSHVYTAILKPDNEVRILVDGEEKKKANLLSGEDFEPALIPDKTIPDPEDKKPEDWDERAKIPDPNAVKPDDWDEEAPMEIEDEEAEKPEGWLDDEPEEVDDPEATKPEDWDDEEDGMWEAPKIDNPKCETAPGCGEWKRPMKKNPAYKGKWSAPIIDNPAYKGIWKPRDIPNPDYFELDRPDYEPIAAIGIEIWTMQDGILFDNILIAKDEKVAESYRQTTWKPKFDVEKEKQKEEEKAAESADGLKSYQKVVFDLLNKVADISFLSAYKSKITELIEKAEEQPNLTIGVLVSIVIVFFSLFIKLIFGGKKASAAASVEKKKPEVGESSKSGDESEKKEETAAAPRKRQPRRDN

SEQ ID NO: 4559 - DNA, 1269 bp, Brassica napus
  CDS (1)..(1269)
atggcgaaactaatccttggcctcgtatccttgattcttatcggactcgtcgcgatcgcttccgccgcagttatcttcgaggagcgctttgatgatggatgggagaacaggtgggttaaatctgagtggaagaaagatgaccagtctgctggggagtggaaccacacttctggaaattggtctggtgatgctaatgataaaggtatccagaccagtgaggactacagattctacgccatttcagctgagttccctgaattcagcaacaaggacaaaaccttagtcttccaattctcagtcaagcacgagcaaaagcttgactgtggtggtggctacatgaagctcctcagtggtgatgttgaccagaagaaatttggtggcgacactccatacagcatcatgtttggtcccgatatctgtggctacagcacgaagaaagtgcatgctatccttacctacaatgacgccaaccacctgatcaagaaggatgttccctgtgaaactgaccagctcacccatgtctacacattcatcctccgcccagatgctacttacagcattctcattgacaatgttgagaagcaaaccggtagcctgtactctgactgggatcttcttccacccaagaagatcaaggaccccagtgccaagaagcctgaggactgggacgagcaagagtacattccagaccctgaagacaagaaacctgacggatacgatgatatcccaaaggagatcccagataccgatgcaaagaagcctgaggactgggatgaagaagaagatggtgagtggactgccccgaccgttcccaaccctgagtacatgggtgaatggaagcccaagcaaatcaagaaccccaattacaagggcaagtgggaggctccagaaattgacaaccctgactttaagaatgactcagagctgtatgtcttccccaagctaaagtatgttggaatcgaattgtggcaggtgaaatcaggatcattgttcgacaatgttttgatctgcgatgacccagactacgccaagaagttggcagatgaaacatggggcaagctcaaggatgcggagaaagcagctttcgatgagattgagaagaagaaagaggaagaggaatccaaggacgctcctgcggaaactgatgctgaagatgaagcagaggaagatgaaggagatgagtctgacactgaagctaagaccgaagccaaatcagaagttagcgaggagacctcagacaaagacgccactgctcatgatgagctgtga

SEQ ID NO: 4560 - protein, 422 aa, Brassica napus
MAKLILGLVSLILIGLVAIASAAVIFEERFDDGWENRWVKSEWKKDDQSAGEWNHTSGNWSGDANDKGIQTSEDYRFYAISAEFPEFSNKDKTLVFQFSVKHEQKLDCGGGYMKLLSGDVDQKKFGGDTPYSIMFGPDICGYSTKKVHAILTYNDANHLIKKDVPCETDQLTHVYTFILRPDATYSILIDNVEKQTGSLYSDWDLLPPKKIKDPSAKKPEDWDEQEYIPDPEDKKPDGYDDIPKEIPDTDAKKPEDWDEEEDGEWTAPTVPNPEYMGEWKPKQIKNPNYKGKWEAPEIDNPDFKNDSELYVFPKLKYVGIELWQVKSGSLFDNVLICDDPDYAKKLADETWGKLKDAEKAAFDEIEKKKEEEESKDAPAETDAEDEAEEDEGDESDTEAKTEAKSEVSEETSDKDATAHDEL

SEQ ID NO: 4561 - DNA, 1263 bp, Glycine max
  CDS (1)..(1263)
atggcgtttcgggtgcgaagccctgacctccgctctctctttcttctctctctcttgtccatcgcttccgccaatgtcttcttcgaagagcgtttcgatgacgggtgggaaaatcgatgggttaaatcagattggaaaaaagatgagaacgtggctggggagtggaaccacacctctggtcaatggaatggagacgctaatgacaaaggtattcaaaccagtgaggattacagattctatgctatttcagctgagtaccctgaattcagcaacaagggtaagacactagtctttcaattttctgttaagcacgaacagaagcttgactgtggtggtggctacatgaagttgctcagtggggatgttgatcagaagaaatttggcggggatactccttacagtattatgtttggcccagatatctgcggttacagtaccaagaaagttcacgctattcttacctacaataacacaaaccacttgataaagaaggatgttccttgtgagactgaccaacttactcatgtttacacatttatcctccgtccggatgcaacctacagcatcctgattgataatgtggagaagcaaactgggagtctctactctgattgggatcttctccctcaaaagacaatcaaggaacctgaggctaaaaaaccaaaaaattgggatgacaaaaaatatattcctgatcctgaagataagaaaccagaggggtatgatgacatcccaaaagagctcccagaccccgaagccaagaagcctgaagattgggatgatgaggaagatggtgagtggacaccccctaccattgccaaccctgagtacaagggcccatggaaggcagagaaaatcaagaaccccaactataaaggaagatggaaggcaccattgattgataacccagatttcaaggatgaccccgacctctatgttttccccaacttgaagtacgtggggattgaattgtggcaggtgaaatctggtactttgtttgacaacgtcttaattactgatgatcctgagtatgctaagcagctggttgaagaaacatggggcaagcacaaggatgctgagaaggcagcatttgaagaggctgagaagaagagggaagaggaggaatcaaaggatgacccagttgactctgatgctgatgaggaagaggaagatgctgatgaagctggcaatgactccgatgctgaatcaaagacggaagctggagaagacaccaaggaagagggtgtacatgatgaactctag

SEQ ID NO: 4562 - protein, 420 aa, Glycine max
MAFRVRSPDLRSLFLLSLLSIASANVFFEERFDDGWENRWVKSDWKKDENVAGEWNHTSGQWNGDANDKGIQTSEDYRFYAISAEYPEFSNKGKTLVFQFSVKHEQKLDCGGGYMKLLSGDVDQKKFGGDTPYSIMFGPDICGYSTKKVHAILTYNNTNHLIKKDVPCETDQLTHVYTFILRPDATYSILIDNVEKQTGSLYSDWDLLPQKTIKEPEAKKPKNWDDKKYIPDPEDKKPEGYDDIPKELPDPEAKKPEDWDDEEDGEWTPPTIANPEYKGPWKAEKIKNPNYKGRWKAPLIDNPDFKDDPDLYVFPNLKYVGIELWQVKSGTLFDNVLITDDPEYAKQLVEETWGKHKDAEKAAFEEAEKKREEEESKDDPVDSDADEEEEDADEAGNDSDAESKTEAGEDTKEEGVHDEL

SEQ ID NO: 4563 - DNA, 1269 bp, Glycine max
  CDS (1)..(1269)
atggcggaaaatgcttcaattgagctgaacaagtttgtgttcttttgtttgttggtgctaatacaagtggcagtttctgaaatcatttttgaagagcgttttgatgatggatggcgaggtaggtgggtgaagtcagactggaaaagcagtgaaggcaaagcaggttcattcaagcacacagctggaaaatgggccggtgatccagatgataaaggtattcaaacatccagtgatgccaaacactttgccatctctgcaaaaataccagaattcacaaacaagaacagaacattggtccttcagtattctgtaaaatttgagcaagagattgaatgtggtggaggttacatcaagcttctctctggatttgttaatcaaaagaagtttggtggggatacaccatatattttaatgtttggaccagatttatgtggcacggatacaaagaagctccatgtgatactctcctaccacggtcaaaattaccccataaagaaggacctgcaatgtgaaactgacaggttaactcacttctacacattcattctcaggccagatgccacatacagtgtcctggttgacaatagagagagagattccggaagcatgtatacagattgggatattcttcctccacgaaaaatcaaagatgtcaaggccaaaaagcctaaagactgggaagaaagagaatacattgaagaccctaatgatgtcaaacctgagggatatgattcgatcccaagagaaattcctgacccaaatgctaaagagcctgaaaactgggatgaagaggaagatgggaaatggaaaccaccaaagataccaaatccagcatacaaaggaccatggaaaagaaagaaaatcaagaaccctaactacaaagggaaatggaaaactccatggatagataatccagaatttgaagacgaccctgatctttatgtgcttaagcctatcaagtatgtgggcattgaagtttggcaggttaaaggcggttcagtttttgacaatgttttgatttgtgatgaccctgattatgcaaaacaagttgttgaggaagtgtttgccaacagggagattgaaaaggaaggttttgaagaagcagagaaagtaaggaaagccaaagaggaggaggaggctcaaagagcaagagaagaaggtgaaaagcgtagacgagagagaggtcatgatcgacgataccgggacaaatatagagacaaatatagaaggcatcgccaccatgattacgatgatcatgacgagctttga

SEQ ID NO: 4564 - protein, 422 aa, Glycine max
MAENASIELNKFVFFCLLVLIQVAVSEIIFEERFDDGWRGRWVKSDWKSSEGKAGSFKHTAGKWAGDPDDKGIQTSSDAKHFAISAKIPEFTNKNRTLVLQYSVKFEQEIECGGGYIKLLSGFVNQKKFGGDTPYILMFGPDLCGTDTKKLHVILSYHGQNYPIKKDLQCETDRLTHFYTFILRPDATYSVLVDNRERDSGSMYTDWDILPPRKIKDVKAKKPKDWEEREYIEDPNDVKPEGYDSIPREIPDPNAKEPENWDEEEDGKWKPPKIPNPAYKGPWKRKKIKNPNYKGKWKTPWIDNPEFEDDPDLYVLKPIKYVGIEVWQVKGGSVFDNVLICDDPDYAKQVVEEVFANREIEKEGFEEAEKVRKAKEEEEAQRAREEGEKRRRERGHDRRYRDKYRDKYRRHRHHDYDDHDEL

SEQ ID NO: 4565 - DNA, 1269 bp, Glycine max
  CDS (1)..(1269)
atgacgatggcgtttagggtgcgaaaccctgacctccgctttctcattcttctctctctcttgtccatcacttccgccaaggtcttcttcgaggagcgtttcgatgacggatggggaaatcgttgggttaaatcagattggaaaaaagatgagaacctggctggggagtggaaccacacctctggccaatggaatggagacgctaacgacaaaggtattcaaaccagtgaggattacagattctacgctatttcagctcagtaccctgaattcagcaacaaggataagacactagtcttccaattttctgtcaagcatgaacagaagcttgactgcggtggtggctacatgaagttgctcagtggtgatgttgatcagaagaaatttggtggggatactccttacagtattatgtttggcccagatatctgtggttacagtacaaagaaagtacacgctattcttacctacaatgacacaaaccacttgataaagaaggatgttccttgtgagactgaccaacttactcatgtttacacatttatcctccgtccggatgcaacctacagcatcctgattgataatgtggagaagcaaactggtagtctctactctgattgggatcttctccctccaaagacaatcaaagatcccgaggctaaaaaaccagaagattgggatgacaaagaatttattcctgatcccgaggataagaaaccagaggggtatgatgacatcccaaaagagctcccagatcctgaagccaagaagcctgaagattgggatgatgaggaagatggtgagtggacaccccctaccattgccaaccctgattacaagggcccatggaaggcaaagaaaatcaagaaccccaactataaaggaaaatggaaggcaccattgattgataacccagatttcaaggatgaccccgacctatatgttttccccaacttgaagtacgtgggcattgaattgtggcaggtgaaatctggtactttgtttgacaatgtcttaattactgatgatcctgaatatgccaagcaactggctgaagaaacatggggcaagcacaaggatgttgagaagacagcatttgaagaggctgagaagaagagggaagaggaggaatcaaaggatgacccagttgactctgatgctgatgaggaagaggaagatgctgatgaagctggcaatgactccgatgctgaatcaaagacggaagctggggaagacaccaaggaagagggtgtacatgatgaactctag

SEQ ID NO: 4566 - protein, 422 aa, Glycine max
MTMAFRVRNPDLRFLILLSLLSITSAKVFFEERFDDGWGNRWVKSDWKKDENLAGEWNHTSGQWNGDANDKGIQTSEDYRFYAISAQYPEFSNKDKTLVFQFSVKHEQKLDCGGGYMKLLSGDVDQKKFGGDTPYSIMFGPDICGYSTKKVHAILTYNDTNHLIKKDVPCETDQLTHVYTFILRPDATYSILIDNVEKQTGSLYSDWDLLPPKTIKDPEAKKPEDWDDKEFIPDPEDKKPEGYDDIPKELPDPEAKKPEDWDDEEDGEWTPPTIANPDYKGPWKAKKIKNPNYKGKWKAPLIDNPDFKDDPDLYVFPNLKYVGIELWQVKSGTLFDNVLITDDPEYAKQLAEETWGKHKDVEKTAFEEAEKKREEEESKDDPVDSDADEEEEDADEAGNDSDAESKTEAGEDTKEEGVHDEL

SEQ ID NO: 4567 - DNA, 1260 bp, Glycine max
  CDS (1)..(1260)
atggccaatggtaacaacattagtcatttcttcaagctcttgctcttccttctaactttccactcttgtctcgctgagattttcttccaagagagattcgaagatggatggaagagccgttgggtgctatccgattggaaaaggagcgagggaaaagcgggtaccttcaagcacacagcagggaaatggtctggggatcctgatgacaaaggtcttcagacatataatgacgccaagcatttcgccatatctgcaaagataccggagcttagtaacaaggacagaaccctggtggtgcagtattctattaggtttgagcaggacattgaatgcggtggcggttacatcaagcttctttctggttatgtcaatcagaagaagtttggtggtgatactccttacagtttgatgtttggaccagacttatgtggttcacagacaaagaagctccatcttatactatcataccaggggcagaattacccgattagaaaagatctgcaatgtgaaacggataagttgactcatttctatacatttattctaaggcctgatgcctcttatagtatccttggtgataatcgggaaagagattctggaagcatgtacatggattgggacatccttcctccaaggaaaatcaaggatgtcaaagcaaaaaagccgtcagactgggatgatagagagtacattgaagaccctaatgatgtcaaaccagagggatatgattcaattccagctgaaattcctgatccaaaagccaagaagcctgttgaatgggatgatgaagatgatggactatggaagcccccgaagattcccaatccagcatacaaaggaccatggaaacgcaagaaaatcaagaaccccaactacaaaggaaagtggaagattccatggattgataacccagaattcgaggatgatcctgatctgtatgttctcaagccaataaagtatgtgggcattgaagtgtggcaggtgaaggcaggttcagtttacgacaatatcttaatttgtgatgacccacagtatgcaaagcaagttgtggatgaatatatggctagcaacagagaggctgaaaaagaagcttttgaagaagcagaaaaagaaagaagggctcaggaagacgaggaggcacgaagagcaagagaagagggtgaaagaaggaggaaggagagggatcataaatatggaaaaaggaggcatcgtcgaaggccggatccccatgatatggaggattaccatgatgaactttga

SEQ ID NO: 4568 - protein, 419 aa, Glycine max
MANGNNISHFFKLLLFLLTFHSCLAEIFFQERFEDGWKSRWVLSDWKRSEGKAGTFKHTAGKWSGDPDDKGLQTYNDAKHFAISAKIPELSNKDRTLVVQYSIRFEQDIECGGGYIKLLSGYVNQKKFGGDTPYSLMFGPDLCGSQTKKLHLILSYQGQNYPIRKDLQCETDKLTHFYTFILRPDASYSILGDNRERDSGSMYMDWDILPPRKIKDVKAKKPSDWDDREYIEDPNDVKPEGYDSIPAEIPDPKAKKPVEWDDEDDGLWKPPKIPNPAYKGPWKRKKIKNPNYKGKWKIPWIDNPEFEDDPDLYVLKPIKYVGIEVWQVKAGSVYDNILICDDPQYAKQVVDEYMASNREAEKEAFEEAEKERRAQEDEEARRAREEGERRRKERDHKYGKRRHRRRPDPHDMEDYHDEL

SEQ ID NO: 4569 - DNA, 1269 bp, Glycine max
  CDS (1)..(1269)
atgacgatggcgtttagggtgcgaaaccctgacctccgctttctcattcttctctctctcttgtccatcacttccgccaaggtcttcttcgaggagcgtttcgatgacggatggggaaatcgttgggttaaatcagattggaaaaaagatgagaacctggctggggagtggaaccacacctctggccaatggaatggagacgctaacgacaaaggtattcaaaccagtgaggattacagattctacgctatttcagctcagtaccctgaattcagcaacaaggataagacactagtcttccaattttctgtcaagcatgaacagaagcttgactgcggtggtggctacatgaagttgctcagtggtgatgttgatcagaagaaatttggcggggatactccttacagtattatgtttggcccagatatctgtggttacagtacaaagaaagtacacgctattcttacctacaatgacacaaaccacttgataaagaaggatgttccttgtgagactgaccaacttactcatgtttacacatttatcctccgtccggatgcaacctacagcatcctgattgataatgtggagaagcaaactggtagtctctactctgattgggatcttctccctccaaagacaatcaaggatcctgaggctaaaaaaccagaagattgggatgacaaagaatatattcctgatcctgaggataagaaaccagaggggtatgatgacatcccaaaagagctcccagaccccgaagccaagaagcctgaagattgggatgatgaggaagatggtgagtggacaccccctaccattgccaaccctgagtacaagggcccatggaaggcaaagaaaatcaagaaccccaactataaaggaaaatggaaggcaccattgattgataacccagatttcaaggatgaccccgacctatatgttttccccaacttgaagtacgtgggcattgaattgtggcaggtgaaatctggtactttgtttgacaatgtcttaattactgatgatcctgaatatgccaagcaactggctgaagaaacatggggcaagcacaaggatgttgagaagacagcatttgaagaggctgagaagaagagggaagaggaggaatcaaaggatgacccagttgactctgatgctgatgaggaagaggaagatgctgatgaagctggcaatgactccgatgctgaatcaaagacggaagctggggaagacaccaaggaagagggtgtacatgatgaactctag

SEQ ID NO: 4570 - protein, 422 aa, Glycine max
MTMAFRVRNPDLRFLILLSLLSITSAKVFFEERFDDGWGNRWVKSDWKKDENLAGEWNHTSGQWNGDANDKGIQTSEDYRFYAISAQYPEFSNKDKTLVFQFSVKHEQKLDCGGGYMKLLSGDVDQKKFGGDTPYSIMFGPDICGYSTKKVHAILTYNDTNHLIKKDVPCETDQLTHVYTFILRPDATYSILIDNVEKQTGSLYSDWDLLPPKTIKDPEAKKPEDWDDKEYIPDPEDKKPEGYDDIPKELPDPEAKKPEDWDDEEDGEWTPPTIANPEYKGPWKAKKIKNPNYKGKWKAPLIDNPDFKDDPDLYVFPNLKYVGIELWQVKSGTLFDNVLITDDPEYAKQLAEETWGKHKDVEKTAFEEAEKKREEEESKDDPVDSDADEEEEDADEAGNDSDAESKTEAGEDTKEEGVHDEL

SEQ ID NO: 4571 - DNA, 1269 bp, Glycine max
  CDS (1)..(1269)
atgacgatggcgtttagggtgcgaaaccctgacctccgctttctcattcttctctctctcttgtccatcacttccgccaaggtcttcttcgaggagcgtttcgatgacggatgggaaaatcgatgggttaaatcagattggaaaaaagatgagaacctggctggggagtggaaccacacctctggccaatggaatggagacgctaacgacaaaggtattcaaaccagtgaggattacagattctacgctatttcagctcagtaccctgaattcagcaacaaggataagacactagtcttccaattttctgtcaagcatgaacagaagcttgactgcggtggtggctacatgaagttgctcagtggtgatgttgatcagaagaaatttggtggggatactccttacagtattatgtttggcccagatatctgtggttacagtacaaagaaagtacacgctattcttacctacaatgacacaaaccacttgataaagaaggatgttccttgtgagactgaccaacttactcatgtttacacatttatcctccgtccggatgcaacctacagcatcctgattgataatgtggagaagcaaactggtagtctctactctgattgggatcttctccctccaaagacaatcaaagatcccgaggctaaaaaaccagaagattgggatgacaaagaatttattcctgatcccgaggataagaaaccagaggggtatgatgacatcccaaaagagctcccagaccccgaagccaagaagcctgaagattgggatgatgaggaagatggtgagtggacaccccctaccattgccaaccctgagtacaagggcccatggaaggcagagaaaatcaagaaccccaactataaaggaaaatggaaggcaccattgattgataacccagatttcaaggatgaccccgacctctatgttttccccaacttgaagtacgtggggattgaattgtggcaggtgaaatctggtactttgtttgacaatgtcttaattactgatgatcctgagtatgctaagcagctggttgaagaaacatggggcaagcacaaggatgctgagaaggcagcatttgaggaggccgagaagaagagggaagaggaggaatcaaaggatgacccagttgactctgatgctgatgaggaagaggaagatgctgatgaagctggcaatgactccgatgctgaatcaaagacggaagctggagaagacaccaaggaagagggtgtacatgatgaactctag

SEQ ID NO: 4572 - protein, 422 aa, Glycine max
MTMAFRVRNPDLRFLILLSLLSITSAKVFFEERFDDGWENRWVKSDWKKDENLAGEWNHTSGQWNGDANDKGIQTSEDYRFYAISAQYPEFSNKDKTLVFQFSVKHEQKLDCGGGYMKLLSGDVDQKKFGGDTPYSIMFGPDICGYSTKKVHAILTYNDTNHLIKKDVPCETDQLTHVYTFILRPDATYSILIDNVEKQTGSLYSDWDLLPPKTIKDPEAKKPEDWDDKEFIPDPEDKKPEGYDDIPKELPDPEAKKPEDWDDEEDGEWTPPTIANPEYKGPWKAEKIKNPNYKGKWKAPLIDNPDFKDDPDLYVFPNLKYVGIELWQVKSGTLFDNVLITDDPEYAKQLVEETWGKHKDAEKAAFEEAEKKREEEESKDDPVDSDADEEEEDADEAGNDSDAESKTEAGEDTKEEGVHDEL

SEQ ID NO: 4573 - DNA, 1260 bp, Hordeum vulgare
  CDS (1)..(1260)
atggcgatccgccgtggctcctcctgcgccgtcctcgccctgctcgcgctcgcctccgtcgccgccgtcgccgccgacgtcttcttccaggagaagttcgaagatggctgggaaagccggtgggtcaagtctgagtggaagaaggacgagaacatggctggtgaatggaaccacacatctggaaaatggcatggagatgctgaggacaaaggtatccaaacctctgaggactacaggttctacgccatctctgcggagtaccctgagttcagcaacaaggacaagacactcgtgctgcagttcacggtgaagcatgagcagaagcttgactgcggtggtggttacgtcaagttgcttggaggtgatgttgaccagaagaaattcggtggcgacacaccctacagcattatgtttggacccgatatctgtgggtacagcaccaagaaggttcacactattcttaccaagaacggcaagaaccatttgatcaagaaggatgtgccttgcgagactgatcagctgtcgcatgtgtacactttgatcatccgccctgatgctacatacagcattctcattgacaatgaagagaagcaaactggaagcatctacgagcactgggatattcttcctcccaaggaaatcaaggacccagaagctaagaagccagaggactgggatgacaaggagtacattcctgatcctgaggacgtcaagccagagggctatgatgatattcccaaggaagtcactgaccctgatgctaagaagcctgaggattgggatgatgaggaagatggtgaatggactgccccaaccatccccaacccagagtacaagggcccatggaagcaaaaaaaaatcaagaaccctaactaccagggcaaatggaaggcacctatgattgccaacccagacttccaggatgatccttacatctacgcttttgacagcctgaagtacattggaatcgagctgtggcaggttaagtcaggaacgttgtttgacaacattctcatcactgacgatgctgctttggccaagacatttgccgaagagacctgggccaagcacaaggatgctgagaaggctgcttttgacgaggctgaaaagaagaaggaagaggaggatgcttccaaggccggtgaggacgatgatgacttggatgatgaggatgccgacgatgaggacaaggacgacaaggctgggtctgatgctgaggatgacaaggattctgatgatgagaagcacgatgagctctag

SEQ ID NO: 4574 - protein, 419 aa, Hordeum vulgare
MAIRRGSSCAVLALLALASVAAVAADVFFQEKFEDGWESRWVKSEWKKDENMAGEWNHTSGKWHGDAEDKGIQTSEDYRFYAISAEYPEFSNKDKTLVLQFTVKHEQKLDCGGGYVKLLGGDVDQKKFGGDTPYSIMFGPDICGYSTKKVHTILTKNGKNHLIKKDVPCETDQLSHVYTLIIRPDATYSILIDNEEKQTGSIYEHWDILPPKEIKDPEAKKPEDWDDKEYIPDPEDVKPEGYDDIPKEVTDPDAKKPEDWDDEEDGEWTAPTIPNPEYKGPWKQKKIKNPNYQGKWKAPMIANPDFQDDPYIYAFDSLKYIGIELWQVKSGTLFDNILITDDAALAKTFAEETWAKHKDAEKAAFDEAEKKKEEEDASKAGEDDDDLDDEDADDEDKDDKAGSDAEDDKDSDDEKHDEL

SEQ ID NO: 4575 - DNA, 1608 bp, Hordeum vulgare
  CDS (1)..(1608)
atgacgggagggcgcgcggtgctcctgctgccgctgctggtgatctcggcgctgttcgcgcagatcagcgcgtcggatccgctgttccacgagtccttcgacgagagcttcgacgggagctggatcgtgtccggcaaggatgagtacaaaggtgcatggaagcactcgaagagtgatggccatgaagactatggcctccttgttagtgagccagccaggaaatatgccataatcaaagagcttgattaccctgttactttgaaggacaagacagttgtcctgcagtttgaagtgaggcttcagaatggccttgagtgtggaggtgcttatatcaagtacatccgtcctcaggctgtgggatggaacgccaaggactttgacaatgatactccatacacaattatgtttggtcctgacaagtgcggttcaacaaacaaggttcacttcatcctgaagcacaagaaccctaagactggcaaatatgttgaacatcacctcaagtccccgccctctgtcccatatgacaagctctctcatgtctacacggctatcttgaagccggataacgaggtcagaattttggttgatggggtggagaagagcaaagcaaacttcctgtctgctgatgattttgagccagcacttattccatcaaagactattcctgatcccgacgacaagaagccagaggactgggatgagagagctaaaatccctgatccagatgccgtgaagcctgatgactgggatgaggatgccccaatggaaattgtggatgaggaggccaccaagcctgaaggatggttggatgatgagcctgaggaaattgatgatccagaggctgctaagcctgaggactgggatgatgaggaggatggcgaatgggaggcaccgaagatggacaaccccaagtgcgaagaggcacctggatgtggtgaatggaagaagccaatgaaggataaccctgcctacaagggcaagtggcatgcacccctgattgacaaccccaactacaagggaatctggaagccccaagaaatccccaaccctgagtactttgagcttgacaagcctgactttgacccaattgctgctattggaattgagatctggacaatgcaggatggcatcctgtttgacaacattcttattgccgataatgagaaggtagccacctctgtcctggagaagacatggaagcccaagtttgatgttgagaaggaaaagcagaaggctgaggaggctgcagcaggtgcatcagagggcctttctgagttccagaagaagatcttcgacattttgtacaaggtcgcagacatcccgttcttggaaccatacaagaccaagatcattgaagtgattgagaagggagagacgcagccgaacattacaatttcgattctggcctccgtcgttgtcgtcattgtgactgtactcttcagaaccttgtttggtggcaagaagccagtggcacctgtgaagcccgctgctgagaccaagaagcccagtgctgttgttcctgatgccaccgctggaagcagcggcgacaaggaggagaaagaggacgacaaggatgcgccacgccgaaggtcgcgaagagacgcataa

SEQ ID NO: 4576 - protein, 535 aa, Hordeum vulgare
MTGGRAVLLLPLLVISALFAQISASDPLFHESFDESFDGSWIVSGKDEYKGAWKHSKSDGHEDYGLLVSEPARKYAIIKELDYPVTLKDKTVVLQFEVRLQNGLECGGAYIKYIRPQAVGWNAKDFDNDTPYTIMFGPDKCGSTNKVHFILKHKNPKTGKYVEHHLKSPPSVPYDKLSHVYTAILKPDNEVRILVDGVEKSKANFLSADDFEPALIPSKTIPDPDDKKPEDWDERAKIPDPDAVKPDDWDEDAPMEIVDEEATKPEGWLDDEPEEIDDPEAAKPEDWDDEEDGEWEAPKMDNPKCEEAPGCGEWKKPMKDNPAYKGKWHAPLIDNPNYKGIWKPQEIPNPEYFELDKPDFDPIAAIGIEIWTMQDGILFDNILIADNEKVATSVLEKTWKPKFDVEKEKQKAEEAAAGASEGLSEFQKKIFDILYKVADIPFLEPYKTKIIEVIEKGETQPNITISILASVVVVIVTVLFRTLFGGKKPVAPVKPAAETKKPSAVVPDATAGSSGDKEEKEDDKDAPRRRSRRDA

SEQ ID NO: 4577 - DNA, 1830 bp, Oryza sativa
  CDS (1)..(1830)
atggtcaagaacgccatccagtacgccgtggtggacgcgttcgcggccgagccgttcaagggcaaccccgccgccgtatgcctcctggaaggggaccgggctggcgtaatgcggcacgagggagagagagagagagagagagagagagagagacgcagctctgttcttcttctcctctctggaaatttctggatctcgcgagagatcgggaggacgatggtgggtgggcgcgcgctcctgccgctgcttctgctctccgcgctgctcgtccagatccgcgcctccgatccgctgttctatgagccgttcgacgagagcttcgaggggaggtgggttctctccgggaaggacgactacaaaggtgtatggaagcacgaaaagagtgatggacatgaagactatggcctgcttgttagtgagaaggccaagaaatatgccataatcaaggagcttgatgagcctgttactttgaaggatgggactgttgtcctgcagtttgaagtgaggcttcagaatggccttgagtgtggaggtgcatatcttaagtacattcgtcctcaggatgctgcatgggatgccaaggagtttgataatgagactccttacactattatgtttggtcctgacaaatgtggatcaactaacaaggtgcatttcatccttaagcacaagaaccccaagactggcaagtatgttgaacaccacctcaagttcccaccttctgtcccatatgataagctctctcatgtctacacggctatcttgaagcctgataatgaggtgagaattttggttgatggggaagagaagaagaaggcaaacttcctttctgctgatgattttgagccatcacttatcccatccaagaccattcctgatcctgatgacaaaaagccagaagactgggatgagagagctaaaatccctgatccagatgctgtgaagcctgatgactgggatgaggatgcccccatggaaattgaggacgaagaggccacaaagccagaggggtggctggatgatgagccagaggaaattgatgatccggaggctaacaagcctgaagactgggatgatgaggaggatggagaatgggaagcaccaaagattgacaaccccaagtgtgaagaggctcctggttgtggtgagtggaagaggccgatgaagcagaaccctgcttacaagggcaagtggcatgcgcctcttatcgacaaccccaactacaaaggaatctggaagccccaagagatccccaaccctgagtacttcgagcttgacaagcctgactctgatccgattgccgctattgggattgagatctggacgatgcaagatggcatcctgtttgacaacattttgatcgctgatgatgagaaggttgccacttctatcctggagaagtcttggaagcccaagtacgaagtagagaaggagaaggagaaggctgaggaggcagcagcggcagcaggtgatggtctttctgagttccagaagaagatctttgacgttctgtacaaactcgctgacattccattcttggaaccctacaagactaagatcattgatgtaattgagaagggagagaagcagcccaacatcaccattggaattctggtctccatcgttgtcgtctttgtgactgtgctcttcaggatcctgttcggcggcaagaagccagcggctcctgtgaagcccgtagccgaggtcaaaaaaccaaagtctaccgagtccgaagcagctggaagcagcggtggcaaggaggacgagaaggaagaggaagagaaggatggagctgctgccccacgccggaggtcccgaagggagacatga

SEQ ID NO: 4578 - protein, 609 aa, Oryza sativa
MVKNAIQYAVVDAFAAEPFKGNPAAVCLLEGDRAGVMRHEGERERERERERRSSVLLLLSGNFWISREIGRTMVGGRALLPLLLLSALLVQIRASDPLFYEPFDESFEGRWVLSGKDDYKGVWKHEKSDGHEDYGLLVSEKAKKYAIIKELDEPVTLKDGTVVLQFEVRLQNGLECGGAYLKYIRPQDAAWDAKEFDNETPYTIMFGPDKCGSTNKVHFILKHKNPKTGKYVEHHLKFPPSVPYDKLSHVYTAILKPDNEVRILVDGEEKKKANFLSADDFEPSLIPSKTIPDPDDKKPEDWDERAKIPDPDAVKPDDWDEDAPMEIEDEEATKPEGWLDDEPEEIDDPEANKPEDWDDEEDGEWEAPKIDNPKCEEAPGCGEWKRPMKQNPAYKGKWHAPLIDNPNYKGIWKPQEIPNPEYFELDKPDSDPIAAIGIEIWTMQDGILFDNILIADDEKVATSILEKSWKPKYEVEKEKEKAEEAAAAAGDGLSEFQKKIFDVLYKLADIPFLEPYKTKIIDVIEKGEKQPNITIGILVSIVVVFVTVLFRILFGGKKPAAPVKPVAEVKKPKSTESEAAGSSGGKEDEKEEEEKDGAAAPRRRSRRET

SEQ ID NO: 4579 - DNA, 1275 bp, Oryza sativa
  CDS (1)..(1275)
atggcgatccgcgcgaggtcctcctcctacgccgccgcggcggtcgcgctggcgctcgcgctggcgtccgtcgccgctgtcgccggcgaggtcttcttccaggagaagttcgaagatggatgggaaagtcggtgggtcaagtcagaatggaagaaggatgagaacatggctggtgaatggaaccacacatctgggaagtggaatggagatcctgaggacaaaggtatccaaacctctgaggactacaggttctacgctatttcagcggagtacccagaattcagcaacaaggataaaaccctggtgctgcagttctctgtaaagcatgagcaaaagcttgactgtggtggtggatatgtcaagttgcttggtggtgatgttgaccagaagaaatttggtggggacacaccgtacagcattatgtttggaccagacatctgtgggtacagcaccaagaaggtccatactatctttactaagaatgacaagaaccatttgatcaagaaggatgtcccctgcgagactgatcagctgtcccatgtgtacactttgatcatccatcctgatgctacatacaccatacttattgacaatgttgagaagcaatctggcagcatctacgagcactgggatattctgcctccgaagcaaatcaaggacccagaagctaagaagccagaggactgggatgacaaggagtacattcctgaccctgaggacaagaagcctgagggatacgatgatattcccaaggaaatccctgaccctgatgctaagaagcctgaggactgggatgatgaggaagatggtgagtggactgcaccaaccattcctaaccctgagtacaagggaccatggaagcaaaagaaaatcaagaaccctaactaccaaggcaaatggaaggcaccgatgatcgacaacccagacttcaaggatgatccatacatctatgcttttgacagcctgaagtacattggcattgagttgtggcaggtcaaatcaggtactctgtttgacaacttccttattactgacgaccctgagttggccaagacattcgcagaggagacatggggcaagcacaaggatgctgagaaggctgcttttgacgaggcagagaaaaagaaggaagaggaggaagctgccaaggccggtgaggacgatgatgatttggatgacgaggatgctgaggatgaggacaaggccgatgagaaggctgactctgatgcagaggatggcaaggattctgatgatgagaagcatgatgagctctaa

SEQ ID NO: 4580 - protein, 424 aa, Oryza sativa
MAIRARSSSYAAAAVALALALASVAAVAGEVFFQEKFEDGWESRWVKSEWKKDENMAGEWNHTSGKWNGDPEDKGIQTSEDYRFYAISAEYPEFSNKDKTLVLQFSVKHEQKLDCGGGYVKLLGGDVDQKKFGGDTPYSIMFGPDICGYSTKKVHTIFTKNDKNHLIKKDVPCETDQLSHVYTLIIHPDATYTILIDNVEKQSGSIYEHWDILPPKQIKDPEAKKPEDWDDKEYIPDPEDKKPEGYDDIPKEIPDPDAKKPEDWDDEEDGEWTAPTIPNPEYKGPWKQKKIKNPNYQGKWKAPMIDNPDFKDDPYIYAFDSLKYIGIELWQVKSGTLFDNFLITDDPELAKTFAEETWGKHKDAEKAAFDEAEKKKEEEEAAKAGEDDDDLDDEDAEDEDKADEKADSDAEDGKDSDDEKHDEL

SEQ ID NO: 4581 - DNA, 1338 bp, Oryza sativa
  CDS (1)..(1338)
atggcgggggcagtttacgagccacggagtagcctcgtcttctccggcgagccaccggcgatgggaagtcgcagcggcggccgccaccgactcttcctccgattcatcgccctctcgtcgctgctcctcatcgccgccggggaggtcatcttcgaggagcgcttcgaagatggttgggagtcccgctgggtgaagtctgattggaaaaggagcgaagggaaagctggaacgttcaaacacacggcaggaagatattctggagatcctgatgacaaaggtatacagacaacgttggacgccaggcattttgctatatcggccaagatccccgaattcagtaacaagggccgtacattggtactccagtattccataaagtttgagcaggatattgaatgtggtggtggatatattaaacttatgtctggttatgtcaaccagaagaaatttagtggagacactccatacagcttaatgtttgggccagatatatgcggaactcaaacgaagaagctccatcttatactttcttatcaagggcagaactaccctatcaagaaagatctgcaatgtgaaacagacaagttgacgcatgtttacacattcatactaaggcctgatgcgtcctatagcatactagttgataaccgtgaaagagaatcagggagcatgtacactgactgggacatcctccctcctcgcaagattaaggatgttcatgccaaaaagcctaaggattgggatgacagagaatatattgaggatccagatgcagttaaaccagagggctatgattctattccaaaggagattcctgatccaaaagacaaaaagcctgacacgtgggatgatgatgatgatggcatatggaagcctagaatgataccaaatccagcatacaagggaccatggaagcgcaagaaaatcaagaatcctaactacaagggtaaatggaagatcccatggattgataatccagagtttgaggatgatccagacctatatgtgctgaaacccttgaaatatattggaattgaggtttggcaggtaaaggctggttcggtttttgacaacatcctcatttgtgacgatccggaatatgcaagaaaagctgctgaggaaacatggggtgcaaacagggaggccgaaaaagaggcttttgaagaagctgagaaggagaggaaagctagagaggataaggaagctgaacgagcaagggaggaaggagagcgacggaggagagagaggggtgatcggcaccgtggcagggattacaaggacagatacaaaagacgtcatagggatcactgggatgatgactaccatgatgagctttga

SEQ ID NO: 4582 - protein, 445 aa, Oryza sativa
MAGAVYEPRSSLVFSGEPPAMGSRSGGRHRLFLRFIALSSLLLIAAGEVIFEERFEDGWESRWVKSDWKRSEGKAGTFKHTAGRYSGDPDDKGIQTTLDARHFAISAKIPEFSNKGRTLVLQYSIKFEQDIECGGGYIKLMSGYVNQKKFSGDTPYSLMFGPDICGTQTKKLHLILSYQGQNYPIKKDLQCETDKLTHVYTFILRPDASYSILVDNRERESGSMYTDWDILPPRKIKDVHAKKPKDWDDREYIEDPDAVKPEGYDSIPKEIPDPKDKKPDTWDDDDDGIWKPRMIPNPAYKGPWKRKKIKNPNYKGKWKIPWIDNPEFEDDPDLYVLKPLKYIGIEVWQVKAGSVFDNILICDDPEYARKAAEETWGANREAEKEAFEEAEKERKAREDKEAERAREEGERRRRERGDRHRGRDYKDRYKRRHRDHWDDDYHDEL

SEQ ID NO: 4583 - DNA, 1269 bp, Oryza sativa
  CDS (1)..(1269)
atgggtcgcctccgccgcggcggggtcggtctcctgcgtggtgccgtggtgctcgcgtcccttctcctcgtcgtctccggcgaagtcatcttcgaggagcgattcgatgatgattggggaagcagatgggtgaaatctgactggaaaaagagcgaagggaaagccgggacattcaaacatacagcagggagctattctggagatcctgacgatagaggtatacaaacaacctcggatgctaagcattttgctatatcggccaagttcccagaattcagtaacaagaaccggacattggtggttcagtattcgataaagattgagcaggatattgaatgtggtggtgcttatatcaagcttatgtctggctatgtgaatcagaagaaatttggcggtgacactccttatagcttcatgtttgggcctgatatatgtggtgatcagacaaagaaactccatctgatactgtcttaccaagggcaaaactaccctataaagaaagatctgaaatgtgaaactgacaagttgacacatttttacacattcattcttaggccagatgcctcttatagtctacttgttgataaccgggagagagaatttggtagtatgtacactgactgggacatcctccctcctcgcaagatcaaagaatctaatgcgaagaagccaaaagattgggatgacagggaatatattgaagatcctgatgaagttaaaccagagggctatgactctattcctaaagagattcctgatccaaaggacaaaaagcctgagtcatgggatgatgatgatgatggtgtatggaagcctagaatgataccgaatccagaatacaagggacgttggaaacgcaagaaaattaagaaccctaactacaagggaaaatggaagatcccatggattgataatccagaatttgaggacgacccagacctatatgtgctgaaacctttgcagtatgtgggaattgaggtttggcaggtgaaagctggttcagtttttgacaacattttgatttgtgacgacccggagtatgcaagaagtgttgttgatgaagttagggctgcaaataaagaggctgaaaaggaggccttcgaggaggctgaaaagcggaggaaggctagagaagacgaggaggctcggcgtgcacgagaggaaggagagaaacgaagaagagacagggatcggcaccgaggcagggaccgttacagggatagatatagaggtcatcatcgtaggtatgactaccatgacgagctatga

SEQ ID NO: 4584 - protein, 422 aa, Oryza sativa
MGRLRRGGVGLLRGAVVLASLLLVVSGEVIFEERFDDDWGSRWVKSDWKKSEGKAGTFKHTAGSYSGDPDDRGIQTTSDAKHFAISAKFPEFSNKNRTLVVQYSIKIEQDIECGGAYIKLMSGYVNQKKFGGDTPYSFMFGPDICGDQTKKLHLILSYQGQNYPIKKDLKCETDKLTHFYTFILRPDASYSLLVDNREREFGSMYTDWDILPPRKIKESNAKKPKDWDDREYIEDPDEVKPEGYDSIPKEIPDPKDKKPESWDDDDDGVWKPRMIPNPEYKGRWKRKKIKNPNYKGKWKIPWIDNPEFEDDPDLYVLKPLQYVGIEVWQVKAGSVFDNILICDDPEYARSVVDEVRAANKEAEKEAFEEAEKRRKAREDEEARRAREEGEKRRRDRDRHRGRDRYRDRYRGHHRRYDYHDEL

SEQ ID NO: 4585 - DNA, 1329 bp, Oryza sativa
  CDS (1)..(1329)
atggcgatccccagaaggtcggcggccgccgtcgctgccgtggtggcgctcgcgtccgtggccgctgtcgccggcgaggtcttcttccaggagaagttcgacgatggatgggaggatcggtgggtcaaatctgagtggaagaaggatgacaacagggccggcgaatggaaccacacctccggcaagtggtacggcgacgccgacgacaagggtatccagacgtcagaggactacagattctacgccatttcggccaagtaccctgagttcagcagcaaggacaagaccctcgtgctgcagttctcggtgaagcacgagcagaagctcgactgcggcggcggctacgtgaaattgctcggtggcgacgttgaccagaagaagtttggtggcgagacgccgtacagcatcatgtttggaccagatatctgcgggtatgccaccaagaaggttcacgctatccttacaaagaacggcaagaaccatctaatcaagaaggacgtgccatgcaagaccgatcaactgacgcacgtctacaccttgatcatccgtcctgacgccaaatacagcattctgatcgataacactgagaagcaaactggaagcatctatgatgattggaacattattcctccaaagaataagagggatcctgaagccaagaagccagaagactgggacgacaatgaatacattcctgatcctgaggacaagaagcctgagggctatgatgatatccctaaggaaattactgacccagaagcaactaagcctgaggactgggatgatgaggaagatggagaatggacagctccaaccattccaaaccctgagtacaagggaccatggaaccaaaagaaacttaagaaccctaattacaagggcaaatggaaggcaccattgatccccaacccagattacaaggatgatccttacatctacgcttttgatagtttgaaccacattggcattgagctgtggcaggttaagtcgggaactttgtttgacaacattcttatcactgatgaccctgagtatgccaagaaatttgcagaagaaacctgggccaagcataaagatgctgagaaagccgcctttgatgaagctgagaagaagaggcttgaggaggaatctgcaaactctaaaatcgacgacagcgacgacgacgctagtgatgatgaggatgaggcggacgatgacaaggctgatgtcgttgctgagcagaccaaggacaagggtgatgagaaaccgcaggacatcaaggtctctgctgatgagaagccaaagagcagcaaggatgattcttccgctgcgaagaaggacgagctttag

SEQ ID NO: 4586 - protein, 442 aa, Oryza sativa
MAIPRRSAAAVAAVVALASVAAVAGEVFFQEKFDDGWEDRWVKSEWKKDDNRAGEWNHTSGKWYGDADDKGIQTSEDYRFYAISAKYPEFSSKDKTLVLQFSVKHEQKLDCGGGYVKLLGGDVDQKKFGGETPYSIMFGPDICGYATKKVHAILTKNGKNHLIKKDVPCKTDQLTHVYTLIIRPDAKYSILIDNTEKQTGSIYDDWNIIPPKNKRDPEAKKPEDWDDNEYIPDPEDKKPEGYDDIPKEITDPEATKPEDWDDEEDGEWTAPTIPNPEYKGPWNQKKLKNPNYKGKWKAPLIPNPDYKDDPYIYAFDSLNHIGIELWQVKSGTLFDNILITDDPEYAKKFAEETWAKHKDAEKAAFDEAEKKRLEEESANSKIDDSDDDASDDEDEADDDKADVVAEQTKDKGDEKPQDIKVSADEKPKSSKDDSSAAKKDEL

SEQ ID NO: 4587 - DNA, 1266 bp, Zea mays
  CDS (1)..(1266)
atggcgatccgcaaggggtcttcgtacgccgtcgcggcacttctcgcgctcgcctctgtcgccgccgtcgcaggggaggtcttcttccaggagaagttcgaagatggctgggaaagtcggtgggtcaagtccgagtggaagaaggatgagaacatggctggtgaatggaaccacacttcgggaaaatggaatggagatgccgaggacaaaggtattcaaacctccgaggattacaggttctatgccatttcagccgaataccctgagttcagcaacaaggataagaccctggtgctgcagttctctgtgaagcacgagcagaagcttgactgcggcggtggctacgtcaaattgctgggtggtgatgtagaccagaagaaatttggtggagacacatcttacagcattatgtttggaccagatatctgtgggtacagcaccaagaaggttcacactatcctgaccaaggatggcaagaaccacttgatcaagaaggatgtgccttgtgagactgatcagttgactcatgtttacactttgatcatccgtcctgatgcaacatacagcattctcattgataatgaagagaagcaaactggcagcatctacgagcactgggatattctgccccctaagaaaatcaaggacccagaggctaagaagcctgaggactgggatgacaaggagtacattcctgaccctgaggacaagaagcctgagggctatgatgatattcccaaggaaattcctgaccctgatgctaagaagcctgaggactgggatgatgaggaagatggtgaatggactgcccctaccattccaaacccagaatacaagggaccatggaagcaaaagaaaatcaagaacccgaactaccagggtaaatggaaggcacctatgattgacaatccagatttcaaggatgatccatacatctatgcatttgacagcctgaagtacattggcattgagctgtggcaggttaaatcaggcactttgtttgacaacttcatcatcactgatgaccctgcgttggccaagactttcgcagaggagacctggggcaagcacaaggaggcagagaaggctgctttcgatgcggctgagaaaaagaaggaagaagaggaagccgccaagggtggtgatgatgaggatgacgacctagaggatgaggaagacgatgagaaggcagacgaggacaaggctgactctgatgccgaggatagcaaggacgactctgatgatgagaagcacgacgagctctag

SEQ ID NO: 4588 - protein, 421 aa, Zea mays
MAIRKGSSYAVAALLALASVAAVAGEVFFQEKFEDGWESRWVKSEWKKDENMAGEWNHTSGKWNGDAEDKGIQTSEDYRFYAISAEYPEFSNKDKTLVLQFSVKHEQKLDCGGGYVKLLGGDVDQKKFGGDTSYSIMFGPDICGYSTKKVHTILTKDGKNHLIKKDVPCETDQLTHVYTLIIRPDATYSILIDNEEKQTGSIYEHWDILPPKKIKDPEAKKPEDWDDKEYIPDPEDKKPEGYDDIPKEIPDPDAKKPEDWDDEEDGEWTAPTIPNPEYKGPWKQKKIKNPNYQGKWKAPMIDNPDFKDDPYIYAFDSLKYIGIELWQVKSGTLFDNFIITDDPALAKTFAEETWGKHKEAEKAAFDAAEKKKEEEEAAKGGDDEDDDLEDEEDDEKADEDKADSDAEDSKDDSDDEKHDEL

SEQ ID NO: 4589 - DNA, 1263 bp, Zea mays
  CDS (1)..(1263)
atgggccgcctccgcgacgggcgagccttcctccaccgcgcgcttgtcctctcgtcgctgctccttctcgcctccggcgaaatcttcttcgaggaacggttcgatgatgggtgggatagccgctgggtgaaatctgattggaagaagagccaaggacaagctggaaccttccgacacacagcgggaacctactctggagaccctgacgataaaggtatacaaacaactggggatgccaaacattttgctatatcagcaaaattcccacaatttagtaacaaggaccggacattggtgatccagtactctctaaagattgagcaagatattgaatgcggtggtgcttacatcaaacttatgtctggttatctcaaccagaagaaatttggtggcgacactccttacagcttcatgtttgggcctgatatatgtggggatcagaaaaagaagctccatctcatactttcataccaagggcaaaactaccctatcaagaaagaactaaaatgtgaaacagacaagttgacacatttttacacatttattcttagacctgatgccacttatagcatccttatcgataaccgggagagagaattcgggagcatgtacactgactgggatatccttcctcctcgtaagatcaaagatgttaatgcaaaaaagccaaaagactgggatgacagggaatatattgaagatcctgatcaagttaagccagagggatatgattcaattcctaaagagatacctgatcccaaggacaaaaagcctgagtcatgggatgacgatgacgatggtacatggaagcctagaatgatacctaatccagaatacaagggaccatggaagcggaagaaaattaagaatcctaactacaaaggaaaatggaagaccccatggattgtcaatccagagtttgaggatgacccagacctatatgttctgaaacctttgcagtatgtggggattgaagtatggcaggtcaaagctggttcagtttttgacaacattttgatttgcgatgacccagactatgcaagacatgttgtagatgaaacttttgctgcaaataaggaggctgaaaaggaggcctttgaaggagctgaaagaaagaggaaggctagagaagaagaggaagcacggagggcacgggaggaaggggagagacgaaggcgggagagggatagggaccgcggcagggaccgatacaaggatagatataagcgtcataggcactacgactaccatgacgagctatag

SEQ ID NO: 4590 - protein, 420 aa, Zea mays
MGRLRDGRAFLHRALVLSSLLLLASGEIFFEERFDDGWDSRWVKSDWKKSQGQAGTFRHTAGTYSGDPDDKGIQTTGDAKHFAISAKFPQFSNKDRTLVIQYSLKIEQDIECGGAYIKLMSGYLNQKKFGGDTPYSFMFGPDICGDQKKKLHLILSYQGQNYPIKKELKCETDKLTHFYTFILRPDATYSILIDNREREFGSMYTDWDILPPRKIKDVNAKKPKDWDDREYIEDPDQVKPEGYDSIPKEIPDPKDKKPESWDDDDDGTWKPRMIPNPEYKGPWKRKKIKNPNYKGKWKTPWIVNPEFEDDPDLYVLKPLQYVGIEVWQVKAGSVFDNILICDDPDYARHVVDETFAANKEAEKEAFEGAERKRKAREEEEARRAREEGERRRRERDRDRGRDRYKDRYKRHRHYDYHDEL

SEQ ID NO: 4591 - DNA, 1293 bp, Triticum aestivum
  CDS (1)..(1293)
atggcggtcctcgcgaggtcggccgccgccgtggctgcgctcgcgctcgcgctgctcgtgtcggccgtcgccggcgaggtcttcttccaggagaagttcgacgatggatgggaggatcggtgggtcaagtcggagtggaagaaggaggacaacacggccggcgagtggaaccacacctccggcaaatggaacggagacgctgacgacaaaggcatccagacgtcggaggactacaggttctacgccatctcggcgcagtacccggagttgaggaacaaggacaagaccctggtgctgcagttctccgtcaagcacgagcaggacctcgactgcggcggcggctacatcaagctcctccccgccgacgtcgaccagaagaagttcggcggtgagaccccatacagcatcatgttcgggccggacatctgcgggtacgccaccaagaaggtgcacgcgatcctcaccaagaacggcaagaaccatctgatcaagaaggaggtgccctgcgagacggaccaactcacgcacgtctacaccttgatcctccggcccgacgccacgtacagcatcctcatcgacaacgtcgagaagcagtccggcagcgtctacgatgactgggacatccttcctgccaagaagaagagggatcctaatgccaagaagccagaggactgggaggacgaggagttccttcctgaccccgaggacaagaagccagaggggtatgatgacattcccaaggaaatcactgaacctgatgcaacgaagcctgaggactgggatgatgaggaagatggtgaatggacagctccaaccatcccaaaccctgagtacaagggaccatggatccaaaagaaaatcaagaaccctaacttcaagggcaaatggaaggcacctttgatcgacaacccagagttcaaggatgatccttacatctacgcttttgacagcctgaagcacattggcattgagctgtggcaggttaaatcaggaactctgttcgacaacatcctgatcactgatgaccctgagtacgccaagaagttcgcggaggagacctggggcaagcacaaggatgctgagaaggccgcctttgatgaggccgagaagaagaggcttgaggaggaatccgcaaacactaagaccgaagacaatgacgatgcagctgatgaggatgagggcaaagctgccggtgccagcgatgaggagaacaaggatgcctccggcgatgagaaggtggaggaaattagcaaggatgcttcttcttcttccgacaagaaggacgagctttag

SEQ ID NO: 4592 - protein, 430 aa, Triticum aestivum
MAVLARSAAAVAALALALLVSAVAGEVFFQEKFDDGWEDRWVKSEWKKEDNTAGEWNHTSGKWNGDADDKGIQTSEDYRFYAISAQYPELRNKDKTLVLQFSVKHEQDLDCGGGYIKLLPADVDQKKFGGETPYSIMFGPDICGYATKKVHAILTKNGKNHLIKKEVPCETDQLTHVYTLILRPDATYSILIDNVEKQSGSVYDDWDILPAKKKRDPNAKKPEDWEDEEFLPDPEDKKPEGYDDIPKEITEPDATKPEDWDDEEDGEWTAPTIPNPEYKGPWIQKKIKNPNFKGKWKAPLIDNPEFKDDPYIYAFDSLKHIGIELWQVKSGTLFDNILITDDPEYAKKFAEETWGKHKDAEKAAFDEAEKKRLEEESANTKTEDNDDAADEDEGKAAGASDEENKDASGDEKVEEISKDASSSSDKKDEL

SEQ ID NO: 4593 - DNA, 1293 bp, Triticum aestivum
  CDS (1)..(1293)
atgggtagcagccgccggcggggcgaccgccacctcaagttccagctcctgcaccgcctcctcgccctctcgtcgctgctcctcctcgcctccggggaggtcatcttcgaggagcgattcgaagatggttgggagactcggtgggtcaaatccgattggaagaagagcgaagggaaagccggtatgttcaagcacacggcaggaaaatattctggagatcctgatgacaaaggcatacaaacaacaatagatgctaggcattttgctatctcagccaagatcccagagttcagtaacaagggccggacattggtagtccagtactccataaagtttgagcaggaaattgaatgtggtggcggctatattaagctaatgtctggctatgtcaaccagaagaaatatagcggagacactccatacagcttgatgtttgggccagatatatgtgggactcaaacaaagaagctgcatcttatactctcttaccaggggcagaactaccctatcaagaaagatctacaatgcgaaaccgacaggctgacgcatgtttacacattcattcttaggcccgacgcatcttatagtttacttgttgataaccgtgaaagagaatctgggagcatgtacactgattgggacatcttgcctcctcgtaaaattaaggatgttggtgccaaaaagcctaaggattgggatgacagagagtacattgaggatccagatgcggttaaacctgagggatatgattctattccaagagagattcctgacccaaaggataaaaagcccgacacatgggacgatgatgatgatggcatatggaaacctagaaggataccgaatccagcatacaaaggacaatggaagcgcaagaaaattaagaaccctaactacaagggtaaatggaagatcccatggattgataacccagagtttgaggatgatccagatttatatgtactgaaacctttgaagtacattggaattgaagtttggcaggtaaaagccggttcggtttttgacaacattctcatttgcgatgacccggagtatgcaaaacaggttgccgatgaaacatggggtgcaaataaggaggctgaaaaggaggcttttgaagaagctgaaaaggagaggaaagctagagaagacaaggaagctcaacaagcaagggaggaaggagagcgacggaggagagagaggggtgatcgacaccgtggcagggaccattacaaggacagatacaaaagacgcaacagagatcactgggatgactaccatgatgagctttga

SEQ ID NO: 4594 - protein, 430 aa, Triticum aestivum
MGSSRRRGDRHLKFQLLHRLLALSSLLLLASGEVIFEERFEDGWETRWVKSDWKKSEGKAGMFKHTAGKYSGDPDDKGIQTTIDARHFAISAKIPEFSNKGRTLVVQYSIKFEQEIECGGGYIKLMSGYVNQKKYSGDTPYSLMFGPDICGTQTKKLHLILSYQGQNYPIKKDLQCETDRLTHVYTFILRPDASYSLLVDNRERESGSMYTDWDILPPRKIKDVGAKKPKDWDDREYIEDPDAVKPEGYDSIPREIPDPKDKKPDTWDDDDDGIWKPRRIPNPAYKGQWKRKKIKNPNYKGKWKIPWIDNPEFEDDPDLYVLKPLKYIGIEVWQVKAGSVFDNILICDDPEYAKQVADETWGANKEAEKEAFEEAEKERKAREDKEAQQAREEGERRRRERGDRHRGRDHYKDRYKRRNRDHWDDYHDEL

SEQ ID NO: 4595 - DNA, 1248 bp, Triticum aestivum
  CDS (1)..(1248)
atggcgatccgccgtgggtcctcctgcgccgtcctcgccctgctcgcgctcgcctccgtcgccgccgtcagcgccgacgtcttcttccaggagaagttcgaagatggttgggaaagccggtgggtcaagtctgagtggaagaaggatgagaacatggctggtgaatggaaccacacatctggaaaatggcacggagatgccgaggacaaaggtatccaaacctcagaggactacaggttctacgccatctcggcggagtaccctgagttcagcaacaaggacaagacactcgtgctgcagttcacggtgaagcatgagcagaagcttgactgcggtggtggttacgtcaagttgcttggaggtgatgttgaccagaagaaattcggtggtgacacaccctacagcattatgtttggaccagatatctgtgggtacagcaccaagaaggttcacactatccttaccaaggatggcaagaaccatttgatcaagaaggacgtgccttgcgagactgatcagctgtcgcatgtgtacactttgatcatccgccctgatgccacatacagcattctcattgacaacgaagagaagcaaactggaagcatctacgagcactgggatattcttcctcccaaggaaatcaaggacccagaagctaagaagccagaggactgggatgacaaggagtacattcctgatcctgaggacgtcaagccagagggctacgatgacattcccaaggaagtcaccgatcctgatgctaagaagcctgaagattgggatgatgaggaagatggtgaatggactgccccaaccatccccaacccagagtacaagggcccatggaagcaaaagaaaatcaagaaccctaactaccagggcaaatggaaggcacctatgattgccaacccagacttcaaggatgatccttacatctatgctttcgacagcctgaagtacatcggaattgagctgtggcaggttaagtcaggaactttgtttgacaacattctcatcactgacgatgctgccttggccaagacatttgctgaagagacctgggccaagcataaggaggctgagaaggctgcttttgacgcggctgaaaagaagaaggaagaggaggatgcttccaaggctggtgaggacgatgatgacttggatgatgaggatgccgatgatgaggacaaggatgacaaggctgggtctgatgtcgagtctgatgacgagaagcacgatgagctctag

SEQ ID NO: 4596 - protein, 415 aa, Triticum aestivum
MAIRRGSSCAVLALLALASVAAVSADVFFQEKFEDGWESRWVKSEWKKDENMAGEWNHTSGKWHGDAEDKGIQTSEDYRFYAISAEYPEFSNKDKTLVLQFTVKHEQKLDCGGGYVKLLGGDVDQKKFGGDTPYSIMFGPDICGYSTKKVHTILTKDGKNHLIKKDVPCETDQLSHVYTLIIRPDATYSILIDNEEKQTGSIYEHWDILPPKEIKDPEAKKPEDWDDKEYIPDPEDVKPEGYDDIPKEVTDPDAKKPEDWDDEEDGEWTAPTIPNPEYKGPWKQKKIKNPNYQGKWKAPMIANPDFKDDPYIYAFDSLKYIGIELWQVKSGTLFDNILITDDAALAKTFAEETWAKHKEAEKAAFDAAEKKKEEEDASKAGEDDDDLDDEDADDEDKDDKAGSDVESDDEKHDEL

SEQ ID NO: 4597 - DNA, 1590 bp, Triticum aestivum
  CDS (1)..(1590)
atgatgggagggcgcgcggtgctcctgctggtgatctcggcgctgttcgcgcagatcggcgcgtcggatccgctgttccacgagtccttcaacgagagcttcgacgggagctggatcgtgtccggcaaggaggagtataaaggtgtatggaagcacgcaaagagtgatggccatgaagactatggtctccttgttagtgagcctgccaggaaatatgccataatcaaagaacttgatcacccggttattttgaaggatgagacagttgtcctgcagtttgaagtgaggcttcagaatggccttgagtgtggaggtgcttatatcaagtacatccgtcctcaggctaccggatggaacgccaaggactttgacaatgatactccgtacacaattatgtttggtcctgacaagtgtggttcaacgaacaaggttcacttcatcctgaagcacaagaaccctaagactggcaaatacgttgaacatcacctcaagtccccaccctctgtcccatatgacaagctctctcatgtctacacggctatcttgaagccggataatgaggtcagaattttggttgatggggtggagaagagcaaagcaaacttcctgtctgctgatgattttgagccggcacttattccatcaaagactattcctgaccctgacgacaagaagccagaggactgggacgagagagctaagatccctgatccagttgcggtgaagcccgatgactgggatgaggatgccccaatggaaattgtggatgaggaggccaccaagccagaaggatggttggatgatgagcctgaggaaattgatgatccagaggctgctaagcctgaggactgggatgatgaggaggatggcgaatgggaggcacccaagatggacaaccccaagtgcgaagtggcacctggatgtggtgaatggaagaagccgatgaaggataaccctgcctacaagggcaagtggcatgcccccctgattgacaaccccaactacaagggaatctggaagccccaagaaatccccaaccctgagtactttgagcttgacaagcctgactttgacccaattgccgctattggaattgagatctggacaatgcaggatggcatcctgtttgacaacattcttattgccgacaatgagaaggtagccacctctgtccgggagaagacatggaagcccaagtttgatgccgagaaggaaaaacagaaggctgaggaggctgcagcaggtgcatcagagggcctttctgaaatccagaagaagatcttcgacattttgtacaaagttgcagacatcccgttcttggaaccatacaagaccaagatcattgatgtgattgagaagggagagacacagccaaacattacaatttcgattttggcctcggttatcgtcgtcattgtgactgtactcttcagagccctgtttggtggcaagaagccagtggcacctgtgaagcctgctgctgagaccaagaagcccagtgccgtcgtacctgatgccgccgctggaagcagcggcgacaaggaggatgacaaggatgcaccgcgccgaaggtcgcgaagagacgcataa

SEQ ID NO: 4598 - protein, 529 aa, Triticum aestivum
MMGGRAVLLLVISALFAQIGASDPLFHESFNESFDGSWIVSGKEEYKGVWKHAKSDGHEDYGLLVSEPARKYAIIKELDHPVILKDETVVLQFEVRLQNGLECGGAYIKYIRPQATGWNAKDFDNDTPYTIMFGPDKCGSTNKVHFILKHKNPKTGKYVEHHLKSPPSVPYDKLSHVYTAILKPDNEVRILVDGVEKSKANFLSADDFEPALIPSKTIPDPDDKKPEDWDERAKIPDPVAVKPDDWDEDAPMEIVDEEATKPEGWLDDEPEEIDDPEAAKPEDWDDEEDGEWEAPKMDNPKCEVAPGCGEWKKPMKDNPAYKGKWHAPLIDNPNYKGIWKPQEIPNPEYFELDKPDFDPIAAIGIEIWTMQDGILFDNILIADNEKVATSVREKTWKPKFDAEKEKQKAEEAAAGASEGLSEIQKKIFDILYKVADIPFLEPYKTKIIDVIEKGETQPNITISILASVIVVIVTVLFRALFGGKKPVAPVKPAAETKKPSAVVPDAAAGSSGDKEDDKDAPRRRSRRDA

SEQ ID NO: 4599 - DNA, 1620 bp, Triticum aestivum
  CDS (1)..(1620)
atgatgggagggcgcgcggtgctcctgctgctggtgatctcggcgctgttcgcgcagatccacgcgtcggatccgctgttctacgagtccttcaacgagagcttcgacgggagctggatcgtgtccggcaaggaggagtacaaaggtgtatggaagcacgcgaagagtgatggccatgaagattatggtctccttgttagcgagccagccaggaaatatgccataatcaaagaacttgattacctggttactttgaagggtgagacagttgtcctgcagtttgaagtgaggcttcagaatggccttgagtgtggaggtgcttatatcaagtacatccgtcctcaggctactggatggaacgccaaggactttgacaatgatactccgtacacaattatgtttggtcctgacaagtgtggttcaacgaacaaggttcacttcatcctgaagcacaagaaccctaagactggcaaatatgttgaacatcacattaagtccccaccctctgtcccatatgacaaactctctcatgtctacacggctatcttgaagccggataatgaagtcagaattttggttgatggggtggagaagagcaaagcaaacttcctgtctgctgatgattttgagccggcacttgttccatcaaagactattcctgaccctgacgacaagaagccagaggactgggacgagagagctaagatccctgatccagttgcggtgaagcccgatgactgggatgaggatgccccaatggaaattgtggatgaggaggccaccaagccagaaggatggttggatgatgaccctgaggaaattgatgatccagaggctgctaagcctgaggactgggatgatgaggaggatggtgaatgggaggcaccgaagatggacaaccccaagtgcgaagtggcacctggatgtggtgaatggaagaagccgatgaaggataaccctgcctacaagggaaagtggcatgcccccctgattgacaaccccaactacaagggaatctggaagccccaagaaatccccaacccggagtactttgagcttgacaagcctgactttgacccaattgccgctattggaattgagatctggacaatgcaggatggcatcctatttgacaacattcttattgccgataatgagaaggtagccacctctgtccgggagaagacatggaagcccaagtttgatgccgagaaggaaaagcagaaggctgaggaggctgcagcaggtgcatcagagggcctttctgaaatccagaagaagatctttgacattttgtacaaagttgcagacatcccgttcttggaaccatacaagaccaagatcattgatgtgattgagaagggagagacacagccaaacattacaatttcgattttggcgtctgtcatcgtcgtcattgtgactgtactcttcagagccctgtttggtggcaagaagccagtggcacctgtgaagcccgctgctgagaccaagaagcccagtgccgtcgtacctgatgccgccgctggaagcagcggcgacaaggaggatgacaaggatgcgccgcgccgaagtcgcgaagagacgcataaactaactcttggtgccttcacattttga

SEQ ID NO: 4600 - protein, 539 aa, Triticum aestivum
MMGGRAVLLLLVISALFAQIHASDPLFYESFNESFDGSWIVSGKEEYKGVWKHAKSDGHEDYGLLVSEPARKYAIIKELDYLVTLKGETVVLQFEVRLQNGLECGGAYIKYIRPQATGWNAKDFDNDTPYTIMFGPDKCGSTNKVHFILKHKNPKTGKYVEHHIKSPPSVPYDKLSHVYTAILKPDNEVRILVDGVEKSKANFLSADDFEPALVPSKTIPDPDDKKPEDWDERAKIPDPVAVKPDDWDEDAPMEIVDEEATKPEGWLDDDPEEIDDPEAAKPEDWDDEEDGEWEAPKMDNPKCEVAPGCGEWKKPMKDNPAYKGKWHAPLIDNPNYKGIWKPQEIPNPEYFELDKPDFDPIAAIGIEIWTMQDGILFDNILIADNEKVATSVREKTWKPKFDAEKEKQKAEEAAAGASEGLSEIQKKIFDILYKVADIPFLEPYKTKIIDVIEKGETQPNITISILASVIVVIVTVLFRALFGGKKPVAPVKPAAETKKPSAVVPDAAAGSSGDKEDDKDAPRRSREETHKLTLGAFTF

SEQ ID NO: 4601 - DNA, 1266 bp, Zea mays
  CDS (1)..(1266)
atggcgatccgcaaggggtcttcgtacgccgtcgcggcacttctcgcgctcgcctctgtcgccgccgtcgcaggggaggtcttcttccaggagaagttcgaagatggctgggaaagtcggtgggtcaagtccgagtggaagaaggatgagaacatggctggtgaatggaaccacacttcgggaaaatggaatggagatgccgaggacaaaggtattcaaacctccgaggattacaggttctatgccatttcagccgaataccctgagttcagcaacaaggataagaccctggtgctgcagttctctgtgaagcacgagcagaagcttgactgcggtggtggctacgtcaagttgctgggtggtgatgtagaccagaagaaatttggtggagacacatcttacagcattatgtttggaccagatatctgtgggtacagcaccaagaaggttcacactatcctgaccaaggatggcaagaaccacttgatcaagaaggatgtgccttgtgagactgatcagttgactcatgtttacactttgatcatccgtcctgatgcaacatacagcattctcattgataatgaagagaagcaaactggcagcatctacgagcactgggatattcttccccctaagaaaatcaaggacccagaggctaagaagcctgaggactgggatgacaaggagtacattcctgaccctgaggacaagaagccagagggctatgatgatattcccaaggaaattcctgaccctgatgctaagaagcctgaggactgggacgatgaggaagatggtgaatggactgcccctaccattcccaacccagaatacaagggaccatggaaacaaaagaaaatcaagaacccgaactaccagggtaaatggaaggcacctatgattgacaacccagattttaaggatgatccatacatttacgccttcgacagcttgaagtacattggcattgagctgtggcaggttaaatcgggcactctgtttgacaacatcatcatcactgatgaccctgcgttggccaagacttttgcagaggagacctggggcaagcacaaggaggcagaaaaggctgcttttgatgaggccgagaaaaagaaggaagaagaggatgccgccaagggtggggatgatgaggatgatgacctagaggatgaggaagacgatgagaaggcagacgaggacaaggccgactctgatgccgaggatagcaaggattctgatgatgagaagcagcacgacgagctctag

SEQ ID NO: 4602 - protein, 421 aa, Zea mays
MAIRKGSSYAVAALLALASVAAVAGEVFFQEKFEDGWESRWVKSEWKKDENMAGEWNHTSGKWNGDAEDKGIQTSEDYRFYAISAEYPEFSNKDKTLVLQFSVKHEQKLDCGGGYVKLLGGDVDQKKFGGDTSYSIMFGPDICGYSTKKVHTILTKDGKNHLIKKDVPCETDQLTHVYTLIIRPDATYSILIDNEEKQTGSIYEHWDILPPKKIKDPEAKKPEDWDDKEYIPDPEDKKPEGYDDIPKEIPDPDAKKPEDWDDEEDGEWTAPTIPNPEYKGPWKQKKIKNPNYQGKWKAPMIDNPDFKDDPYIYAFDSLKYIGIELWQVKSGTLFDNIIITDDPALAKTFAEETWGKHKEAEKAAFDEAEKKKEEEDAAKGGDDEDDDLEDEEDDEKADEDKADSDAEDSKDSDDEKQHDEL

SEQ ID NO: 4603 - DNA, 1248 bp, Zea mays
  CDS (1)..(1248)
atgggcactggccgccgcggcggcggcggcggcggcgtgttccaccgcctcctcgccctctcgtcgctgctgctcctcgcttccggcgaggtcgtcttcgaggagcgcttcgaagatggttgggagactcggtgggtggaatccgactggaaaaggagtgaagggaaagcaggaaggttcaagcacacagcggggagatactctgcagatcctgatgacaaaggaatacaaacaacaatagatgccagacattttgctatctcagccaagttcccggaattcagtaacaagaaccggacgcttgtggtccagtactccattaagtttgagcaggatattgaatgtggcggtggctatattaagcttatgtccggttatgtcaaccagaaaaaatttagtggggacactccgtacagcttgatgtttggaccagatatatgtggtactcaaacaaagaagctccatcttatactctcttaccaggggcagaactatcccatcaaaaaagatctagaatgtgagacggacaagttaacacacgtgtatactttcattcttaggcctgatgcatcttatagcctgcttgttgataaccgtgaaagagaatctgggagcatgtacactgattgggatattctccctcctcgtaaaattaaggatgttcacgccaaaaggcctaaggattgggatgacagagaatatattgaagatcctgatgaagttaagccagagggctatgattctatcccaaaacagattcctgatccgaaggacaaaaagcctgacacatgggatgaagatgaggatggaatatggaagcccagaatggtatcaaatccagcatacaagggaccttggaaacgcaagagaattaaaaatcctaactacaagggtaaatggaagaccccatggatcgataatccagagtttgaggatgatccagatctttatgtgctgaagcctttgaagtatattggaattgaagtttggcaggtaaaagctggttcagttttcgacaacattctgatttgtgatgaccctgagtatgcaagaaaggttgttgaggaaacttggggtgcaaatagggaggctgaaaaggaagcttttgaagaagctgaaaaggagaggaaagctagggaggatagggaaggtcaaaaggcaaaggacgatggtggccggcatcgaatacacaggcgtcataaaaaacactacagagatcactgggacgactaccatgatgagctataa

SEQ ID NO: 4604 - protein, 415 aa, Zea mays
MGTGRRGGGGGGVFHRLLALSSLLLLASGEVVFEERFEDGWETRWVESDWKRSEGKAGRFKHTAGRYSADPDDKGIQTTIDARHFAISAKFPEFSNKNRTLVVQYSIKFEQDIECGGGYIKLMSGYVNQKKFSGDTPYSLMFGPDICGTQTKKLHLILSYQGQNYPIKKDLECETDKLTHVYTFILRPDASYSLLVDNRERESGSMYTDWDILPPRKIKDVHAKRPKDWDDREYIEDPDEVKPEGYDSIPKQIPDPKDKKPDTWDEDEDGIWKPRMVSNPAYKGPWKRKRIKNPNYKGKWKTPWIDNPEFEDDPDLYVLKPLKYIGIEVWQVKAGSVFDNILICDDPEYARKVVEETWGANREAEKEAFEEAEKERKAREDREGQKAKDDGGRHRIHRRHKKHYRDHWDDYHDEL

SEQ ID NO: 4605 - DNA, 1263 bp, Zea mays
  CDS (1)..(1263)
atgggccgcctccgtgacgggcgagccttcctccaccgcgcgcttgtcctctcgtcgctgctccttctcgcctccggcgaaatcttcttcgaggaacggttcgatgatgggtgggatagccgctgggtgaaatctgattggaagaagagccaaggacaagctggaaccttccgacacacagcgggaacctactctggagaccctgacgataaaggtatacaaacaactggggatgccaaacattttgctatatcagcaaaattcccacaatttagtaacaaggaccggacattggtgatccagtactctctaaagattgagcaagatattgaatgcggtggtgcttacatcaaacttatgtctggttatctcaaccagaagaaatttggtggcgacactccttacagcttcatgtttgggcctgatatatgtggggatcagaaaaagaagctccatctcatactttcataccaagggcaaaactaccctatcaagaaagaactaaaatgtgaaacagacaagttgacacatttttacacatttattcttagacctgatgccacttatagcatccttatcgataaccgggagagagaattcgggagcatgtacactgactgggatatccttcctcctcgtaagatcaaagatgttaatgcaaaaaagccaaaagactgggatgacagggaatatattgaagatcctgatcaagttaagccagagggatatgattcaattcctaaagagatacctgatcccatggacaaaaagcctgagtcatgggatgacgatgacgatggtacatggaagcctagaatgatacctaatccagaatacaagggaccatggaagcggaagaaaattaagaatcctaactacaaaggaaaatggaagaccccatggattgtcaatccagagtttgaggatgacccagacctatatgttctgaaacctttgcagtatgtggggattgaagtatggcaggtcaaagctggttcagtttttgacaacattttgatttgcgatgacccagactatgcaagacatgttgtagatgaaacttttgctgcaaataaggaggctgaaaaggaggcctttgaaggagctgaaagaaagaggaaggctagagaagaagaggaagcacggagggcacgggaggaaggggagagacgaaggcgggagagggatagggaccgcggcagggaccgatacaaggatagatataagcgtcataggcactacgactaccatgacgagctatag

SEQ ID NO: 4606 - protein, 420 aa, Zea mays
MGRLRDGRAFLHRALVLSSLLLLASGEIFFEERFDDGWDSRWVKSDWKKSQGQAGTFRHTAGTYSGDPDDKGIQTTGDAKHFAISAKFPQFSNKDRTLVIQYSLKIEQDIECGGAYIKLMSGYLNQKKFGGDTPYSFMFGPDICGDQKKKLHLILSYQGQNYPIKKELKCETDKLTHFYTFILRPDATYSILIDNREREFGSMYTDWDILPPRKIKDVNAKKPKDWDDREYIEDPDQVKPEGYDSIPKEIPDPMDKKPESWDDDDDGTWKPRMIPNPEYKGPWKRKKIKNPNYKGKWKTPWIVNPEFEDDPDLYVLKPLQYVGIEVWQVKAGSVFDNILICDDPDYARHVVDETFAANKEAEKEAFEGAERKRKAREEEEARRAREEGERRRRERDRDRGRDRYKDRYKRHRHYDYHDEL

SEQ ID NO: 4607 - DNA, 1233 bp, Zea mays
  CDS (1)..(1233)
atgggcactggccgccgcggcggcggcggcggcggcgtgttccaccgcctcctcgccctctcgtcgctgctgctcctcgcttccggcgaggtcgtcttcgaggagcgcttcgaagatggttgggagactcggtgggtggaatccgactggaaaaggagtgaagggaaagcaggaaggttcaagcacacagcggggagatactctgcagatcctgatgacaaaggaatacaaacaacaatagatgccagacattttgctatctcagccaagttcccggaattcagtaacaagaaccggacgcttgtggtccagtactccattaagtttgagcaggatattgaatgtggcggtggctatattaagcttatgtccggttatgtcaaccagaaaaaatttagtggggacactccgtacagcttgatgtttggaccagatatatgtggtactcaaacaaagaagctccatcttatactctcttaccaggggcagaactatcccatcaaaaaagatctagaatgtgagacggacaagttaacacacgtgtatactttcattcttaggcctgatgcatcttatagcctgcttgttgataaccgtgaaagagaatctgggagcatgtacactgattgggatatcctccctcctcgtaaaattaaggatgttcacgccaaaaggcctaaggattgggatgacagagaatatattgaagatcctgatgaagttaagccagagggctatgattctatcccaaaacagattcctgatccgaaggacaaaaagcctgacacatgggatgaagatgaggatggaatatggaagcccagaatggtatcaaatccagcatacaagggaccttggaaacgcaagagaattaaaaatcctaactacaagggtaaatggaagaccccatggatcgataatccagagtttgaggatgatccagatctttatgtgctgaagcctttgaagtatattggaattgaagtttggcaggtaaaagctggttcagttttcgacaacattctgatttgtgatgaccctgagtatgcaagaaaggttgttgaggaaacttggggtgcaaatagggaggctgaaaaggaagcttttgaagaagctgaaaaggagaggaaagctagggaggatagggaaggtcaaaaggcaaaggacgatggtggccggcatcgaagacacaggcgtcataaaaaagtatattttctttatcctgccacatag

SEQ ID NO: 4608 - protein, 410 aa, Zea mays
MGTGRRGGGGGGVFHRLLALSSLLLLASGEVVFEERFEDGWETRWVESDWKRSEGKAGRFKHTAGRYSADPDDKGIQTTIDARHFAISAKFPEFSNKNRTLVVQYSIKFEQDIECGGGYIKLMSGYVNQKKFSGDTPYSLMFGPDICGTQTKKLHLILSYQGQNYPIKKDLECETDKLTHVYTFILRPDASYSLLVDNRERESGSMYTDWDILPPRKIKDVHAKRPKDWDDREYIEDPDEVKPEGYDSIPKQIPDPKDKKPDTWDEDEDGIWKPRMVSNPAYKGPWKRKRIKNPNYKGKWKTPWIDNPEFEDDPDLYVLKPLKYIGIEVWQVKAGSVFDNILICDDPEYARKVVEETWGANREAEKEAFEEAEKERKAREDREGQKAKDDGGRHRRHRRHKKVYFLYPAT

SEQ ID NO: 4609 - DNA, 1257 bp, Zea mays
  CDS (1)..(1257)
atggtgatccgcaggggttcttcgtacgccgtcgcggcacttctcgcgctcgcctctgtcgccgccgtcgccggcgaggtattcttccaggagaagttcgaagatggctgggaaagtcggtgggtcaagtccgagtggaaaaaggacgataacatggctggtgaatggaaccacacctcggggaaatggaatggagatgcagaggacaaaggtattcaaacctccgaggactacaggttctatgccatttcagctgaataccctgaattcagcaacaaggataagaccctggtgctgcagttctctgtgaagcacgagcagaagcttgactgtggtggtggttacgtcaagttgctgggtggtgatgtagaccagaaaaaattcggtggggacacaacttacagcattatgtttggaccagatatctgtgggtacagcaccaagaaggttcacactatcctgacaaaggatggcaagaaccacttgatcaagaaggatgtgctttgtgagactgatcagttgactcatgtttacactttgatcatccgtcccgatgcaacatacagcattctcatcgataatgaagagaagcaaactggcagcatctatgagcactgggatattcttccccctaagcaaatcaaggacccagaggctaagaagcctgaggactgggatgacaaggaatacattcctgaccctgaggacaagaagccagagggctatgatgatattcccaaggaaattcctgaccctgatgctaagaagcctgaggactgggatgacgaggaagatggtgaatggactgcccctaccattcccaacccagaatacaaaggaccatggaaacaaaagaaaatcaagaaccctaactaccagggtaaatggaaggcacctatgattgacaacccagatttcaaggatgatccgtacatttatgcatttgacagcctgaaatacattggcattgagctgtggcaggttaaatcaggcactttgtttgacaacatcatcatcactgatgatcctgcgttggccaagacttttgcagaggagacatggggcaagcacaaggaggcagagaagactgctttcgatgaggctgagaaaaagaaggaagaagaggaagccgccaagggtggcgatgatgacgatgatgacctagaggatgaggcagacgatgacaaggcagacgatgacaaggccgactctgatgccgaggatgacaaggactctgaggagcacgacgagctctag

SEQ ID NO: 4610 - protein, 418 aa, Zea mays
MVIRRGSSYAVAALLALASVAAVAGEVFFQEKFEDGWESRWVKSEWKKDDNMAGEWNHTSGKWNGDAEDKGIQTSEDYRFYAISAEYPEFSNKDKTLVLQFSVKHEQKLDCGGGYVKLLGGDVDQKKFGGDTTYSIMFGPDICGYSTKKVHTILTKDGKNHLIKKDVLCETDQLTHVYTLIIRPDATYSILIDNEEKQTGSIYEHWDILPPKQIKDPEAKKPEDWDDKEYIPDPEDKKPEGYDDIPKEIPDPDAKKPEDWDDEEDGEWTAPTIPNPEYKGPWKQKKIKNPNYQGKWKAPMIDNPDFKDDPYIYAFDSLKYIGIELWQVKSGTLFDNIIITDDPALAKTFAEETWGKHKEAEKTAFDEAEKKKEEEEAAKGGDDDDDDLEDEADDDKADDDKADSDAEDDKDSEEHDEL

SEQ ID NO: 4611 - DNA, 20 bp, Artificial sequence
  primer
atgagagaacggattattac

SEQ ID NO: 4612 - DNA, 21 bp, Artificial sequence
  primer
ctaactctcacgcctcgtctg

SEQ ID NO: 4613 - protein, 408 aa, Artificial sequence
  consensus sequence
  Variant (2)..(4): Xaa in position 2 to 4 is any amino acid
  Variant (6)..(10): Xaa in position 6 to 10 is any amino acid
  Variant (11)..(19): Xaa in position 11 to 19 is any or no amino acid
  Variant (21)..(22): Xaa in position 21 to 22 is any amino acid
  Variant (24)..(25): Xaa in position 24 to 25 is any amino acid
  Variant (26)..(42): Xaa in position 26 to 42 is any or no amino acid
  Variant (44)..(44): Xaa in position 44 is any amino acid
  Variant (46)..(54): Xaa in position 46 to 54 is any amino acid
  Variant (55)..(59): Xaa in position 55 to 59 is any or no amino acid
  Variant (61)..(61): Xaa in position 61 is any amino acid
  Variant (63)..(68): Xaa in position 63 to 68 is any amino acid
  Variant (70)..(72): Xaa in position 70 to 72 is any amino acid
  Variant (75)..(83): Xaa in position 75 to 83 is any amino acid
  Variant (84)..(86): Xaa in position 84 to 86 is any or no amino acid
  Variant (88)..(90): Xaa in position 88 to 90 is any amino acid
  Variant (91)..(97): Xaa in position 91 to 97 is any or no amino acid
  Variant (99)..(99): Xaa in position 99 is any amino acid
  Variant (101)..(110): Xaa in position 101 to 110 is any amino acid
  Variant (114)..(114): Xaa in position 114 is any amino acid
  Variant (116)..(116): Xaa in position 116 is any amino acid
  Variant (118)..(126): Xaa in position 118 to 126 is any amino acid
  Variant (127)..(132): Xaa in position 127 to 132 is any or no amino acid
  Variant (134)..(137): Xaa in position 134 to 137 is any amino acid
  Variant (140)..(140): Xaa in position 140 is any amino acid
  Variant (147)..(147): Xaa in position 147 is any amino acid
  Variant (150)..(152): Xaa in position 150 to 152 is any amino acid
  Variant (153)..(153): Xaa in position 153 is any or no amino acid
  Variant (155)..(155): Xaa in position 155 is any amino acid
  Variant (157)..(157): Xaa in position 157 is any amino acid
  Variant (159)..(178): Xaa in position 159 to 178 is any amino acid
  Variant (179)..(188): Xaa in position 179 to 188 is any or no amino acid
  Variant (190)..(190): Xaa in position 190 is any amino acid
  Variant (192)..(192): Xaa in position 192 is any amino acid
  Variant (195)..(198): Xaa in position 195 to 198 is any amino acid
  Variant (201)..(204): Xaa in position 201 to 204 is any amino acid
  Variant (206)..(207): Xaa in position 206 to 207 is any amino acid
  Variant (209)..(224): Xaa in position 209 to 224 is any amino acid
  Variant (225)..(229): Xaa in position 225 to 229 is any or no amino acid
  Variant (231)..(233): Xaa in position 231 to 233 is any amino acid
  Variant (235)..(235): Xaa in position 235 is any amino acid
  Variant (238)..(240): Xaa in position 238 to 240 is any amino acid
  Variant (243)..(243): Xaa in position 243 is any amino acid
  Variant (247)..(250): Xaa in position 247 to 250 is any amino acid
  Variant (255)..(258): Xaa in position 255 to 258 is any amino acid
  Variant (259)..(279): Xaa in position 259 to 279 is any or no amino acid
  Variant (281)..(281): Xaa in position 281 is any amino acid
  Variant (283)..(284): Xaa in position 283 to 284 is any amino acid
  Variant (285)..(285): Xaa in position 285 is any or no amino acid
  Variant (287)..(287): Xaa in position 287 is any amino acid
  Variant (289)..(291): Xaa in position 289 to 291 is any amino acid
  Variant (292)..(292): Xaa in position 292 is any or no amino acid
  Variant (295)..(295): Xaa in position 295 is any amino acid
  Variant (297)..(297): Xaa in position 297 is any amino acid
  Variant (304)..(304): Xaa in position 304 is any amino acid
  Variant (306)..(306): Xaa in position 306 is any amino acid
  Variant (309)..(309): Xaa in position 309 is any amino acid
  Variant (311)..(312): Xaa in position 311 to 312 is any amino acid
  Variant (314)..(316): Xaa in position 314 to 316 is any amino acid
  Variant (319)..(321): Xaa in position 319 to 321 is any amino acid
  Variant (322)..(326): Xaa in position 322 to 326 is any or no amino acid
  Variant (328)..(328): Xaa in position 328 is any amino acid
  Variant (330)..(332): Xaa in position 330 to 332 is any amino acid
  Variant (333)..(335): Xaa in position 333 to 335 is any or no amino acid
  Variant (338)..(338): Xaa in position 338 is any amino acid
  Variant (344)..(345): Xaa in position 344 to 345 is any amino acid
  Variant (347)..(347): Xaa in position 347 is any amino acid
  Variant (349)..(349): Xaa in position 349 is any amino acid
  Variant (352)..(356): Xaa in position 352 to 356 is any amino acid
  Variant (357)..(364): Xaa in position 357 to 364 is any or no amino acid
  Variant (366)..(376): Xaa in position 366 to 376 is any amino acid
  Variant (377)..(383): Xaa in position 377 to 383 is any or no amino acid
  Variant (385)..(385): Xaa in position 385 is any amino acid
  Variant (387)..(387): Xaa in position 387 is any amino acid
  Variant (389)..(394): Xaa in position 389 to 394 is any amino acid
  Variant (399)..(400): Xaa in position 399 to 400 is any amino acid
  Variant (402)..(403): Xaa in position 402 to 403 is any amino acid
  Variant (405)..(407): Xaa in position 405 to 407 is any amino acid
FXXXFXXXXXXXXXXXXXXWXXSXXXXXXXXXXXXXXXXXXXGXWXXXXXXXXXXXXXXDXGXXXXXXAXXXAIXXXXXXXXXXXXKXXXXXXXXXXVXQXXXXXXXXXXCGGXYXKXXXXXXXXXXXXXXXFXXXXPYXIMFGPDXCGXXXXKXHXIXXXXXXXXXXXXXXXXXXXXXXXXXXXXXXLXHXYTXXXXPDXXXXIXXDXXXXXXXXXXXXXXXXXXXXXPXXXIXDPXXXKPXDWDXXXXIPDPXXXXXXXXXXXXXXXXXXXXXXXXXPXGXXXDXPXXXXDPXAXKPEDWDXEXDGXWXXPXXXNPXXXXXXXXGXWXXXXXXNPXYKGKWXXPXIXNPXXXXXXXXXXXXXPXXXXXXXXXXXXXXXXXXGXEXWXXXXXXLFDNXXIXXDXXXA

SEQ ID NO: 4614 - protein, 41 aa, Artificial sequence
  protein pattern
  Variant (2)..(2): Xaa in position 2 is any amino acid
  Variant (4)..(9): Xaa in position 4 to 9 is any amino acid
  Variant (12)..(12): Xaa in position 12 is Ala, Asp, Glu or Asn
  Variant (14)..(14): Xaa in position 14 is any amino acid
  Variant (16)..(16): Xaa in position 16 is any amino acid
  Variant (18)..(21): Xaa in position 18 to 21 is any amino acid
  Variant (23)..(23): Xaa in position 23 is any amino acid
  Variant (26)..(26): Xaa in position 26 is Ala, Asp, Asn or Ser
  Variant (28)..(29): Xaa in position 28 to 29 is any or no amino acid
  Variant (31)..(32): Xaa in position 31 to 32 is any or no amino acid
  Variant (34)..(37): Xaa in position 34 to 37 is any amino acid
  Variant (39)..(39): Xaa in position 39 is any amino acid
GXWXXXXXXNPXYXGXWXXXXIXNPXYXXKXXWXXXXIXNP

SEQ ID NO: 4615 - protein, 17 aa, Artificial sequence
  protein pattern
  Variant (2)..(2): Xaa in position 2 is any amino acid
  Variant (3)..(3): Xaa in position 3 is Asp, Gly, Asn or Ser
  Variant (4)..(4): Xaa in position 4 is any amino acid
  Variant (5)..(5): Xaa in position 5 is Ser or Thr
  Variant (8)..(8): Xaa in position 8 is Ser, Thr or Val
  Variant (15)..(15): Xaa in position 15 is any amino acid
FXXXXPYXIMFGPDXCG

SEQ ID NO: 4616 - protein, 37 aa, Artificial sequence
  protein pattern
  Variant (2)..(4): Xaa in position 2 to 4 is any or no amino acid
  Variant (6)..(6): Xaa in position 6 is Phe, Ile or Leu
  Variant (8)..(8): Xaa in position 8 is Ile, Leu or Val
  Variant (10)..(10): Xaa in position 10 is Gln, Ser or Thr
  Variant (11)..(11): Xaa in position 11 is Met or Val
  Variant (12)..(13): Xaa in position 12 to 13 is any amino acid
  Variant (14)..(14): Xaa in position 14 is Asp, Glu, Gly or Ser
  Variant (15)..(16): Xaa in position 15 to 16 is any amino acid
  Variant (20)..(20): Xaa in position 20 is Phe, Ile, Leu, Met or Val
  Variant (21)..(21): Xaa in position 21 is any amino acid
  Variant (22)..(22): Xaa in position 22 is Ile, Leu or Val
  Variant (23)..(23): Xaa in position 23 is Ala, Cys, Gly, Ser, Thr or Val
  Variant (24)..(24): Xaa in position 24 is any amino acid
  Variant (25)..(25): Xaa in position 25 is Asp, Asn or Ser
  Variant (26)..(28): Xaa in position 26 to 28 is any amino acid
  Variant (30)..(36): Xaa in position 30 to 36 is any amino acid
  Variant (37)..(37): Xaa in position 37 is Phe, Trp or Tyr
IXXXGXEXWXXXXXXXFDNXXXXXXXXXAXXXXXXXX

SEQ ID NO: 4617 - protein, 24 aa, Artificial sequence
  protein pattern
  Variant (2)..(3): Xaa in position 2 to 3 is any amino acid
  Variant (4)..(4): Xaa in position 4 is any or no amino acid
  Variant (6)..(6): Xaa in position 6 is any amino acid
  Variant (9)..(10): Xaa in position 9 to 10 is any amino acid
  Variant (11)..(11): Xaa in position 11 is any or no amino acid
  Variant (14)..(14): Xaa in position 14 is Ala, Asp, Glu, Ser or Thr
  Variant (15)..(15): Xaa in position 15 is Ala, Asp, Asn, Ser or Thr
  Variant (17)..(17): Xaa in position 17 is Asp or Val
  Variant (18)..(18): Xaa in position 18 is Asp or Glu
  Variant (19)..(21): Xaa in position 19 to 21 is any amino acid
  Variant (22)..(22): Xaa in position 22 is Ile or Met
  Variant (23)..(23): Xaa in position 23 is any amino acid
PXXXIXDPXXXKPXXWXXXXXXXD

SEQ ID NO: 4618 - protein, 14 aa, Artificial sequence
  protein pattern
  Variant (2)..(2): Xaa in position 2 is Pro or Thr
  Variant (3)..(3): Xaa in position 3 is Asp, Glu, Asn or Thr
  Variant (5)..(5): Xaa in position 5 is any or no amino acid
  Variant (7)..(7): Xaa in position 7 is any or no amino acid
  Variant (9)..(9): Xaa in position 9 is any amino acid
  Variant (13)..(13): Xaa in position 13 is any amino acid
DXXAXKXPXDWDXE

SEQ ID NO: 4619 - DNA, 924 bp, Arabidopsis thaliana
  CDS (1)..(924)
atggctgatgatcagagttcaagtactgaccgtctcgtgaaacctgaaagtttaaactcagatagaggatccaatcaatctattgaatcttctggagagagttctagagctcagggttccacaagcctgtctactactaaatctatggatggtaagaaaaccgaggaagaagagacaacggaacaacgcgatgttgatgatgaagaggaaccgctcatccaatcggttgaatgtcgtatatgccaagaggaggattccgttaagaacctcgagtccccttgttcttgtagtggcagtttgaagtatgctcatcgtaagtgtgttcaacgttggtgtaatgagaaaggcgacacaacctgtgaaatatgccacaagtcttatcaacctggatacaccgctcctcctcctcctcccgctgatgataccattattgatatcggtgaagattggggcaatggtgttcacttagatttgaatgacccacgcattttggcaatggcggctgcagaacgccatttctttgatgcggactatgacgaatacgctgattctaactctagcggagctgcattctgtcgctctgctgctcttatattaatggcgcttttactcttacgacacgctctaaatcttacaaacaacaactcagatgacgaagaagacgatccatcagctttcttctttcttttcatgcttcgagccgctggttttctcctcccgtgttacatcatggcttgggctattagtatattacaacgtcgaagacaaagacaggaagctgctgctctagctgcggcagaagtagcgtttatgttacatagcggtgggggcgggggaggacaacgcagaggaggtttgcactttgctgtaccaccagagcttatatctaatccacaccaccaacctgaagcttcaccgcagtga

SEQ ID NO: 4620 - protein, 307 aa, Arabidopsis thaliana
MADDQSSSTDRLVKPESLNSDRGSNQSIESSGESSRAQGSTSLSTTKSMDGKKTEEEETTEQRDVDDEEEPLIQSVECRICQEEDSVKNLESPCSCSGSLKYAHRKCVQRWCNEKGDTTCEICHKSYQPGYTAPPPPPADDTIIDIGEDWGNGVHLDLNDPRILAMAAAERHFFDADYDEYADSNSSGAAFCRSAALILMALLLLRHALNLTNNNSDDEEDDPSAFFFLFMLRAAGFLLPCYIMAWAISILQRRRQRQEAAALAAAEVAFMLHSGGGGGGQRRGGLHFAVPPELISNPHHQPEASPQ

SEQ ID NO: 4621 - DNA, 1461 bp, Triticum aestivum
  CDS (261)..(1097)
gaggaggaggaggaggccggagcccgcaccaggccgctgggagttctacccccgaaaggtggacctcgaatatttggtgcctcttatctctcgccaaggacgctggtgcctccttgtggaaataggaaaatttcttcatccacttcataattgttgaattgacactaagatttatttagcaatcagatttccggactctgagcagatctaacaggatctttaaaagagttcttttgtttgaaatttgttacttagtagcaatggtgaaggatcatctaatgctcaatgttgaccgcctaatggtgcctgaacccattgaggtcactggagcacccaaaagctcctcatcgagggacaccgctgcactgcccattacagggcattccttttttgcagttggagacagcatggttcctgaagaagaaccccttctgcagattacagagtgccgtatttgtcaggaggaagatgacattaagaatctagagagcccctgtgcttgcaccggcagtgtaaagtatgcgcatagggcttgtgtacaaagatggtgcaatgagaaaggagatgtgacatgtgaaatctgccatgagccgtatgaacatgggtacactgcacctcccagaccccatcctgatgaaactaccatcgatataagtggtggctggaccattactggtacagcatttgacttgcgtgatcctaggatcctggcagtagcacaaaaccacattatggaagctgaatatgatgattattcagccacgaatgccagcactgctgccttttgccgttctgctgctcttgtcttaatggctctcctactactgaggcatgcattgactctaactgatgaagatgatgatgacacttcagcaatgttttcacttttcttactgcgtgcggctggttttcttctcccattctatataatggcttgggctattagtatattgcagcgtcgcagacatcgacaggaggcagctgcgttggcagcaactgaggtggcattcatccttcagtctgggcaaggaagaggagtgcatttcaccatagcaccagattctcctgccacgccccagcacgaaccacaaccttgaagatggcagctgtggcgacatcggattgctggcttgcgcgaatcaccaaaggagttatggtttgctgccactgcagagccatgttatttacgtactttacgtcattgccctgagtgtaacgttctgagacgtgtcccagtttgtgcttccggattctgttagggttggcgttggccagggagtctcggtgagtggtgtgtataaagtaagaaagccattaggaccgtgtatgccggtcccaactgttaacttgaaagataccaagcagacggcttctctgaaggccactgtttcgcctatagtctttacatgcttgttgttttaaaaaaaaaaaaaaaaaaaaaaaagaaaaaaaaaaaaaaaa

SEQ ID NO: 4622 - protein, 278 aa, Triticum aestivum
MVKDHLMLNVDRLMVPEPIEVTGAPKSSSSRDTAALPITGHSFFAVGDSMVPEEEPLLQITECRICQEEDDIKNLESPCACTGSVKYAHRACVQRWCNEKGDVTCEICHEPYEHGYTAPPRPHPDETTIDISGGWTITGTAFDLRDPRILAVAQNHIMEAEYDDYSATNASTAAFCRSAALVLMALLLLRHALTLTDEDDDDTSAMFSLFLLRAAGFLLPFYIMAWAISILQRRRHRQEAAALAATEVAFILQSGQGRGVHFTIAPDSPATPQHEPQP

SEQ ID NO: 4623 - DNA, 1248 bp, Glycine max
  CDS (176)..(1036)
ctacttttcctttatccattttccaagcaaaacttttcaaacccaaaaaaaatccaaaaaaaagaaaaacaaaacgcttaacgcaatacaaaaaccacagtttcaatcacatctctctctctctttctcgcaaatttctactttctgggttttctatttgagattcgttgttccaatgagcgatcacttggtggtgttcgttgaccgtctcgcgcgccctgtccccgttgacccggtggcgcagccgccttccgagccgtctcctcctccggcccccgtgaatgctgacgcttccgggagctccggcaccgctccggtggaggattgtgacggagagggcggcggcgaggaggagccgctgatccagatggcggagtgccgcatctgccaggaggaggacggcgtttccaacttggagacgccctgcgcctgtagcggcagtcttaagtatgctcacagaaagtgtgtccagcattggtgtgatgagaaaggagacataacttgtgagatatgtcatcagccatatcaacctgggtatactgcccccccacctcgtcctaatcctgaagaaactactattgatataggaggtggctggacaatatctggcacacccttagacttgcgtgatcctcgactcttggcaattgcagaagcagaacgtcagttcttggatgctgaatatgatgagtatgctgcttccaacgccagtggagctgcattttgccgctcagctgctttaattttaatggcccttttactcctgcggcatgcactttctgtctcagatggtgataattctgatgatgatccatccagttttttctcccttttcttgcttcgtgctgctggatttctattaccttgctacatcatggcttgggcaatcagtattctgcagcgtcggcgacaaagacaagaggctgcagcactagcggcaacccaagttgcttttgttctacaatctggtcagcgtagaggtttacagtttgcaatagcaccaggaccacccacactacaccaggaacaagtataataatttgtatgcttttttatgtatgaatgaatattaagaaggctttgttgaaatgccgtgcatttttactctttactttcagctgtaacgttatgtacatgtacatacttagggggtgctaaaacgatgtacatgaatccattggtatccattcaattcatctatctatgaatgtaaccgaatccatccacttactaaaaaaaaaaaaaaaa

SEQ ID NO: 4624 - protein, 286 aa, Glycine max
MSDHLVVFVDRLARPVPVDPVAQPPSEPSPPPAPVNADASGSSGTAPVEDCDGEGGGEEEPLIQMAECRICQEEDGVSNLETPCACSGSLKYAHRKCVQHWCDEKGDITCEICHQPYQPGYTAPPPRPNPEETTIDIGGGWTISGTPLDLRDPRLLAIAEAERQFLDAEYDEYAASNASGAAFCRSAALILMALLLLRHALSVSDGDNSDDDPSSFFSLFLLRAAGFLLPCYIMAWAISILQRRRQRQEAAALAATQVAFVLQSGQRRGLQFAIAPGPPTLHQEQV

SEQ ID NO: 4625 - DNA, 792 bp, glycine max
  CDS (1)..(792)
atgggggagcacgtggttttatctgttcttgactctcttatagcacctggaactttgcaaccacaacatgatggtgatggtgatgctttaggttcactcattgagggtgctactcatgttaatgatgttggggaatgcgatacacttgaagaagaagaagaagaagaagaagataaagaagaagaagaccttatcaaaatggtggaatgtcgcatttgccaggaggatgatacccttcaaaatttggacataccttgtgcttgcagtggaaccttgaagtttgctcatacgaaatgtattcaaatatggtgctacgagaagggtgatacaatttgtgaaatctgcaataagccattcaaacctggttatactgcaaattcacctgtctgccagcctggagatacttcaattggtatcagtgatgactgggcaatctctagtagtcctttagatttgcacaatgctcgactgttggctattgcggcattggagcaccaagttccggagactgagcatgaagattatgtcaatgctggcactggtggaacttcattgtggcactctgttggtctaatcttaatggctcttttacttctgaggcatgctgctcccctcttcaatgctgatgtggagaaagctatagcatatttttattttttctttcttggcgcggctgctgttatccttccatgctatcttgtggcctggataattcgcataatacagcatcaaaggcaaagacaacaatcagctgaagaacttgcatttatgctacaggcagaggaccaataa

SEQ ID NO: 4626 - protein, 263 aa, glycine max
MGEHVVLSVLDSLIAPGTLQPQHDGDGDALGSLIEGATHVNDVGECDTLEEEEEEEEDKEEEDLIKMVECRICQEDDTLQNLDIPCACSGTLKFAHTKCIQIWCYEKGDTICEICNKPFKPGYTANSPVCQPGDTSIGISDDWAISSSPLDLHNARLLAIAALEHQVPETEHEDYVNAGTGGTSLWHSVGLILMALLLLRHAAPLFNADVEKAIAYFYFFFLGAAAVILPCYLVAWIIRIIQHQRQRQQSAEELAFMLQAEDQ

SEQ ID NO: 4627 - DNA, 1306 bp, glycine max
  CDS (109)..(966)
ggctcgagctcgagccgctcgagccgctcgagccgattcggctcgagctcaagcctttctctctttctaacaagttacaaataaaagttcccctttttctccggatcaatgaacgatcatctggtgctgttcgtggaccggctggtgcgacccgtgccgattccggtgccgctggcccaacaaccccccgagcccgtgacgcccgtcaatgaggccgcggtggcgggtccctccgggtcgtctccgtctgcggaggacgacggagacgacgacggggaggacgcgccgctgctgcagctggcggagtgtcgcatttgccaagaggaggacagcgtcagcgatttggagaccccctgctcctgcagtggtagtcttaagtatgctcatagaaagtgcgttcagcgttggtgcaatgagaaaggagacataatttgtgagatatgtcataagtcctatgaacctggttatactgccccgccacctcgtcctcagcctgaagaaactaccattgatataggtggaggctggacaatctctggcatgccattggacttgcgtgatacccgactcttagcaattgcagaggctgaacgtcaattcttggaagctgaatacgatgagtatgctgcttccaacgccagtggagctgcattttgccgctcagctgctttaattttaatggcccttttactcttgcggcatgcactttctgtctcagatggtgataattctgatgatgatccatccaattttttctcccttttcttgcttcgtgccgctggatttctattaccttgctacatcatggcttgggcaatcagtattctgcagcgtcggcgacaaagacaagaggctgcagcactagcagcaacccaagttgctttcgttctacaatctgggcagcgtagaggtttacagtttgcaatagcaccaggatcacccactgtaccccaggaacaagtctaataatttgtatgcttttttatttttattttttatgtatgaatgaatattaagaaggctttgttgaaatgccgtgcatttttactctttactttcgcagctgtaacgttatgtacatgtacatactagggggtggtaaaacgatatagtaagtgaatccattggtatccattcaattcacatctatctatgaatgtaactgaatccatccacactatatagtaaaatgctttatatgatgtttgtcgttgtgatatgcattaagtactctgctcccggttgctaacaaaaccccaatgcaaaaataagtgataaaataatggttttgctttattgccttctc

SEQ ID NO: 4628 - protein, 285 aa, glycine max
MNDHLVLFVDRLVRPVPIPVPLAQQPPEPVTPVNEAAVAGPSGSSPSAEDDGDDDGEDAPLLQLAECRICQEEDSVSDLETPCSCSGSLKYAHRKCVQRWCNEKGDIICEICHKSYEPGYTAPPPRPQPEETTIDIGGGWTISGMPLDLRDTRLLAIAEAERQFLEAEYDEYAASNASGAAFCRSAALILMALLLLRHALSVSDGDNSDDDPSNFFSLFLLRAAGFLLPCYIMAWAISILQRRRQRQEAAALAATQVAFVLQSGQRRGLQFAIAPGSPTVPQEQV

SEQ ID NO: 4629 - DNA, 1453 bp, sorghum bicolor
  CDS (316)..(1155)
gccggccgggccggcattcacgcccccgtctgtctcgtggccttccgcacgaggctttcctggcggccacaactgggcgagcggcgccgcccttcaccaggtcttcgtcgggcccttcgccggcgacgagcacccaccagaaacgtggagctcagagcattggtgcctctttcctctttcatcagggattctggtgcctcgtttcacaagccggttgctaagcctggtctagctactagattatgaactctctgctgatctaatagcatttctacaagaattctttgctgtaaggtttattagttatttgcaacaatgaaggaacatctaatgctcaatattgatgacctaagcattcctgagcctaatgaggtcatgggagcagtcaagaataaatcatctggggaaaccattgcacgtctaccctccaaggctcatgccattgtagcaatgggagaaagcatggtttctgaagaggaacctcttctgcaagtggtggagtgtcgcatttgtcaggaggaagatagtataaaaaatctagagagcccatgtgcttgcactggcagtctaaagtatgctcatcgggtttgtgtgcaacgatggtgcaatgagaaaggagatgtaatatgtgagatatgtcatgagccttatgaacatgggtacactgcacctcccagagctcatcctgatgaaactaccattgatataagtggtgggtggaccattactggtaccgcatttgacttgcgtgatcctaggatacttgcagtggcacaaaaccacatcatggaagctgaatatgatgattattctgccacaaatgccagcactgctgccttctgccgttctgctgctcttgttttaatggctctcttattgttgagacacgcactgactctaactgatgaagatgacgacgacacttcagcgatgttttcactttttctactgcgtgctgctggtttcctccttcctttctacattatggcttgggcaattagtatcttgcagcgccgcagacagagacaggaggcagctgctcttgctgcaacggaggtggcattcatcctgcagtcggggcaaggaaggggagtgcacttcaccatcgcaccggactcccctgccacaccacagcatgaaccaccgcaaccataattatatctatctatgttgtggctggctgcggcagcaggccacagatcgcttatttcgataggttccccaaggatttctttatggctgccgtctagtgcagaaccagataatttctgcccaagtttcatgtcatcaatgtacttgagtgtgaagatgcgtgttctgcgagttggctagtgcattttgcatgtcggccagggagtaacggggtgtgtgtgtatatatatcgtaacagagacatctcggttgtatgatctacacaattgtcaaaaaaatcaattatgatagcccgattttc

SEQ ID NO: 4630 - protein, 279 aa, sorghum bicolor
MKEHLMLNIDDLSIPEPNEVMGAVKNKSSGETIARLPSKAHAIVAMGESMVSEEEPLLQVVECRICQEEDSIKNLESPCACTGSLKYAHRVCVQRWCNEKGDVICEICHEPYEHGYTAPPRAHPDETTIDISGGWTITGTAFDLRDPRILAVAQNHIMEAEYDDYSATNASTAAFCRSAALVLMALLLLRHALTLTDEDDDDTSAMFSLFLLRAAGFLLPFYIMAWAISILQRRRQRQEAAALAATEVAFILQSGQGRGVHFTIAPDSPATPQHEPPQP

SEQ ID NO: 4631 - DNA, 753 bp, zea mays
  CDS (1)..(753)
atgggggatcatgtcgcggtggatgttggggagctcgtagcgtcccgagtcggtgaggcagcggggttagtgtccggcgccaaggaggaaacagatgcgctgattgggatggtggagtgccgcatttgccaggaggaggacctcaggaagaacctcgagagcccctgcgcttgcaacggcagcctcaagtatgctcacagagaatgtgtgcaacgatggtgcaatgagaaaggggatacaatctgtgaaatctgccatgagttgtacaagcctggttacactgccccaacccaggtgcatcatgatgaaactaccatagagataagtggtggagattggaccatctctggcaaccgtttggatttacatgatcctagaatattggcaatggctgctgctcaacaccgtctacttgaagacgactatgatgaatatactgcaacaaacaacaacgctgctgcattttgccgctctatatttctgattttgatggcccttttgctcctgaggcatacactgaccattactaacagtgatgatgaagatgatgcatctgctattttctcgctatttcttttgagagccgctggatttttgctgccatgctatattatggcttgggctattagtatcatgcagcgtcaaagacaaagacaggttggtggctcggtgccaatggaaatgtttctctttcatgtgtatactgtattgacttttgacggaaaagaattccacgaaactatttatacctag

SEQ ID NO: 4632 - protein, 250 aa, zea mays
MGDHVAVDVGELVASRVGEAAGLVSGAKEETDALIGMVECRICQEEDLRKNLESPCACNGSLKYAHRECVQRWCNEKGDTICEICHELYKPGYTAPTQVHHDETTIEISGGDWTISGNRLDLHDPRILAMAAAQHRLLEDDYDEYTATNNNAAAFCRSIFLILMALLLLRHTLTITNSDDEDDASAIFSLFLLRAAGFLLPCYIMAWAISIMQRQRQRQVGGSVPMEMFLFHVYTVLTFDGKEFHETIYT

SEQ ID NO: 4633 - DNA, 1336 bp, Nicotiana tabacum
  CDS (72)..(1007)
ccacgcgtccgcccacgcgtccgccaaaatccatcacgaattgcattttcagatacgtgagtcaactgctaatgggagaacacttggctctatgtgttgatcgtcttatcacacctaaatctttgcactcgttgcaagggtcagaggatgcaggatcctctgcaggaagttcttgctcgcacacagtaggtcaatcaccttatggtactactaataaggaggatgaagaactagaagctggaggtgaagatgagccattacttcagactgtggaatgccgaatttgccaggaagaagatagcactaagaatttggagattccttgtggctgcagtggcagcttaaagtatgctcataggaaatgtgttcagcgttggtgcaatgagaagggtgatataatttgcgagatttgtcatcagtcttatcaacctggctatactgctccaccaccgccttctccttctgaagatattgccatcgacatcagtgggggctggacagtggctggtactcagcttgacttgcatgatccgcggcttcttgcgatggcagctgcagagcgccatctcttggaggctgactatgacgagtatgctgattcaagtgctagtggagctgcattttgtcgttctgctgctttaattttaatggcccttctattattgaggcatgctgtgaccatcggaaatgatgatggagatgacggtgatgtctccacctttttctctcttttcttgctccgtgctgctggttttcttctaccttgctacatcatggcttgggctatcagtatcatgcagcgtcgaaggcaaagacaggaggcaacagcacttgcggcaacagaagttgctttcatgctgcaggcagggcaacataggggcttgcatgtaacaatagcaccaggacctgcacagttagctgaaccttcagcaacaccagcacacccaactactcatgttgcaacaccaaccgcccaggcgacatcccctcctccagagatggtataaatggctttgctcagtttgcttgttataaaatagttgccgataggggcattttactgttggtaagttgcacaagatggggatgagtagaagggtagaggagtattcttttccctttttgctttttcgatttattagctgtatctttgcattgccaaatttggagtgcagaggctgaaactttttccatttgttcaatttttcattaatgcttgaacatgtaaaaatataatagcgaacttagctgctttcaatgtggagataccatatcttcacatcgtgtacattgtttatatattaccattatgggttactcttaaaaaaaaaaaaaa

SEQ ID NO: 4634 - protein, 311 aa, Nicotiana tabacum
MGEHLALCVDRLITPKSLHSLQGSEDAGSSAGSSCSHTVGQSPYGTTNKEDEELEAGGEDEPLLQTVECRICQEEDSTKNLEIPCGCSGSLKYAHRKCVQRWCNEKGDIICEICHQSYQPGYTAPPPPSPSEDIAIDISGGWTVAGTQLDLHDPRLLAMAAAERHLLEADYDEYADSSASGAAFCRSAALILMALLLLRHAVTIGNDDGDDGDVSTFFSLFLLRAAGFLLPCYIMAWAISIMQRRRQRQEATALAATEVAFMLQAGQHRGLHVTIAPGPAQLAEPSATPAHPTTHVATPTAQATSPPPEMV

SEQ ID NO: 4635 - DNA, 864 bp, Brassica napus
  CDS (1)..(864)
atgtcggatcatttgagtttatgtaccgatcgtctgataacggccgagagcttggaatcagaaaaggattctggagaaagttccaggcttcaaggcaaagatgcggcttcttcttcatctgcggatgaagctgaagatgctaggaagtactatgctgttgttgcagaagaggagccgcttctgcaatctgttgagtgccgtatttgccaggaggaagatatcactaagaacttggagactccttgtgcttgcaatggcagtttgaagtatgctcaccgcaagtgtgttcagcgttggtgtaatgagaaaggcgacataatctgcgaaatatgccaccagccttatcaatctggatatacagcacctccacctcctcctcctgatgaaactataattcacattggtgacgactgggagaatggagttcacttggacttgagcgacccgcgcattctagcaatggctgcagcagaacgacatttcttggaagctgactatgacgagtactctgagtctaactctagcggagctgccttctgtcgctctgctgctctcatcctgatggcacttttactgttaagagatgcactaaacctcacaactaacccagatgacgaggacgaccccactgccttcttctctcttttccttcttcgtgctgctggttttctcctcccatgttacatcatggcatgggccatcggtattctccagcgccggaggcaaagacaggaagcagctgcgctagctgcggcggaagttgccttcatgatacacggtggtgtacctccacaacgcaggggactacactttgctgtagcaccagaacagccgccgccaatatccaacccaacaccagtctga

SEQ ID NO: 4636 - protein, 287 aa, Brassica napus
MSDHLSLCTDRLITAESLESEKDSGESSRLQGKDAASSSSADEAEDARKYYAVVAEEEPLLQSVECRICQEEDITKNLETPCACNGSLKYAHRKCVQRWCNEKGDIICEICHQPYQSGYTAPPPPPPDETIIHIGDDWENGVHLDLSDPRILAMAAAERHFLEADYDEYSESNSSGAAFCRSAALILMALLLLRDALNLTTNPDDEDDPTAFFSLFLLRAAGFLLPCYIMAWAIGILQRRRQRQEAAALAAAEVAFMIHGGVPPQRRGLHFAVAPEQPPPISNPTPV

SEQ ID NO: 4637 - DNA, 780 bp, Zea mays
  CDS (1)..(780)
atgggggatcatgtcgcggtggatgttggggagctcgtagcgtcccgagtcggtgaggcagcggggctagtgtccggcgccaaggaggaaacagaggcgctgattgggatggtggagtgccgcatttgccaggaggaggacctcaggaagaacctcgagagcccctgcgcttgcaacggcagcctcaagtatgctcacagagaatgtgtgcaacgatggtgcaatgagaaaggggatacaatctgtgaaatctgccatgagttgtacaagcctggttacactgccccaacccaggtgcatcatgatgaaactaccatagagataagtggtggagattggaccatctctggcaaccgtttggatttacatgatcctagaatattggcaatggctgctgctcaacaccgtctacttgaagacgactatgatgaatatactgcaacaaacaacaacgctgctgcattttgccgctctatatttctgattttgatggcccttttgctcctgaggcatacactgaccattactaacagcgatgatgaagatgatgcatctgctattttctcgctatttcttttgagagcggctggatttttgctgccatgctatattatggcttgggctattagtatcatgcagcgtcaaagacaaagacaggaagaagcaatgctattaccaacggaagtggcgatcattctgcatcggaacggaagaacaatgcaatttgcggtggcaccaccagaaacccctatctcacctcaccccgagctaaaccaatag

SEQ ID NO: 4638 - protein, 259 aa, Zea mays
MGDHVAVDVGELVASRVGEAAGLVSGAKEETEALIGMVECRICQEEDLRKNLESPCACNGSLKYAHRECVQRWCNEKGDTICEICHELYKPGYTAPTQVHHDETTIEISGGDWTISGNRLDLHDPRILAMAAAQHRLLEDDYDEYTATNNNAAAFCRSIFLILMALLLLRHTLTITNSDDEDDASAIFSLFLLRAAGFLLPCYIMAWAISIMQRQRQRQEEAMLLPTEVAIILHRNGRTMQFAVAPPETPISPHPELNQ

SEQ ID NO: 4639 - DNA, 861 bp, Glycine max
  CDS (1)..(861)
atgagcgatcatctggtgctgttcgtggaccggctggtgcgacccgtgccgatggtccagccgctggcccaacagccccccgagcccgcgacgcccgttgatgaggcggcggcggggccatccgggtcgtctccggcggcggaggaagacggtgacgacggcggagaggatgcgccgctgctgcagctggcggagtgtcgcatttgccaagaggaggacagcgtcagcggtttggagacaccctgctcctgcagcggtagtcttaagtatgctcatagaaagtgcgttcagcgttggtgcaatgagaaaggagacataacttgtgagatatgtcacaagtcctatgaacctggttatactgccccaccacctcgtcctcagcctgaagaaactacccttgatataggtggaggctggacaatctctggcacgccattggacttgcgtgatccccgactcttagcaattgcagaggctgaacgtcaattcttggaagctgaatacgatggatatgctgcttctcatgctagtggagctgcattttgtcgttcagttgctttgattttaatggcccttttactcttgaggcatgcactttctgtcacagattctgacgctgaagatgatccatccacttttttctctcttttcttgcttcgtgctgctggttttcttttaccttgctatatcatggcttgggcaatcagtattttgcaacgccggcgacaaagacaagaggcggcagcactagcggcaacccaagttgctttcgttctacaatccgggcagcgtaggggtctgcagtttgcaatagcaccaggaccaccaacaatgaatacacaccagcaggaacaagtgtaa

SEQ ID NO: 4640 - protein, 286 aa, Glycine max
MSDHLVLFVDRLVRPVPMVQPLAQQPPEPATPVDEAAAGPSGSSPAAEEDGDDGGEDAPLLQLAECRICQEEDSVSGLETPCSCSGSLKYAHRKCVQRWCNEKGDITCEICHKSYEPGYTAPPPRPQPEETTLDIGGGWTISGTPLDLRDPRLLAIAEAERQFLEAEYDGYAASHASGAAFCRSVALILMALLLLRHALSVTDSDAEDDPSTFFSLFLLRAAGFLLPCYIMAWAISILQRRRQRQEAAALAATQVAFVLQSGQRRGLQFAIAPGPPTMNTHQQEQV

SEQ ID NO: 4641 - DNA, 717 bp, Glycine max
  CDS (1)..(717)
atgaaaaagaccgtaactggcggcggcgaggaggagccgctgatccagatggcggagtgccgcatctgccaggaggaggacggcgtttccaacttggagacgccctgcgcctgtagcggcagtcttaagtatgctcacagaaagtgtgtccagcattggtgtgatgagaaaggagacataacttgtgagatatgtcatcagccatatcaacctgggtatactgcccccccacctcgtcctaatcctgaagaaactactattgatataggaggtggctggacaatatctggcacacccttagacttgcgtgatcctcgactcttggcaattgcagaagcagaacgtcagttcttggatgctgaatatgatgagtatgctgcttccaacgccagtggagctgcattttgccgctcagctgctttaattttaatggcccttttactcctgcggcatgcactttctgtctcagatggtgataattctgatgatgatccatccagttttttctcccttttcttgcttcgtgctgctggatttctattaccttgctacatcatggcttgggcaatcagtattctgcagcgtcggcgacaaagacaagaggctgcagcactagcggcaacccaagttgcttttgttctacaatctggtcagcgtagaggtttacagtttgcaatagcaccaggaccacccacactacaccaggaacaagtataa

SEQ ID NO: 4642 - protein, 238 aa, Glycine max
MKKTVTGGGEEEPLIQMAECRICQEEDGVSNLETPCACSGSLKYAHRKCVQHWCDEKGDITCEICHQPYQPGYTAPPPRPNPEETTIDIGGGWTISGTPLDLRDPRLLAIAEAERQFLDAEYDEYAASNASGAAFCRSAALILMALLLLRHALSVSDGDNSDDDPSSFFSLFLLRAAGFLLPCYIMAWAISILQRRRQRQEAAALAATQVAFVLQSGQRRGLQFAIAPGPPTLHQEQV

SEQ ID NO: 4643 - DNA, 777 bp, Glycine max
  CDS (1)..(777)
atgggggagcacgtggttttatctgttcttgactctcttatagcacctgcaactttgcaaccacaacatgatggtgatggtgatgctttaggttcactcattgagggtgctactcatgttaatgatgttggggaatgtgatacacttgaagaagaagaagaagaagaagaagaccttatcaaaatggtggaatgtcgcatttgccaggaggatgatacccttcaaaatttggacataccctgtgcttgcagtggaactttgaagtttgctcatacgaaatgtgttcaaatatggtgctacgagaagggtgatacaatttgtgagatctgcaatcagccattcaaacctggttatactgcaaattcacctgtctgccatcctggagatacttcaattgatatcagtgatgactgggcaaccactaggaatcctttagatttgcacaatgctcgacttttggctattgcagctgtggactaccaagttccagagactgagcacgaagattatgtcaatgctggcactggtggaaccacattgtggcactctgttggtctaattttaatggctcttttacttctgaggcatgctgctcccctcttcaatgctgatgtggagaaagctatagcatatttttattttttctttcttggcgcggctgctgttatccttccatgctatcttgtggcctggataattcgcataatacagcatcaaaggcaaagacaacaatcagctgaagaacttgcatttatgctacaggcagaggaacaataa

SEQ ID NO: 4644 - protein, 258 aa, Glycine max
MGEHVVLSVLDSLIAPATLQPQHDGDGDALGSLIEGATHVNDVGECDTLEEEEEEEEDLIKMVECRICQEDDTLQNLDIPCACSGTLKFAHTKCVQIWCYEKGDTICEICNQPFKPGYTANSPVCHPGDTSIDISDDWATTRNPLDLHNARLLAIAAVDYQVPETEHEDYVNAGTGGTTLWHSVGLILMALLLLRHAAPLFNADVEKAIAYFYFFFLGAAAVILPCYLVAWIIRIIQHQRQRQQSAEELAFMLQAEEQ

SEQ ID NO: 4645 - DNA, 1287 bp, Glycine max
  CDS (183)..(1052)
acttttttcctttatccattttccaagcaaacttttcaaacaaaaaaataaataataaagaaaacaaaacaagaagaaggaaacgcgcaacgcaacacaaaaaaccacactttcaattgcatttctctctctttctcacaatttccactttccgggttttcgattcgatattcgttgttccaatgagcgatcacttggtggtgttcgttgaccgtctcgcgcgccctgtccccgttgatccggtggcgcagacggcgcaggtgccttccgaaccatctccacctccggccgccgtggatgccgacgccgccgggagctccggcacctcaccgtcggaggattgcgacggcgagggcggcgacgaggaggagccgctgatccagatggcagagtgccgcatctgccaggaggaggatggcgtttccaacttggagaccccctgcgcctgtagcggcagtcttaagtatgctcacagaaagtgtgtccagcattggtgtgatgagaaaggagacataacttgtgagatatgtcatcagccatatcaacctgggtatactgcccccccacctcgtcctaatcctgaagaaactaccattgatataggaggtggctggacaatatctggcacacccttggacttgcgtgatcctcgactcttggcaattgcagaggcagaacgtcagttcttggatgctgaatatgatgagtatgctgcttccaacgccagtggagctgcattttgccgctcagctgctttaattttaatggcccttttactcttgcggcatgcactttctgtctcagatggtgataattctgatgatgatccatccaattttttctcccttttcttgcttcgtgccgctggatttctattaccttgctacatcatggcttgggcaatcagtattctgcagcgtcggcgacaaagacaagaggctgcagcactagcagcaacccaagttgctttcgttctacaatctgggcagcgtagaggtttacagtttgcaatagcaccaggatcacccactgtaccccaggaacaagtctaataatttgtatgcttttttatttttattttttatgtatgaatgaatattaagaaggctttgttgaaatgccgtgcatttttactctttactttcgcagctgtaacgttatgtacatgtacatactagggggtggtaaaacgatatagtaagtgaatccattggtatccattcaattcacatctatctatgaatgtaactgaatccatccacactatatagtaagtgatttatatgg

SEQ ID NO: 4646 - protein, 289 aa, Glycine max
MSDHLVVFVDRLARPVPVDPVAQTAQVPSEPSPPPAAVDADAAGSSGTSPSEDCDGEGGDEEEPLIQMAECRICQEEDGVSNLETPCACSGSLKYAHRKCVQHWCDEKGDITCEICHQPYQPGYTAPPPRPNPEETTIDIGGGWTISGTPLDLRDPRLLAIAEAERQFLDAEYDEYAASNASGAAFCRSAALILMALLLLRHALSVSDGDNSDDDPSNFFSLFLLRAAGFLLPCYIMAWAISILQRRRQRQEAAALAATQVAFVLQSGQRRGLQFAIAPGSPTVPQEQV

SEQ ID NO: 4647 - DNA, 867 bp, Arabidopsis thaliana (thale cress)
  CDS (1)..(867)
atggctgatcatttgagtttatgtaccgatcgtctcataacatctgagagcttggactcagagaaagattcagattcttcaggagaaagttcttaccggcctcaaggcacagacttggcttcttcatctgtgaatgaaactgaggttcctagagagtactacgcggttgcggatgaggaagaacctcttctccaatctgttgagtgtcgtatttgccaagaggaagatagtactaagaaccttgaagctccttgtgcttgtaatggtagtttaaagtatgctcaccgcaagtgtgttcagcgttggtgtaatgagaaaggcgacataacctgtgaaatatgtcaccagccttatcaacatggatacactgcacctccgcctcctcctcctgatgaaactataattcacatcggtgacgattgggagaacggagttccgttggacttgaccgacccgcgcattctggcaatggcggctgcagaacgtcatttcttggaagcagactatgatgaatattctgagaataactcaagcggagctgccttttgtcgctctgctgctctcatcctaatggcacttttactgttacgagatgcgctaaatctcacaacgaacccagacgacgaggacgatccaactgccttcttctctctattccttcttcgtgctgctggttttctcctcccatgttacatcatggcatgggccatcggtatactacaacgtcgaagacaaagacaggaagcagcggctctagctgccgcagaagttactttcatgatacacggtggtgggcctcaacgcagaggactgcactttgctgtagcaccgcagccgccgatatccaatgtcccaacaccagtttga

SEQ ID NO: 4648 - protein, 288 aa, Arabidopsis thaliana (thale cress)
MADHLSLCTDRLITSESLDSEKDSDSSGESSYRPQGTDLASSSVNETEVPREYYAVADEEEPLLQSVECRICQEEDSTKNLEAPCACNGSLKYAHRKCVQRWCNEKGDITCEICHQPYQHGYTAPPPPPPDETIIHIGDDWENGVPLDLTDPRILAMAAAERHFLEADYDEYSENNSSGAAFCRSAALILMALLLLRDALNLTTNPDDEDDPTAFFSLFLLRAAGFLLPCYIMAWAIGILQRRRQRQEAAALAAAEVTFMIHGGGPQRRGLHFAVAPQPPISNVPTPV

SEQ ID NO: 4649 - DNA, 762 bp, Oryza sativa subsp. indica
  CDS (1)..(762)
atgaaggatcatctaatggtaaatgttgatgatctaatggcgcctgaatgctttgagaccactggggcagccaagaattcatcaggggaagccgctgcgcaggcatccactacagtgcatacctttttggcagttggagaaagcatggcccctgaagaagaacctcttctgcagttggtggaatgtcgcatttgtcaggaggaagacagtataaaaaatctggagagcccatgtgcctgtactggcagtctaaagccatatgaacacggttacactgcacctactaggcctcatcctgatgaaactaccattgacatcagtggtggctggaccattactggtactgcatttgacttgcgtgatcctaggatccttgcagttgcacagaaccacattatggaagctgaatacgatgattactctgccacaaatgccagcactgctgctttttgtcgctctgctgctctagttttaatggctctgttattattgagacatgcgctgactctaactgatgaagatgacgatgatacttctgcaatgttttcactttttctattgcgtgctgctggatttctgctaccattctatataatggcttgggcagtgagtatcttgcagcgctgcagacagcgacaggaggcggctgccttagcagcaactgaggtggcattcattcttcagtctgggcaaggaaccggagtgcatttcaccattgcaccggattcgccgaccacaccgcagcacgagccacagccttga

SEQ ID NO: 4650 - protein, 253 aa, Oryza sativa subsp. indica
MKDHLMVNVDDLMAPECFETTGAAKNSSGEAAAQASTTVHTFLAVGESMAPEEEPLLQLVECRICQEEDSIKNLESPCACTGSLKPYEHGYTAPTRPHPDETTIDISGGWTITGTAFDLRDPRILAVAQNHIMEAEYDDYSATNASTAAFCRSAALVLMALLLLRHALTLTDEDDDDTSAMFSLFLLRAAGFLLPFYIMAWAVSILQRCRQRQEAAALAATEVAFILQSGQGTGVHFTIAPDSPTTPQHEPQP

SEQ ID NO: 4651 - DNA, 762 bp, Oryza sativa subsp. japonica
  CDS (1)..(762)
atgaaggatcatctaatggtaaatgttgatgatctaatggcgcctgaatgctttgagaccactggggcagccaagaattcatcaggggaagccgctgcgcaggcacccactacagtgcatacctttttggcagttggagaaagcatggcccctgaagaagaacctcttctgcagttggtggaatgtcgcatttgtcaggaggaagacagtataaaaaatctggagagcccatgtgcctgtactggcagtctaaagccatatgaacacggttacactgcacctactaggcctcatcctgatgaaactaccattgacatcagtggtggctggaccattactggtactgcatttgacttgcgtgatcctaggatccttgcagttgcacagaaccacattatggaagctgaatacgatgattactctgccacaaatgccagcactgctgctttttgtcgctctgctgctctagttttaatggctctgttattattgagacatgcgctgactctaactgatgaagatgacgatgatacttctgcaatgttttcactttttctattgcgtgctgctggatttctgctaccattctatataatggcttgggcagtgagtatcttgcagcgccgcagacagcgacaggaggcggctgccttagcagcaactgaggtggcattcattcttcagtctgggcaaggaaccggagtgcatttcaccattgcaccggattcgccgaccacaccgcagcacgagccacagccttga

SEQ ID NO: 4652 - protein, 253 aa, Oryza sativa subsp. japonica
MKDHLMVNVDDLMAPECFETTGAAKNSSGEAAAQAPTTVHTFLAVGESMAPEEEPLLQLVECRICQEEDSIKNLESPCACTGSLKPYEHGYTAPTRPHPDETTIDISGGWTITGTAFDLRDPRILAVAQNHIMEAEYDDYSATNASTAAFCRSAALVLMALLLLRHALTLTDEDDDDTSAMFSLFLLRAAGFLLPFYIMAWAVSILQRRRQRQEAAALAATEVAFILQSGQGTGVHFTIAPDSPTTPQHEPQP

SEQ ID NO: 4653 - DNA, 948 bp, Oryza sativa subsp. japonica
  CDS (1)..(948)
atgggcgaccatgtggtggtgaatgtggaaggcttgggaaacgatggaggggctgtggagaagccatctgaggccgtgaacagctcagtggtggctgctgcgtcgctttctacgactgttgatacggtcgaggagggcggtggagaggaggagccgctcatccaggcggcggagtgccgtatatgccaggaggaggatagcatcaagaacctcgagaagccttgtgcttgcagtggcagcctcaagtatgctcatagagcttgtgtgcaacgctggtgcaatgagaaaggagacattacatgtgaaatctgtcatgagcaatataagcatggatacacagctccacctcgtgttgaaccagacgataccatcatagatatcggtggtgattgggcacgtgacccaagaattattgctgtagcggctgcacaacgtcgtcttcttgaaactgagtatgatgaatatgctggtactgatgctagtggtgctgcattctgccgttctgctgcacttatactaatggccttgttgctattgaggcatgctttgtctatctcagacaatgaaggagatgatgatgcttctaccatgttctcgctctttctacttcgagctgctggatttctgctgccatgctatatcatggcttggatattcagtattttgcatcgccggcgacaaagacaggaagcggctgcaattgctgcagcagaggtagcattcatcctgcaatcagcccaaggccatgcccttcagttcaccatcgctccagactcccccgccacttcacagcatgagccacagcagcagcagccgcagacgcagccgctagcaatagctagttacttcagtagcgtttctcaactactgactcgcacatgcagaagaagaggatactcagctagtggccgctttgttgttctgttgcaactggcccagggacgctaa

SEQ ID NO: 4654 - protein, 315 aa, Oryza sativa subsp. japonica
MGDHVVVNVEGLGNDGGAVEKPSEAVNSSVVAAASLSTTVDTVEEGGGEEEPLIQAAECRICQEEDSIKNLEKPCACSGSLKYAHRACVQRWCNEKGDITCEICHEQYKHGYTAPPRVEPDDTIIDIGGDWARDPRIIAVAAAQRRLLETEYDEYAGTDASGAAFCRSAALILMALLLLRHALSISDNEGDDDASTMFSLFLLRAAGFLLPCYIMAWIFSILHRRRQRQEAAAIAAAEVAFILQSAQGHALQFTIAPDSPATSQHEPQQQQPQTQPLAIASYFSSVSQLLTRTCRRRGYSASGRFVVLLQLAQGR

SEQ ID NO: 4655 - DNA, 840 bp, Vitis vinifera
  CDS (1)..(840)
atgagtgatcacctggtactgtatgtggaccgtccgataagacctgtgacctcacaatccgtgcaagaggccggggcggaaactgctggtccatctacttctgtcgctgatgataagagggttgaggaaaatgaaggttcaaatgaagaagagccgtttcttaagatgatggaatgccgcatttgccaagaggaagatagccttgagaatctggagacgccttgtgcttgtagcggcagtctaaagtatgctcataggaagtgtgttcaacgatggtgcaatgagaaaggagacataatttgtgagatctgccatcagccttaccaaccgggctacactgctcctcccccaccacctcatcctgaagatactgctattgatattggtggaggctggacaatctctggcactcctttggatttgcgtgatcctcgccttttggcaatggcagaggcagagcggcatttcttggaagctgagtatgatgagtatactgctacaaatgccactggagctgcattttgccgttcagttgctctaattttgatggcccttttgctcttgcgccatgcattgaccattacagatgcagatactgatggagatgatgacacatcaacttttttctctcttttcttgcttcgggctgctgggtttttactgccctgctacattatggcctgggccattagtatcttgcagcgtcgaagacagaggcaggaggctgcagcattggctgcaacacaagttgcttttgtgctgcaatcaggacaacgaaggggtctgcagttcacagttgcaccagcacatgtagtagctccaccccaggagcctgcttaa

SEQ ID NO: 4656 - protein, 279 aa, Vitis vinifera
MSDHLVLYVDRPIRPVTSQSVQEAGAETAGPSTSVADDKRVEENEGSNEEEPFLKMMECRICQEEDSLENLETPCACSGSLKYAHRKCVQRWCNEKGDIICEICHQPYQPGYTAPPPPPHPEDTAIDIGGGWTISGTPLDLRDPRLLAMAEAERHFLEAEYDEYTATNATGAAFCRSVALILMALLLLRHALTITDADTDGDDDTSTFFSLFLLRAAGFLLPCYIMAWAISILQRRRQRQEAAALAATQVAFVLQSGQRRGLQFTVAPAHVVAPPQEPA

SEQ ID NO: 4657 - DNA, 828 bp, Vitis vinifera
  CDS (1)..(828)
atgggtgatcacctggttttgtgtgtggaccgcctgataaaacctcaaactctgcaatcgctgcaaggaactgaagtctcaggatcatctgagggtggggatgagggttcttgcagtcacacagtcgatccgtccacttccgcccttgaagataaggggctggaggaacatcatgggccggaggaagaagaaccactcattcagacggtggaatgccgcatttgtcaagaagaggatagcatcaagaatttggaggtaccttgtgcttgcagtggcagtttgaagtttgctcataggaaatgtgttcaacgatggtgcaatgagaaaggagatgtaacttgcgagatctgtcatcagccttatcaacctggctatactgctccacctcctccacagtctgaggatgctacaattgatatcagcgagggttggacaatctctggtactcccttggatttaaatgatcctcgacttttggcaatggcagcagcagagcgccattttctggaggctgagtatgaagagtatgctgatacaaatgccagtggagctgcattttgccgctctgcggccctaattttaatggctcttctacttctgaggcatgcgctgaacatcaccaatgccgatggggatgatgatgcttccaactttttctcgcttttcctgcttcgagctgctggtttccttctcccttgctacattatggcctgggctatcagtatattgcagcgtcgaagacaaagacagctgcagcagcattggcagcaaccgaagttgcatttatgctgcaggctgggcaacatagaggcttgcagtttacaatag

SEQ ID NO: 4658 - protein, 275 aa, Vitis vinifera
MGDHLVLCVDRLIKPQTLQSLQGTEVSGSSEGGDEGSCSHTVDPSTSALEDKGLEEHHGPEEEEPLIQTVECRICQEEDSIKNLEVPCACSGSLKFAHRKCVQRWCNEKGDVTCEICHQPYQPGYTAPPPPQSEDATIDISEGWTISGTPLDLNDPRLLAMAAAERHFLEAEYEEYADTNASGAAFCRSAALILMALLLLRHALNITNADGDDDASNFFSLFLLRAAGFLLPCYIMAWAISILQRRRQRQLQQHWQQPKLHLCCRLGNIEACSLQ

SEQ ID NO: 4659 - DNA, 861 bp, Zea mays
  CDS (1)..(861)
atggctggtgacgaccatgtggtggttgacgtgaacggcttagcaaaatccaaggatgacgggggttccaagaagctgtctgaggatgcaaatggttcggctccggctgctgcatctttgtcagcagctgttgacttggtccaggaggaggaggaggaggagggtgatggggaggaggagccgctaatccaggccgcggagtgccgcatatgccaggaggaagatagcgtgaagaacctcgagaaaccgtgtgcttgcagcggcagtctcaagtatgctcacagagcttgcgtgcaacgctggtgcaacgagaaaggagacactacttgtgaaatttgtcatgaggaatacaagccaggttacactgcgccacctcgtgttcagccagatgagacaaccatagacattgatggtgatttggttatggatttgcgagacccaaggattcttgctgtagcagctgcccaacatcgtcttcttgaggcagagtatgatggttacgctagtacagatgctagtggtgctgcattctgccgttcagctgcgcttattttaatggcactgttgcttctaaggcatgcattgtctatgtcagacaacgaaggaaacgatgatgacgcttctaccatattctcgctttttctgcttcgagctgctgggtttctgctgccgtgctacatcatggcatggatattcagtattttgcatcgccgtcgacaaagacaggaagaggctgcactggcggctgcagaggtggccttcatcctacagtcggccaggggccgcgccctccagtttgccatcgctccagactcccccgccaccccgcagcatgagccagtgtcgcagcaacagcaatag

SEQ ID NO: 4660 - protein, 286 aa, Zea mays
MAGDDHVVVDVNGLAKSKDDGGSKKLSEDANGSAPAAASLSAAVDLVQEEEEEEGDGEEEPLIQAAECRICQEEDSVKNLEKPCACSGSLKYAHRACVQRWCNEKGDTTCEICHEEYKPGYTAPPRVQPDETTIDIDGDLVMDLRDPRILAVAAAQHRLLEAEYDGYASTDASGAAFCRSAALILMALLLLRHALSMSDNEGNDDDASTIFSLFLLRAAGFLLPCYIMAWIFSILHRRRQRQEEAALAAAEVAFILQSARGRALQFAIAPDSPATPQHEPVSQQQQ

SEQ ID NO: 4661 - DNA, 753 bp, Oryza sativa
  CDS (1)..(753)
atgggggatcatgttgcggtggatgttggggggctcatggcgtcccggggcgccggcgaggaggaaacgggggcgctgattgggatggtggaatgccgcatttgccaggaggaggacctcgccaagaacctcgagagcccctgcgcttgtagcggtagcctcaagtacgctcatagagaatgtgtgcaaagatggtgcaatgagaaaggagacataatctgtgaaatctgccacgtgtcatacaagcctggctatactgccccaccccaggtacatcatgatgagactactatagagatcagtagtggagattggtctatctctggcaatcggttggatttacatgatcctagaatcttggctatggctgccgctcaacaccgtttacttgaagatgagtatgatgaatatactgcaacaaacaacaatgctgctgccttttgccgctccatatttctaattctaatggctcttctactcttaaggcatacactaaccattactagtagtgatgatgaagatgacgcatctgctattttctcgttgtttcttttgagggctgctggatttttgctgccatgctatatcatggcttgggctattagtatcatgcaacgtcaaagacaaagacaggaagaagcaatgcttctaccaactgaagtggcaatcatactccaccgaaatggaaggactatgcaattcgccgtagcgccagaatctcctaccacacctcatccagaacaagggcaatag

SEQ ID NO: 4662 - protein, 250 aa, Oryza sativa
MGDHVAVDVGGLMASRGAGEEETGALIGMVECRICQEEDLAKNLESPCACSGSLKYAHRECVQRWCNEKGDIICEICHVSYKPGYTAPPQVHHDETTIEISSGDWSISGNRLDLHDPRILAMAAAQHRLLEDEYDEYTATNNNAAAFCRSIFLILMALLLLRHTLTITSSDDEDDASAIFSLFLLRAAGFLLPCYIMAWAISIMQRQRQRQEEAMLLPTEVAIILHRNGRTMQFAVAPESPTTPHPEQGQ

SEQ ID NO: 4663 - DNA, 831 bp, Oryza sativa
  CDS (1)..(831)
atgaaggatcatctaatgcttaatgttagcaaccttcccgagtctgttgaggcgaccgaggcagccatgaatctgccttccgggggagtttctctaccaccgttgtctacaactcatacacttttgtcagttcgggaaagcatgggtgctgaggaagagcctcttattcagacagtagaatgtcgtatttgccaagaggaggataacatcagcaaccttgagagtccatgtgcttgcactggaagtctaaagtatgctcatcgggcttgcgtgcagagatggtgcgatgagaaaggagatttgacatgtgaaatttgccatgagccatacaaacacgggtacactgcacttcctagagctcatcctgatgagacaaccattgatataagtggtggttggaccattaccggcacagcatttgatttgcatgatccaaggattattgcaatggcacaaaatcacataatggaagctgactatgatgattattcagtaacaaatgcgagctctgctgccttttgccgctctgctgcgcttattttaatggctctgttagtgttgaggcatgtgttggtactaactgatgaagatgaagacgacgcttcttcaatgtttttgctttttctactacgagtcaccgggtttctgctaccattctacatcatggcttgggcaatcaatatcttacagggccgaaggcggaggcaggtagcggctgctctagctgcaactgaggtggcattcattctacagtcaggacaaagaaggggcatgaatttcaccatcgcaccagattcccctgccacacctcagcatgagcctatcccttga

SEQ ID NO: 4664 - protein, 276 aa, Oryza sativa
MKDHLMLNVSNLPESVEATEAAMNLPSGGVSLPPLSTTHTLLSVRESMGAEEEPLIQTVECRICQEEDNISNLESPCACTGSLKYAHRACVQRWCDEKGDLTCEICHEPYKHGYTALPRAHPDETTIDISGGWTITGTAFDLHDPRIIAMAQNHIMEADYDDYSVTNASSAAFCRSAALILMALLVLRHVLVLTDEDEDDASSMFLLFLLRVTGFLLPFYIMAWAINILQGRRRRQVAAALAATEVAFILQSGQRRGMNFTIAPDSPATPQHEPIP

SEQ ID NO: 4665 - DNA, 834 bp, Oryza sativa
  CDS (1)..(834)
atgaaggatcatctaatggtaaatgttgatgatctaatggcgcctgaatgctttgagaccactggggcagccaagaattcatcaggggaagccgctgcgcaggcacccactacagtgcatacctttttggcagttggagaaagcatggcccctgaagaagaacctcttctgcagttggtggaatgtcgcatttgtcaggaggaagacagtataaaaaatctggagagcccatgtgcctgtactggcagtctaaagtatgctcatcgggcttgtgtgcaacgatggtgcaatgagaaaggagatgtaacgtgtgaaatttgtcatgagccatatgaacacggttacactgcacctactaggcctcatcctgatgaaactaccattgacatcagtggtggctggaccattactggtactgcatttgacttgcgtgatcctaggatccttgcagttgcacagaaccacattatggaagctgaatacgatgattactctgccacaaatgccagcactgctgctttttgtcgctctgctgctctagttttaatggctctgttattattgagacatgcgctgactctaactgatgaagatgacgatgatacttctgcaatgttttcactttttctattgcgtgctgctggatttctgctaccattctatataatggcttgggcagtgagtatcttgcagcgccgcagacagcgacaggaggcggctgccttagcagcaactgaggtggcattcattcttcagtctgggcaaggaaccggagtgcatttcaccattgcaccggattcgccgaccacaccgcagcacgagccacagccttga

SEQ ID NO: 4666 - protein, 277 aa, Oryza sativa
MKDHLMVNVDDLMAPECFETTGAAKNSSGEAAAQAPTTVHTFLAVGESMAPEEEPLLQLVECRICQEEDSIKNLESPCACTGSLKYAHRACVQRWCNEKGDVTCEICHEPYEHGYTAPTRPHPDETTIDISGGWTITGTAFDLRDPRILAVAQNHIMEAEYDDYSATNASTAAFCRSAALVLMALLLLRHALTLTDEDDDDTSAMFSLFLLRAAGFLLPFYIMAWAVSILQRRRQRQEAAALAATEVAFILQSGQGTGVHFTIAPDSPTTPQHEPQP

SEQ ID NO: 4667 - DNA, 837 bp, Oryza sativa
  CDS (1)..(837)
atgggcgaccatgtggtggtgaatgtggaaggcttgggaaacgatggaggggctgtggagaagccatctgaggccgtgaacagctcagtggtggctgctgcgtcgctttctacgactgttgatacggtcgaggagggcggtggagaggaggagccgctcatccaggcggcggagtgccgtatatgccaggaggaggatagcatcaagaacctcgagaagccttgtgcttgcagtggcagcctcaagtatgctcatagagcttgtgtgcaacgctggtgcaatgagaaaggagacattacatgtgaaatctgtcatgagcaatataagcatggatacacagctccacctcgtgttgaaccagacgataccatcatagatatcggtggtgattgggcacgtgacccaagaattattgctgtagcggctgcacaacgtcgtcttcttgaaactgagtatgatgaatatgctggtactgatgctagtggtgctgcattctgccgttctgctgcacttatactaatggccttgttgctattgaggcatgctttgtctatctcagacaatgaaggagatgatgatgcttctaccatgttctcgctctttctacttcgagctgctggatttctgctgccatgctatatcatggcttggatattcagtattttgcatcgccggcgacaaagacaggaagcggctgcaattgctgcagcagaggtggcattcatcctgcaatcagcccaaggccatgcccttcagttcaccatcgctccagactcccccgccactccacagcatgagccacagcagcagcagccgcagccgcagccgcagcaatag

SEQ ID NO: 4668 - protein, 278 aa, Oryza sativa
MGDHVVVNVEGLGNDGGAVEKPSEAVNSSVVAAASLSTTVDTVEEGGGEEEPLIQAAECRICQEEDSIKNLEKPCACSGSLKYAHRACVQRWCNEKGDITCEICHEQYKHGYTAPPRVEPDDTIIDIGGDWARDPRIIAVAAAQRRLLETEYDEYAGTDASGAAFCRSAALILMALLLLRHALSISDNEGDDDASTMFSLFLLRAAGFLLPCYIMAWIFSILHRRRQRQEAAAIAAAEVAFILQSAQGHALQFTIAPDSPATPQHEPQQQQPQPQPQQ

SEQ ID NO: 4669 - DNA, 1444 bp, Zea mays
  CDS (378)..(1217)
ccctccttttaccttctcccattcacgccccgtctctttcgtggccttccttttccggcggccacaagtgggcgagcggcggcgcccttcaccaggtcttcgtcgggcccttcaccggcgacgagcatccaccagaaacgtggagctcagagcattggtgcctctttcctctttcaccaaggattccggtgccttgtttcacaagacaaaaaaagtctcaagggtcttgattcttgtatgaactcaagatttatggtggatcttggagctgtgggatgctaagcctggtctagctactagattatgaactctctgctgatctaatagcatttctacaagaattcttttgctggaaggtttattagttatttgcaacaatgaaggaacatctaatgcttaatattgatgacctaagcattcttgagcctaacgaggtcattgggacagtcaagaataaatcatctggggaaaccattgcacatccaccctccatggctcatgccattttagcagtgggagaaagcatggtttctgaagcggaacctcttctgcaagtggtggagtgtcgcatttgtcaggaggaagatagtatcaaaaatttagagagtccatgtgcttgcactggcagtctaaagtatgctcataggacttgtgtacaacgatggtgcaatgagaaaggagatgtaacatgtgaaatatgtcatgagccttatgaacatgggtacactgcacctcccagaggccatcctgatgaaactaccattgatataagtggtgggtggacaattaccggtaccgcatttgacttgcgtgatcctaggatacttgcagtggcacaaaaccacatcatggaagctgaatatgatgattattctgccacaaatgcgagcactgctgccttctgccgctctgctgctcttgttttaatggctctcttattgttgagacacgcactgactctaactgatgaagatgacgacgacacttcagcgatgttttcactttttctgttgcgtgctgctggtttcctgcttccgttctacatcatggcttgggcaatcagtatcttgcagcgccgcagacagagacaggaggcagctgctctagctgcagcggaggtggcattcatcctgcagtcaggccaaggaaggggagtgcatttcaccatcgcaccggactccccggccacaccacagcatgaaccaccacaaccataattacatctatctaggagtggctgtggccgccgccgatcgattatttccatgggttacccaaggatttatggctgtctagtgcagaagcagataatttctgcccaagtttcctgtcattaatgtacttgcgtgttcgtgcgagttggctagtgcattttgcatgtcgtcccgggactaacgggatgtgtatataatatattttgtaacagagacatctgggttctatg

SEQ ID NO: 4670 - protein, 279 aa, Zea mays
MKEHLMLNIDDLSILEPNEVIGTVKNKSSGETIAHPPSMAHAILAVGESMVSEAEPLLQVVECRICQEEDSIKNLESPCACTGSLKYAHRTCVQRWCNEKGDVTCEICHEPYEHGYTAPPRGHPDETTIDISGGWTITGTAFDLRDPRILAVAQNHIMEAEYDDYSATNASTAAFCRSAALVLMALLLLRHALTLTDEDDDDTSAMFSLFLLRAAGFLLPFYIMAWAISILQRRRQRQEAAALAAAEVAFILQSGQGRGVHFTIAPDSPATPQHEPPQP

SEQ ID NO: 4671 - DNA, 882 bp, Brassica napus
  CDS (1)..(882)
atgtcagatcatctgagttcatgtaccgaccgtcttgttacatctgatcacattaattcagacaatgaatcttctggagaatgttccagagctcaaggcaccacaagcctgtctactactaaacctgaggaagtagaagaagaaagccatgttaatgatgaagaggaaccgcttatccaatcagttgaatgtcgtatttgccaagaggaggattctgttaagaacctcgagtctccatgttcttgtagcggcagcttgaagtatgctcacaggaagtgtgttcagcgttggtgtaatgagaaaggcgacaccatctgtgagatatgccacaagtcttatcaacctggctacacagctccaccacctcctcctcctgatgataccattatcgatatgggtgaagattggggtaatggtgttcccttagacttgaacgacccgcgcattttagcaatggcggctgcagaacgccacttcttcgatgctgactatgatgagtatgctgattctaactctagtggaactgcgtttcttcgctctgctgcacttatcttaatggcacttttgttgttaagacacgctatgaacctttcaaacaacaactcagacgacgaagaagatgatccatcagctttcttctttcttttcatgctacgtgctgctggttttctcctcccgtgttacatcatggcttgggccatcagtatattacaacgccgtagacaaagacaggaagcagcggctctggccgctgcagaagttgcgtttatgttacacagcggtggaggacaacgcagaggaggattgcactatgctgtagcacctgagctggtaccgagtccacaagggcaacaacaccaacctgaagctgcaccgcaatga

SEQ ID NO: 4672 - protein, 293 aa, Brassica napus
MSDHLSSCTDRLVTSDHINSDNESSGECSRAQGTTSLSTTKPEEVEEESHVNDEEEPLIQSVECRICQEEDSVKNLESPCSCSGSLKYAHRKCVQRWCNEKGDTICEICHKSYQPGYTAPPPPPPDDTIIDMGEDWGNGVPLDLNDPRILAMAAAERHFFDADYDEYADSNSSGTAFLRSAALILMALLLLRHAMNLSNNNSDDEEDDPSAFFFLFMLRAAGFLLPCYIMAWAISILQRRRQRQEAAALAAAEVAFMLHSGGGQRRGGLHYAVAPELVPSPQGQQHQPEAAPQ

SEQ ID NO: 4673 - DNA, 897 bp, Brassica napus
  CDS (1)..(897)
atgtcagatcatctgagttcatgtacggaccgtctcgtaacatctgattcggacagaggatccaatgaatcttctggagaaagctctggcaccacaagcctttcttcttctacgactactaaagctattgatgataaaactgtgcaagtagaagaacgtgatgatgtcgctgatgaagaagaggaaccgctcatccaatcagttgaatgtcgtatatgccaagatgaggattctgttaagaacctcgagtctccatgctcttgtagtggcagcttgaagtatgctcatcggaagtgtgttcagcgctggtgtaatgagaaaggcgacactacctgtgaaatatgccacaagtcttatcaacctggctacactgctccaccacctcctcccgctgatgataccgttatcgatatcggtgaagattgggccaatggtgttcccctagactttaacgacccgcgcatttttgcgatggcggctgcagaacgtcgtttctttgatccggactatgacgagtatgctgattctaactctagcggagctgcctttcttcgctccgctgctcttatcttaatggcgcttttattgctacgacacgccatgaacctttcaaacaacaactcagacgacgaagaagatgacccatcagctttcttctttcttttcatgcttcgtgctgccgcttttctcctcccatgttacatcatggcttgggccatcagtatattacagcgccgaagacaaagacaggaagcagccgccctggccgctgcagaagttgcgtttatgctgcacagcggggctggcggagtccaacgcaggggaggcttgcactttgctgtagctcctgagctgatatcgaatccacaacaccaatctgaggctgcaccacaatga

SEQ ID NO: 4674 - protein, 298 aa, Brassica napus
MSDHLSSCTDRLVTSDSDRGSNESSGESSGTTSLSSSTTTKAIDDKTVQVEERDDVADEEEEPLIQSVECRICQDEDSVKNLESPCSCSGSLKYAHRKCVQRWCNEKGDTTCEICHKSYQPGYTAPPPPPADDTVIDIGEDWANGVPLDFNDPRIFAMAAAERRFFDPDYDEYADSNSSGAAFLRSAALILMALLLLRHAMNLSNNNSDDEEDDPSAFFFLFMLRAAAFLLPCYIMAWAISILQRRRQRQEAAALAAAEVAFMLHSGAGGVQRRGGLHFAVAPELISNPQHQSEAAPQ

SEQ ID NO: 4675 - DNA, 828 bp, Triticum aestivum
  CDS (1)..(828)
atgggggaccatgtggtggtgaatgtggacggtttggcgaacaccaaggatgatggcgttgctgagaagccatctgaggctgtgtcggtggctgttgttgatatggcggaggatgatggcgaggatgagccactcatccaggctgcagagtgccgcatatgccaggaagaggacagcatcaagaatctcgagaagccgtgtacgtgcaacggcagtctgaagtatgctcatagagcgtgtgtgcaacgctggtgcaatgagaaaggagacattacatgtgaaatttgccatgagcaatataagcctgggtacacagcaccaccacgtgttcaaccagatgagaccagcatagatataagtggggattggaccattacaggagctcctctggatatgcgcgacccaagaattcttgctgtagcagctgcacagcgccgtcttcttgaagcagagtacgacgaatatggtggtactgatgctaatggtgctgcattctgccgttctgctgcactcattctaatggccctattgcttctaagacatgcattgtcgatctcggacaatgaaggagatgatgacgcttctaccatgttctctctttttcttctccgagctgctggatttctgctgccatgctatataatggcatggatcttcagcattttgcatcgccggcgacaaagggaggaagcggcctcaattgccacggcagaggtagcattcatcctgcaatcagcccagggccgtgcccttcagtttaccatcgctccagactccccaaccaccccacagcatgagccacagcagcagcagcagcaacagcaatag

SEQ ID NO: 4676 - protein, 275 aa, Triticum aestivum
MGDHVVVNVDGLANTKDDGVAEKPSEAVSVAVVDMAEDDGEDEPLIQAAECRICQEEDSIKNLEKPCTCNGSLKYAHRACVQRWCNEKGDITCEICHEQYKPGYTAPPRVQPDETSIDISGDWTITGAPLDMRDPRILAVAAAQRRLLEAEYDEYGGTDANGAAFCRSAALILMALLLLRHALSISDNEGDDDASTMFSLFLLRAAGFLLPCYIMAWIFSILHRRRQREEAASIATAEVAFILQSAQGRALQFTIAPDSPTTPQHEPQQQQQQQQ

SEQ ID NO: 4677 - DNA, 825 bp, Linum usitatissimum
  CDS (1)..(825)
atgagcgatcgcctcgtgaccccgccggcgacggcggatggaaaactggaagtttgcccggcggcggaaaagaccggcgcttttgctggtccgtcgtgttctaggtcggaagaagaattagaaggggagcatgaagaggatgagccgttgattcaaggtggggaatgccgaatttgtcaagaggaggattcgattcacaatttggaatctccgtgtggatgcagcggcagcctcaagtatgctcataggaaatgtgtacaacattggtacaatgagaaaggagacatcacttgtgagatttgtcataagccttatcaaccagggtatacagctccaccttgtccccctcgccccgaagacactgttatcgacatcggaggaggatggacgatctcggggacacctatagatctacgagaccctcgtttccttgcaatcgcagaggcagaacgcgatttcctcgaaactgagtacgacgagtacgctgcttcgaacgcgagcggagctgcattctgccgctctgctgcgctaatcctgatggcacttctcctattacgacacgcattgactgttagcgaagctgatgatgatgatgatgtttctaccttcttccctcttttcttactacgagcggcgggtttcctactgccgtgttacatcatggcttgggctgttagcatcttgcaaagaagaaggcagcgacaagaagctgcagcgttagcagttacacaggttgcgttcgtgctgcaaccgggacagcgtcgaggtgtgcatttcacgatagcgtctggaccaccggtagctgcgcatcaagaacccgtttaa

SEQ ID NO: 4678 - protein, 274 aa, Linum usitatissimum
MSDRLVTPPATADGKLEVCPAAEKTGAFAGPSCSRSEEELEGEHEEDEPLIQGGECRICQEEDSIHNLESPCGCSGSLKYAHRKCVQHWYNEKGDITCEICHKPYQPGYTAPPCPPRPEDTVIDIGGGWTISGTPIDLRDPRFLAIAEAERDFLETEYDEYAASNASGAAFCRSAALILMALLLLRHALTVSEADDDDDVSTFFPLFLLRAAGFLLPCYIMAWAVSILQRRRQRQEAAALAVTQVAFVLQPGQRRGVHFTIASGPPVAAHQEPV

SEQ ID NO: 4679 - DNA, 861 bp, Brassica napus
  CDS (1)..(861)
atgtcggatcatttgagtttatgtaccgatcgtctgataacggccgagagcttggaatcagaaaaggattctggagaaagttccaggcctcaaggcaaagatgtggcttcttcttcatctgcggatgaagctgaagatgctaggaagtactatgctgttgttgcagaagaggaaccgcttctccaatctgttgagtgccgtatttgccaggaggaagatatcactaagaacttggagactccttgtgcttgcaatggcagtttgaagtatgctcaccgcaagtgtgttcagcgttggtgtaatgagaaaggcgacataatctgcgaaatatgccaccagccttatcaatctggatatacagcacctccacctcctcctcctgatgaaactataattcacattggtgacgactgggagaatggagttcacttggacttgagcgacccgcgcattctagcaatggctgcagcagaacgccatttcctggaagctgactatgacgagtactctgagtctaactctagcggagctgccttctgtcgctctgctgctctcatcctgatggcacttttactgttacgagatgcactaaacctcacaactaacccagatgacgaggacgaccccactgccttcttctctcttttccttcttcgtgctgctggttttctcctcccatgttacatcatggcatgggccatcggtattctccagcgccggaggcaaagacaggaagcagctgcgctagctgcggcggaagttgccttcatgatacacggtggtgtgcctcaacgcaggggactacactttgctgtagcaccagagcagccgccgccaatatccaacccaacaccagtctga

SEQ ID NO: 4680 - protein, 286 aa, Brassica napus
MSDHLSLCTDRLITAESLESEKDSGESSRPQGKDVASSSSADEAEDARKYYAVVAEEEPLLQSVECRICQEEDITKNLETPCACNGSLKYAHRKCVQRWCNEKGDIICEICHQPYQSGYTAPPPPPPDETIIHIGDDWENGVHLDLSDPRILAMAAAERHFLEADYDEYSESNSSGAAFCRSAALILMALLLLRDALNLTTNPDDEDDPTAFFSLFLLRAAGFLLPCYIMAWAIGILQRRRQRQEAAALAAAEVAFMIHGGVPQRRGLHFAVAPEQPPPISNPTPV

SEQ ID NO: 4681 - DNA, 798 bp, Brassica napus
  CDS (1)..(798)
atgggagatcatttcgtgctgtttatggaccggttgataacagaagccacgattgaggaagcgattcagagcaggaaccgtatgttgcaagccaacgcacctgtcgaggaggaatgtattagagtcctcgatgagaaaacacttgagaaggtgcgtaacggagatttgtcgatggtgctgtgtaggatttgtcacgatgaggatgtggattcaaagatggagactccttgttcttgcagcggcagcttgaagtatgcacataggaggtgcgtgcagagatggtgtaacgagaaaggaaacaccaactgcgagatttgccatcagggattcaagccggattatacagcgccagctccattgttagagttgggtcatgtccctcttcatttcaggggaaactgggcaatatctcaacgtgagcatcctcgtttcatcacagttgtacctgctgatcccactttcatccacgatcatcatcatcagtatcctctttcttccaccacaagcttcatctgtttccgttctcttgttctcatctttatggctcttctgattctccgacacacccttcccttagtccttaccggatcaaacctccatgtcttccctttgttcatgttgttgtttttgagaatactcgggatcatgctacccatctatgttgtcaccaaagcagtcgccacctgccgtcgccattctcagaactttgaaacctctgactctgaagattcatttgatgaagaagcagagttgtggcgcttgcctcacacgcaatcttacattataggcgtgccatga

SEQ ID NO: 4682 - protein, 265 aa, Brassica napus
MGDHFVLFMDRLITEATIEEAIQSRNRMLQANAPVEEECIRVLDEKTLEKVRNGDLSMVLCRICHDEDVDSKMETPCSCSGSLKYAHRRCVQRWCNEKGNTNCEICHQGFKPDYTAPAPLLELGHVPLHFRGNWAISQREHPRFITVVPADPTFIHDHHHQYPLSSTTSFICFRSLVLIFMALLILRHTLPLVLTGSNLHVFPLFMLLFLRILGIMLPIYVVTKAVATCRRHSQNFETSDSEDSFDEEAELWRLPHTQSYIIGVP

SEQ ID NO: 4683 - DNA, 816 bp, Glycine max
  CDS (1)..(816)
atgggggatcactttgagttgctggttgatcgattgcttactgagtccacattagaagctgcacttgaaagcagaaataggtcaatactggctgcatcctctgcggggaatgatgcaaaaattgatctcaatttgatgaagatgggtgtggatgatatcaaatttccagggaaggtagtagaatgcaggatatgtcatgatgatgatcaagattccaatatggagacaccctgctcttgtcgtggtagtttgctcctcgcccaccatttctgtatacaacgatggtgtaatgagaagggagacaccacctgtgagatatgccaccagcaattcaagcctggttatactgctcctccaccactatttcagtttggacgtattccaatgagttttaggggaaattgggagatttcaagaagagacttgaatagtactcatttggttagcatggtccccactgatcagaaccttaccacttctaactatgatcagtattcagcctctgctactggaagtttgatttgctgtcgttcaattgctgtcattttcatggttcttctgattttaagacatacacttccccttgtaatcagtggaaataaggagtattctttcccactctttttgctgaggttatttcggattgcgggagttgttcttcctatatacttcatggttagagcagtggcattaatccagcggcatcggagacaacatcgagagcatcttaatgcctcggccagttcgtctgacgatgaaagcgagcaagcagatttgcagcctcagcctcagcctcatgtcatacgtgtactgtaa

SEQ ID NO: 4684 - protein, 271 aa, Glycine max
MGDHFELLVDRLLTESTLEAALESRNRSILAASSAGNDAKIDLNLMKMGVDDIKFPGKVVECRICHDDDQDSNMETPCSCRGSLLLAHHFCIQRWCNEKGDTTCEICHQQFKPGYTAPPPLFQFGRIPMSFRGNWEISRRDLNSTHLVSMVPTDQNLTTSNYDQYSASATGSLICCRSIAVIFMVLLILRHTLPLVISGNKEYSFPLFLLRLFRIAGVVLPIYFMVRAVALIQRHRRQHREHLNASASSSDDESEQADLQPQPQPHVIRVL

SEQ ID NO: 4685 - DNA, 861 bp, Glycine max
  CDS (1)..(861)
atgagcgatcatctggtgctgttcgtggaccggctggtgcgacccgtgccgatggtccagccgctggcccaacagccccccgagcccgcgacgcccgttgatgaggcggcggcggggccatccgggtcgtctccggcggcggaggaagacggtgacgacggcggagaggacgcgccgctgctgcagctggcggagtgtcgcatttgccaagaggaggacagcgtcagcggtttggagacaccctgctcctgcagcggtagtcttaagtatgctcatagaaagtgcgttcagcgttggtgcaatgagaaaggagacataacttgtgagatatgtcacaagtcctatgaacctggttatactgccccaccacctcgtcctcagcctgaagaaactacccttgatataggtggaggctggacaatctctggcacgccattggacttgcgtgatccccgactcttagcaattgcagaggctgaacgtcaattcttggaagctgaatacgatggatatgctgcttctcatgctagtggagctgcattttgtcgttcagttgctttgattttaatggcccttttactcttgaggcatgcactttctgtcacagattctgacgctgaagatgatccatccacttttttctctcttttcttgcttcgtgctgctggttttcttttaccttgctatatcatggcttgggcaatcagtattttgcaacgccggcgacaaagacaagaggcggcagcactagcggcaacccaagttgctttcgttctacaatccgggcagcgtaggggtctgcagtttgcaatagcaccaggaccaccagcaatgaatacacaccagcaggaacaagtgtaa

SEQ ID NO: 4686 - protein, 286 aa, Glycine max
MSDHLVLFVDRLVRPVPMVQPLAQQPPEPATPVDEAAAGPSGSSPAAEEDGDDGGEDAPLLQLAECRICQEEDSVSGLETPCSCSGSLKYAHRKCVQRWCNEKGDITCEICHKSYEPGYTAPPPRPQPEETTLDIGGGWTISGTPLDLRDPRLLAIAEAERQFLEAEYDGYAASHASGAAFCRSVALILMALLLLRHALSVTDSDAEDDPSTFFSLFLLRAAGFLLPCYIMAWAISILQRRRQRQEAAALAATQVAFVLQSGQRRGLQFAIAPGPPAMNTHQQEQV

SEQ ID NO: 4687 - DNA, 816 bp, Glycine max
  CDS (1)..(816)
atgggggatcactttgagttgctggttgatcgattgcttactgagtccacattagaagctgcacttgaaagcagaaataggtcaatactggctgcatcctctgcggggaatgatgcaaaaattgatctcaatttgatgaagatgggtgtggatgatatcaaatttccagggaaggtagtagaatgcaggatatgtcatgatgatgatcaagattccaatatggagacaccctgctcttgtcgtggtagtttgctcctcgcccaccatttctgtatacaccgatggtgtaatgagaagggagacaccacctgtgagatatgccaccagcaattcaagcctggttatactgctcctccaccactatttcagtttggacgtattccaatgagttttaggggaaattgggagatttcaagaagagacttgaatagtactcatttggttagcatggtccccactgatcagaaccttaccacttctaactatgatcagtattcagcctctgctactggaagtttgatttgctgtcgttcaattgctggcattttcatggttcttctgattttaagacatacacttccccttgtaatcagtggaaataaggagtattctttcccactctttttgctgaggttatttcggattgcgggagttgttcttcctatatacttcatggttagagcagtggcattaatccagcggcatcggagacaacatcgagagcatcttaatgcctcggccagttcgtctgacgatgaaagcgagcaagcagatttgcagcctcagcctcagcctcatgtcatacgtgtactgtaa

SEQ ID NO: 4688 - protein, 271 aa, Glycine max
MGDHFELLVDRLLTESTLEAALESRNRSILAASSAGNDAKIDLNLMKMGVDDIKFPGKVVECRICHDDDQDSNMETPCSCRGSLLLAHHFCIHRWCNEKGDTTCEICHQQFKPGYTAPPPLFQFGRIPMSFRGNWEISRRDLNSTHLVSMVPTDQNLTTSNYDQYSASATGSLICCRSIAGIFMVLLILRHTLPLVISGNKEYSFPLFLLRLFRIAGVVLPIYFMVRAVALIQRHRRQHREHLNASASSSDDESEQADLQPQPQPHVIRVL

SEQ ID NO: 4689 - DNA, 837 bp, Hordeum vulgare
  CDS (1)..(837)
atggtgaaggatcatctaatgctcaatgttgatcgcctaatggtgcctgaacccattgaggtcactggagcacccaagagctcctcatcgagggacaccactgcactgcccattacagggcattccttttttgcagttggagacagcatggttcctgaagaagaacctcttctgcagatgacggagtgccgtatttgtcaggaggaagatgacattaagaatctagagagcccctgtgcttgcaccggcagtgtaaagtatgcgcatagggcttgggtacaaagatggtgcaatgagaaaggagatgtgacatgtgaaatctgccatgagccgtatgaacatgggtacactgcacctcccagaccccatcctgatgaaactaccatcgatataagtggtggctggaccattactggcacagcatttgacttgcgtgatcctaggatcctggcagtagcacaaaaccacattatggaagctgaatatgatgactattcagccacgaatgccagcactgctgccttttgccgttctgctgctcttgttttaatggctctcctattactaaggcatgcattgacactaactgatgaagatgatgatgacacttcagcaatgttttcacttttcttactgcgtgctgctggttttcttctcccattctatataatggcttgggcaattagtatattgcagcgtcgcagacatcggcaggaggcagctgcgttggcagcaactgaggtggcattcatcctccagtctgggcaagggagaggagtgcatttcaccatagcaccagattctcctgccacgccccagcacgaaccgcaaccttga

SEQ ID NO: 4690 - protein, 278 aa, Hordeum vulgare
MVKDHLMLNVDRLMVPEPIEVTGAPKSSSSRDTTALPITGHSFFAVGDSMVPEEEPLLQMTECRICQEEDDIKNLESPCACTGSVKYAHRAWVQRWCNEKGDVTCEICHEPYEHGYTAPPRPHPDETTIDISGGWTITGTAFDLRDPRILAVAQNHIMEAEYDDYSATNASTAAFCRSAALVLMALLLLRHALTLTDEDDDDTSAMFSLFLLRAAGFLLPFYIMAWAISILQRRRHRQEAAALAATEVAFILQSGQGRGVHFTIAPDSPATPQHEPQP

SEQ ID NO: 4691 - DNA, 753 bp, Oryza sativa
  CDS (1)..(753)
atgggggatcatgttgcggtggatgttggggggctcatggcgtcccggggcgccggcgaggaggaaacgggggcgctgattgggatggtggaatgccgcatttgccaggaggaggacctcgccatgaacctcgagagcccctgcgcttgtagcggtagcctcaagtacgctcatagagaatgtgtgcaaagatggtgcaatgagaaaggagacataatctgtgaaatctgccacgtgtcatacaagcctggctatactgccccaccccaggtacatcatgatgagactactatagagatcagtagtggagattggtctatctctggcaatcggttggatttacatgatcctagaatcttggctatggctgccgctcaacaccgtttacttgaagatgagtatgatgaatatactgcaacaaacaacaatgctgctgccttttgccgctccatatttctaattctaatggctcttctactcttaaggcatacactaaccattactagtagtgatgatgaagatgacgcatctgctattttctcgttgtttcttttgagggctgctggatttttgctgccatgctatatcatggcttgggctattagtatcatgcaacgtcaaagacaaagacaggaagaagcaatgcttctaccaactgaagtggcaatcatactccaccgaaatggaaggactatgcaattcgccgtagcgccagaatctcctaccacacctcatccagaacaagggcaatag

SEQ ID NO: 4692 - protein, 250 aa, Oryza sativa
MGDHVAVDVGGLMASRGAGEEETGALIGMVECRICQEEDLAMNLESPCACSGSLKYAHRECVQRWCNEKGDIICEICHVSYKPGYTAPPQVHHDETTIEISSGDWSISGNRLDLHDPRILAMAAAQHRLLEDEYDEYTATNNNAAAFCRSIFLILMALLLLRHTLTITSSDDEDDASAIFSLFLLRAAGFLLPCYIMAWAISIMQRQRQRQEEAMLLPTEVAIILHRNGRTMQFAVAPESPTTPHPEQGQ

SEQ ID NO: 4693 - DNA, 780 bp, Zea mays
  CDS (1)..(780)
atgggggatcatgtcgcggtggatgttggggagctcgtagcgtcccgagtcggtgaggcagcggggctagtgtccggcgccaaggaggaaacagaggcgctgattgggatggtggagtgccgcatttgccaggaggaggacctcaggaagaacctcgagagcccctgcgcttgcaacggcagcctcaagtatgctcacagagaatgtgtgcaacgatggtgcaatgagaaaggagatacaatctgtgaaatctgccatgagtcgtacaagcctggttacactgccccaacccaggtgcatcatgatgaaactaccatagagataagtggtggagattggaccatctctggcaaccgtttggatttacatgatcccagaatattggcaatggctgctgctcaacaccgtctacttgaagacgactatgatgaatatactgcaacaaacaacaacgctgctgcattttgccgctctatatttctgattttgatggcccttttgctcctgaggcatacactgaccattactaacagtgatgatgaagatgatgcatctgctattttctcgctatttcttttgagagcagctggatttttgctgccatgctatattatggcttgggctattagtatcatgcagcgtcaaagacaaaggcaggaagaagcaatgctattaccaacggaagtggcgatcattctgcatcggaacggaagaacaatgcaatttgcggtggcaccaccggaatctcctatctcacctcaccccgagctaaaccaatag

SEQ ID NO: 4694 - protein, 259 aa, Zea mays
MGDHVAVDVGELVASRVGEAAGLVSGAKEETEALIGMVECRICQEEDLRKNLESPCACNGSLKYAHRECVQRWCNEKGDTICEICHESYKPGYTAPTQVHHDETTIEISGGDWTISGNRLDLHDPRILAMAAAQHRLLEDDYDEYTATNNNAAAFCRSIFLILMALLLLRHTLTITNSDDEDDASAIFSLFLLRAAGFLLPCYIMAWAISIMQRQRQRQEEAMLLPTEVAIILHRNGRTMQFAVAPPESPISPHPELNQ

SEQ ID NO: 4695 - DNA, 861 bp, Zea mays
  CDS (1)..(861)
atggctggtgacgaccatgtggtggttgacgtgaacggcttagcaaaatccaaggatgacgggggttccaagaagctgtctgaggatgcaaatggttcggctccggctgctgcatctttgtcagcagctgttgacttggtccaggaggaggaggaggaggagggtgatggggaggaggagccgctaatccaggccgcggagtgccgcatatgccaggaggaagatagcgtgaagaacctcgagaaaccgtgtgcttgcagcggcagtctcaagtatgctcacagagcttgcgtgcaacgctggtgcaacgagaaaggagacactacttgtgaaatttgtcatgaggaatacaagccaggttacactgcgccacctcgtgttcagccagatgagacaaccatagacattgatggtgatttggttatggatttgcgagacccaaggattcttgctgtagcagctgcccaacatcgtcttcttgaggcagagtatgatggttacgctagtacagatgctagtggtgctgcattctgccgttcagctgcgcttattttaatgggactgttgcttctaaggcatgcattgtctatgtcagacaacgaaaggaacgatgatgacgcttctaccatattctcgctttttctgcttcgagctgctgggtttctgctgccgtgctacatcatggcatggatattcagtattttgcatcgccgtcgacaaagacaggaagaggctgcactggcggctgcagaggtggccttcatcctacagtcggccaggggccgcgccctccagtttgccatcgctccagactcccccgccaccccgcagcatgagccagtgtcgcagcaacagcaatag

SEQ ID NO: 4696 - protein, 286 aa, Zea mays
MAGDDHVVVDVNGLAKSKDDGGSKKLSEDANGSAPAAASLSAAVDLVQEEEEEEGDGEEEPLIQAAECRICQEEDSVKNLEKPCACSGSLKYAHRACVQRWCNEKGDTTCEICHEEYKPGYTAPPRVQPDETTIDIDGDLVMDLRDPRILAVAAAQHRLLEAEYDGYASTDASGAAFCRSAALILMGLLLLRHALSMSDNERNDDDASTIFSLFLLRAAGFLLPCYIMAWIFSILHRRRQRQEEAALAAAEVAFILQSARGRALQFAIAPDSPATPQHEPVSQQQQ

SEQ ID NO: 4697 - DNA, 20 bp, Artificial sequence
  primer
atggctgatgatcagagttc

SEQ ID NO: 4698 - DNA, 20 bp, Artificial sequence
  primer
tcactgcggtgaagcttcag

SEQ ID NO: 4699 - protein, 279 aa, Artificial sequence
  consensus sequence
  Variant (2)..(2): Xaa in position 2 is any amino acid
  Variant (3)..(4): Xaa in position 3 to 4 is any or no amino acid
  Variant (7)..(13): Xaa in position 7 to 13 is any amino acid
  Variant (14)..(14): Xaa in position 14 is any or no amino acid
  Variant (16)..(24): Xaa in position 16 to 24 is any amino acid
  Variant (25)..(71): Xaa in position 25 to 71 is any or no amino acid
  Variant (73)..(74): Xaa in position 73 to 74 is any amino acid
  Variant (75)..(75): Xaa in position 75 is any or no amino acid
  Variant (77)..(78): Xaa in position 77 to 78 is any amino acid
  Variant (79)..(80): Xaa in position 79 to 80 is any or no amino acid
  Variant (90)..(92): Xaa in position 90 to 92 is any amino acid
  Variant (96)..(96): Xaa in position 96 is any amino acid
  Variant (99)..(99): Xaa in position 99 is any amino acid
  Variant (101)..(101): Xaa in position 101 is any amino acid
  Variant (110)..(110): Xaa in position 110 is any amino acid
  Variant (114)..(114): Xaa in position 114 is any amino acid
  Variant (117)..(117): Xaa in position 117 is any amino acid
  Variant (122)..(123): Xaa in position 122 to 123 is any amino acid
  Variant (129)..(129): Xaa in position 129 is any amino acid
  Variant (130)..(130): Xaa in position 130 is any or no amino acid
  Variant (132)..(133): Xaa in position 132 to 133 is any amino acid
  Variant (139)..(145): Xaa in position 139 to 145 is any amino acid
  Variant (146)..(146): Xaa in position 146 is any or no amino acid
  Variant (148)..(148): Xaa in position 148 is any amino acid
  Variant (150)..(150): Xaa in position 150 is any amino acid
  Variant (152)..(154): Xaa in position 152 to 154 is any amino acid
  Variant (155)..(155): Xaa in position 155 is any or no amino acid
  Variant (157)..(159): Xaa in position 157 to 159 is any amino acid
  Variant (160)..(163): Xaa in position 160 to 163 is any or no amino acid
  Variant (166)..(166): Xaa in position 166 is any amino acid
  Variant (170)..(170): Xaa in position 170 is any amino acid
  Variant (173)..(173): Xaa in position 173 is any amino acid
  Variant (175)..(182): Xaa in position 175 to 182 is any amino acid
  Variant (183)..(184): Xaa in position 183 to 184 is any or no amino acid
  Variant (187)..(187): Xaa in position 187 is any amino acid
  Variant (189)..(195): Xaa in position 189 to 195 is any amino acid
  Variant (202)..(203): Xaa in position 202 to 203 is any amino acid
  Variant (215)..(215): Xaa in position 215 is any amino acid
  Variant (217)..(223): Xaa in position 217 to 223 is any amino acid
  Variant (224)..(227): Xaa in position 224 to 227 is any or no amino acid
  Variant (230)..(233): Xaa in position 230 to 233 is any amino acid
  Variant (235)..(235): Xaa in position 235 is any amino acid
  Variant (248)..(248): Xaa in position 248 is any amino acid
  Variant (255)..(256): Xaa in position 255 to 256 is any amino acid
  Variant (258)..(258): Xaa in position 258 is any amino acid
  Variant (261)..(261): Xaa in position 261 is any amino acid
  Variant (267)..(270): Xaa in position 267 to 270 is any amino acid
  Variant (271)..(274): Xaa in position 271 to 274 is any or no amino acid
  Variant (277)..(277): Xaa in position 277 is any amino acid
  Variant (278)..(278): Xaa in position 278 is any or no amino acid
MXXXDHXXXXXXXXLXXXXXXXXXXXXXXXXXXXXXXXXXXXXXXXXXXXXXXXXXXXXXXXXXXXXXXXXEXXXLXXXXECRICQEEDXXXNLEXPCXCXGSLKYAHRXCVQXWCXEKGDXXCEICHXXYXXGYTAPXXXXXXXXTXIXIXXXXWXXXXXXXDLXDPRXLAXAXXXXXXXXXXYDXYXXXXXXXAAFCRSXXLILMALLLLRHXLXXXXXXXXXXXDDXXXXFXLFLLRAAGFLLPXYIMAWAXXIXQRXRQRQEXXXXXXXXVAXXL

SEQ ID NO: 4700 - protein, 29 aa, Artificial sequence
  protein pattern
  Variant (2)..(4): Xaa in position 2 to 4 is any amino acid
  Variant (7)..(7): Xaa in position 7 is Asp or Asn
  Variant (12)..(13): Xaa in position 12 to 13 is any amino acid
  Variant (19)..(20): Xaa in position 19 to 20 is any amino acid
  Variant (21)..(21): Xaa in position 21 is Phe or Tyr
  Variant (22)..(23): Xaa in position 22 to 23 is any amino acid
  Variant (28)..(28): Xaa in position 28 is any or no amino acid
CXXXWCXEKGDXXCEICHXXXXXGYTAXP

SEQ ID NO: 4701 - protein, 39 aa, Artificial sequence
  protein pattern
  Variant (3)..(3): Xaa in position 3 is Ala, Pro, Thr or Val
  Variant (4)..(4): Xaa in position 4 is Ser or Thr
  Variant (5)..(5): Xaa in position 5 is Ala, Asn, Ser or Thr
  Variant (6)..(6): Xaa in position 6 is Phe, Ile or Met
  Variant (8)..(8): Xaa in position 8 is any amino acid
  Variant (11)..(11): Xaa in position 11 is any or no amino acid
  Variant (13)..(13): Xaa in position 13 is any or no amino acid
  Variant (17)..(17): Xaa in position 17 is Ala or Gly
  Variant (22)..(22): Xaa in position 22 is any amino acid
  Variant (28)..(28): Xaa in position 28 is Ala or Ile
  Variant (29)..(29): Xaa in position 29 is Phe, Ile or Val
  Variant (30)..(30): Xaa in position 30 is Gly or Ser
  Variant (32)..(32): Xaa in position 32 is Leu or Met
  Variant (33)..(33): Xaa in position 33 is any amino acid
  Variant (35)..(35): Xaa in position 35 is any amino acid
  Variant (37)..(37): Xaa in position 37 is any amino acid
  Variant (39)..(39): Xaa in position 39 is Glu or Gln
DDXXXXFXLFXLXRAAXFLLPXYIMAWXXXIXXRXRXRX

SEQ ID NO: 4702 - protein, 34 aa, Artificial sequence
  protein pattern
  Variant (2)..(3): Xaa in position 2 to 3 is any amino acid
  Variant (4)..(4): Xaa in position 4 is any or no amino acid
  Variant (6)..(6): Xaa in position 6 is Ile or Leu
  Variant (7)..(7): Xaa in position 7 is Gly or Gln
  Variant (8)..(8): Xaa in position 8 is any amino acid
  Variant (9)..(9): Xaa in position 9 is Ala, Gly, Thr or Val
  Variant (19)..(21): Xaa in position 19 to 21 is any amino acid
  Variant (22)..(22): Xaa in position 22 is Asp, Gly or Asn
  Variant (25)..(25): Xaa in position 25 is any amino acid
  Variant (28)..(28): Xaa in position 28 is Ala, Gly, Ser or Thr
  Variant (30)..(30): Xaa in position 30 is Asn, Ser or Thr
  Variant (33)..(33): Xaa in position 33 is Leu or Val
EXXXLXXXXECRICQEEDXXXXLEXPCXCXGSXK

SEQ ID NO: 4703 - protein, 15 aa, Artificial sequence
  protein pattern
  Variant (3)..(3): Xaa in position 3 is Ala, Ile or Val
  Variant (4)..(4): Xaa in position 4 is any amino acid
  Variant (6)..(6): Xaa in position 6 is Ile or Val
  Variant (15)..(15): Xaa in position 15 is Asp or His
RSXXLXLMALLLLRX

SEQ ID NO: 4704 - protein, 16 aa, Artificial sequence
  protein pattern
  Variant (2)..(2): Xaa in position 2 is any amino acid
  Variant (4)..(4): Xaa in position 4 is Glu or Gln
  Variant (5)..(6): Xaa in position 5 to 6 is any amino acid
  Variant (7)..(7): Xaa in position 7 is Phe, Ile or Leu
  Variant (8)..(8): Xaa in position 8 is Phe, Leu or Met
  Variant (9)..(9): Xaa in position 9 is Asp or Glu
  Variant (10)..(10): Xaa in position 10 is Ala, Asp or Thr
  Variant (11)..(11): Xaa in position 11 is Asp or Glu
  Variant (14)..(14): Xaa in position 14 is Asp, Glu or Gly
  Variant (16)..(16): Xaa in position 16 is Ala, Gly, Ser or Thr
AXAXXXXXXXXYDXYX

SEQ ID NO: 4705 - DNA, 1347 bp, Saccharomyces cerevisiae
  CDS (1)..(1347)
atggtgatgtcaagaatacgagatacaatagccaggccattccagaaccttacagcccttgagaaagtggtacagtggctaagattagggacgacattactcataatctctttcgggttggcgttgactgtcggacccctttcttcgccaagaacattgtacatgtcacgactggatacttactctgctgatattacgacgggtttatttaccgtgttgagagagtctatggagcagtcgacatctacagaagaaaataacggtgtaggcttaacaacatccgaactgtatatattgactgcttacaccgaaagtcagataaagaatgttcctcagtacatcacagtgtcgctttatgggaggtgcgattcaacatataccatggtggaagtattcgactctgaaggaaatatgcatagcgtaaagaattcgactactaagagtacctgcagtagcataggaacggactatctttttgattatcgtgaggttttagaaagcttgggtttagatatcattttagattatgcatacaacaaaatcggttcacaacaggcagaaagttctgcatacacgacctacatgaggagtttaaaacataaaaaggccaacgtgttacatttactctatgcagttattagtttccaggtgtgtatgttatttttcatgatatggtactactacataaagggaaggtttatgaacgccctcaaagaaagggcacttgttcatatcaactctctactatcgctagttgttttcattgggggcctgataagtagcataagccttgcctgggttaactacactattcagtctagaattaatacagaattagaggccttcgggttttcttaccatcttggagttacatggtttgcgcttctgtggtgttttgcaggtttgatttctgtgtcatgcttagcttggtctggcttagaatggtgtatttccgataatggcacgtcctatggaggtggaatcgatgataaattcttaggctaccaagccggtgtatttactgacgcagatctagacgatgaaacttcttacagtcaacgttatccgcaacgacagtctacttcgggcgaggctgaactgatgagaaacagtgatactatggcaacaataagaaaaacatctgatgttgacttaaatagtgaaaatgatgctaacaccagtttagaccatggaaatcccaccgcaaatataagcaatggcggcaaacacgaaccatttgctactagagaggaattcgaattgcaggacataagattccggtcaagcaacgacagtgaagaaagtatgcaaagggttatcaagccttcgtcagcattacagttttga

SEQ ID NO: 4706 - protein, 448 aa, Saccharomyces cerevisiae
MVMSRIRDTIARPFQNLTALEKVVQWLRLGTTLLIISFGLALTVGPLSSPRTLYMSRLDTYSADITTGLFTVLRESMEQSTSTEENNGVGLTTSELYILTAYTESQIKNVPQYITVSLYGRCDSTYTMVEVFDSEGNMHSVKNSTTKSTCSSIGTDYLFDYREVLESLGLDIILDYAYNKIGSQQAESSAYTTYMRSLKHKKANVLHLLYAVISFQVCMLFFMIWYYYIKGRFMNALKERALVHINSLLSLVVFIGGLISSISLAWVNYTIQSRINTELEAFGFSYHLGVTWFALLWCFAGLISVSCLAWSGLEWCISDNGTSYGGGIDDKFLGYQAGVFTDADLDDETSYSQRYPQRQSTSGEAELMRNSDTMATIRKTSDVDLNSENDANTSLDHGNPTANISNGGKHEPFATREEFELQDIRFRSSNDSEESMQRVIKPSSALQF

SEQ ID NO: 4707 - DNA, 1314 bp, Candida glabrata CBS 138
  CDS (1)..(1314)
atgctgcatgttgcgaggctgcttatgcggcccttcactaacttgaactctttggagattcttgtgcagtggctgcgactgatatcgtccggcatggttatcctgctgagcgggctggtgtgtctggcaccgttcactttccctaagagcatgtacatgtcgaagctagatgccttctctgctgatatcacccaaggtttgttcgatgtgctgagacttaacatggaaactgcaagtttgaccagtatcaataacggtgtcgggttaactacctcagaactggtgatcctaacagaatatacagcacaacaggtgcgtagctcaccccaatacattgtcgtgtccctgtatggtcgttgtgattgcaccttcaccactgaacagatgatggactccaaaggtaggctatatcaagtgcagaactccacaactatgtgtgattgtatagatactggctctgactacatctttgattaccgtgaagtgctgtcaaacttaggtcttgggatcattctagattacgcttactcaaaggatggatcgcgaatggggttgtccaccagttactcgaaatacatcaactcgctcagatcgaggaaagttacagtgactaacttgctctatgctatctttgtcatagagctggtcaagttttgcgtcactttttggtactattacatcaagggaagatttctgaatatcttcctggaacaatttttagttcacactttatctatatttagcttgactgtcttcatatgtggtctaacaagtgttattagcctggcatggttgaattacacagttcaagcaagaatcaaaagtgagctacaaagttttggtttctcttaccatctaggtgcatcatggttcacatgtttatggatgctggcattctttgtgagtttatcgtgctttgtgtggtcaggcttggagtggtgtatcgctgagaattacgatcctaggaccagcgatctgaaggatggatttttggatagagcagaagagtcgcagtatgaaaatccttttgatgacgagaatgttatcacaggtgaggactcaaattctgcatcgagcagatctggaggtaagttgtctagtagtcatactgaagacacgggtatccatggaagtacatcttacaacaacatgaccagattggatagcagccgaataattaaaaacttcaagaataagcagttcgatgatacagaggaacagtttgaattgcagagtatcactttacggtcgagcactgatagtgattcaagtatacaaagagttattcaaccgtcctctactatgcatttctga

SEQ ID NO: 4708 - protein, 437 aa, Candida glabrata CBS 138
MLHVARLLMRPFTNLNSLEILVQWLRLISSGMVILLSGLVCLAPFTFPKSMYMSKLDAFSADITQGLFDVLRLNMETASLTSINNGVGLTTSELVILTEYTAQQVRSSPQYIVVSLYGRCDCTFTTEQMMDSKGRLYQVQNSTTMCDCIDTGSDYIFDYREVLSNLGLGIILDYAYSKDGSRMGLSTSYSKYINSLRSRKVTVTNLLYAIFVIELVKFCVTFWYYYIKGRFLNIFLEQFLVHTLSIFSLTVFICGLTSVISLAWLNYTVQARIKSELQSFGFSYHLGASWFTCLWMLAFFVSLSCFVWSGLEWCIAENYDPRTSDLKDGFLDRAEESQYENPFDDENVITGEDSNSASSRSGGKLSSSHTEDTGIHGSTSYNNMTRLDSSRIIKNFKNKQFDDTEEQFELQSITLRSSTDSDSSIQRVIQPSSTMHF

SEQ ID NO: 4709 - DNA, 1869 bp, Debaryomyces hansenii CBS767
  CDS (1)..(1869)
atgatgtttaataatatagggtatcattttttactaccctttagaaatctcacagctcaagcaagatttctacaaataataaggcttttcacatgtattgccgcattaacatttatcatcgcaacattaataggctcccttgctaataggaatatatatattgcaagaattaattgtgcccgtttagatgttgctcgtggtttatataatagtttgaggagctccgtgtctttatcctcaagtattcttggcgattcagaggataatgtgctacctgttgattcatcgttaactaattccgaaatagcagtgctaacctcatatgctgaaaatcaagttgctgatgctccccaatacattgttacctccttatggagctggtgctatggtaattataacatcacacaacacatggacagacatggtgttgttcatatatccaagcataacgatgtccttacttgctcaaaatcgacgaagaggtatatttttgattacaaggatgaattagaattgataggtttacagagcattttagcatacgcataccagtcttcggatttgaatgataaaaaatacgaagagacaatagccaaaagaaataataaatacaaattagttccatccggcttgatatttggagctagttcccagctagttatattaatattcggctatattttatacagtaataggggcccggagcaaagcctcaataaaattcctgtttttgtgatgaatattatagctttaatatctgttgcatcatttctaagtttagctgtatccagtagtcttgtgactaatttattgatcgaaattagaggtgaaattaaatctaatttgggggattatggaattgcgttacattttggcgatatttggttcctgttattgtggttgtcttttacattttcattactttcaagtgtttcttggactttccctctatggtgtgccaatccacgggattttgatgaagaggaagattttgatgatttcccttatggatctgataatataactgacaacgaggaagcgggaatgtctgacttgagcggccttagacgtaatccaagtgtttcagataaatataatagattcaacaagacaagcgcgaatatatctagtggtgttcagtacaaagcatctgcggattttggtgccaaaaatgataatgatgttgaagaaagagacttttctgatgatgaggaccatgaatacgaaactgattatgtctataatgatacgagtaatagaaaatacgatgcatatggtgctagaaacgaagacgagttacgaaagcttggagaaacattgtcaagaaaaatgtccgttcgccgtctaaacagaaatctttctaagaaaagccgtaagtcatacctccgtgatgcaaattacccaatatttgaagatgaatcaagtaacttattatatcacgacgtcaatatcagtaactcacagtatccaatgaccgattcgatggctcaccattatagagaagagacctttgatggctacgtaaatagtcacaagccaactacaagtgccagcactatgtctcttggaacgtcgaaaatcctaactagtcatattaataaagttagagaagagggtaataatacgcctactcgtaatgcatcagataagtctgttgatagaagaaagaataataaagaacaagatacaaattttaggtctaattcactacaagagagacatttccagcataatactaggaacaatccatttttacagagtgatacacttgaatcattagagaacaaaagaaactctacaggtgattcatttttgaattttgacgaaatggaaatcctagacaacaacaattatataaatagactttaa

SEQ ID NO: 4710 - protein, 622 aa, Debaryomyces hansenii CBS767
MMFNNIGYHFLLPFRNLTAQARFLQIIRLFTCIAALTFIIATLIGSLANRNIYIARINCARLDVARGLYNSLRSSVSLSSSILGDSEDNVLPVDSSLTNSEIAVLTSYAENQVADAPQYIVTSLWSWCYGNYNITQHMDRHGVVHISKHNDVLTCSKSTKRYIFDYKDELELIGLQSILAYAYQSSDLNDKKYEETIAKRNNKYKLVPSGLIFGASSQLVILIFGYILYSNRGPEQSLNKIPVFVMNIIALISVASFLSLAVSSSLVTNLLIEIRGEIKSNLGDYGIALHFGDIWFLLLWLSFTFSLLSSVSWTFPLWCANPRDFDEEEDFDDFPYGSDNITDNEEAGMSDLSGLRRNPSVSDKYNRFNKTSANISSGVQYKASADFGAKNDNDVEERDFSDDEDHEYETDYVYNDTSNRKYDAYGARNEDELRKLGETLSRKMSVRRLNRNLSKKSRKSYLRDANYPIFEDESSNLLYHDVNISNSQYPMTDSMAHHYREETFDGYVNSHKPTTSASTMSLGTSKILTSHINKVREEGNNTPTRNASDKSVDRRKNNKEQDTNFRSNSLQERHFQHNTRNNPFLQSDTLESLENKRNSTGDSFLNFDEMEILDNNNYINRL

SEQ ID NO: 4711 - DNA, 25 bp, Artificial sequence
  primer
atggtgatgtcaagaatacgagata

SEQ ID NO: 4712 - DNA, 24 bp, Artificial sequence
  primer
tcaaaactgtaatgctgacgaagg

SEQ ID NO: 4713 - protein, 568 aa, Artificial sequence
  consensus sequence
  Variant (3)..(3): Xaa in position 3 is any amino acid
  Variant (6)..(12): Xaa in position 6 to 12 is any amino acid
  Variant (14)..(15): Xaa in position 14 to 15 is any amino acid
  Variant (18)..(40): Xaa in position 18 to 40 is any amino acid
  Variant (41)..(41): Xaa in position 41 is any or no amino acid
  Variant (43)..(51): Xaa in position 43 to 51 is any amino acid
  Variant (53)..(55): Xaa in position 53 to 55 is any amino acid
  Variant (58)..(60): Xaa in position 58 to 60 is any amino acid
  Variant (63)..(78): Xaa in position 63 to 78 is any amino acid
  Variant (79)..(85): Xaa in position 79 to 85 is any or no amino acid
  Variant (88)..(88): Xaa in position 88 is any amino acid
  Variant (91)..(93): Xaa in position 91 to 93 is any amino acid
  Variant (96)..(96): Xaa in position 96 is any amino acid
  Variant (98)..(100): Xaa in position 98 to 100 is any amino acid
  Variant (102)..(105): Xaa in position 102 to 105 is any amino acid
  Variant (110)..(111): Xaa in position 110 to 111 is any amino acid
  Variant (114)..(116): Xaa in position 114 to 116 is any amino acid
  Variant (118)..(127): Xaa in position 118 to 127 is any amino acid
  Variant (129)..(130): Xaa in position 129 to 130 is any amino acid
  Variant (132)..(143): Xaa in position 132 to 143 is any amino acid
  Variant (144)..(144): Xaa in position 144 is any or no amino acid
  Variant (146)..(151): Xaa in position 146 to 151 is any amino acid
  Variant (153)..(153): Xaa in position 153 is any amino acid
  Variant (157)..(159): Xaa in position 157 to 159 is any amino acid
  Variant (161)..(163): Xaa in position 161 to 163 is any amino acid
  Variant (166)..(167): Xaa in position 166 to 167 is any amino acid
  Variant (170)..(170): Xaa in position 170 is any amino acid
  Variant (174)..(175): Xaa in position 174 to 175 is any amino acid
  Variant (176)..(177): Xaa in position 176 to 177 is any or no amino acid
  Variant (179)..(196): Xaa in position 179 to 196 is any amino acid
  Variant (198)..(202): Xaa in position 198 to 202 is any amino acid
  Variant (204)..(220): Xaa in position 204 to 220 is any amino acid
  Variant (222)..(244): Xaa in position 222 to 244 is any amino acid
  Variant (246)..(248): Xaa in position 246 to 248 is any amino acid
  Variant (250)..(254): Xaa in position 250 to 254 is any amino acid
  Variant (256)..(269): Xaa in position 256 to 269 is any amino acid
  Variant (271)..(273): Xaa in position 271 to 273 is any amino acid
  Variant (275)..(277): Xaa in position 275 to 277 is any amino acid
  Variant (279)..(281): Xaa in position 279 to 281 is any amino acid
  Variant (283)..(283): Xaa in position 283 is any amino acid
  Variant (285)..(286): Xaa in position 285 to 286 is any amino acid
  Variant (289)..(290): Xaa in position 289 to 290 is any amino acid
  Variant (293)..(300): Xaa in position 293 to 300 is any amino acid
  Variant (302)..(304): Xaa in position 302 to 304 is any amino acid
  Variant (306)..(309): Xaa in position 306 to 309 is any amino acid
  Variant (312)..(324): Xaa in position 312 to 324 is any amino acid
  Variant (325)..(334): Xaa in position 325 to 334 is any or no amino acid
  Variant (336)..(336): Xaa in position 336 is any amino acid
  Variant (337)..(378): Xaa in position 337 to 378 is any or no amino acid
  Variant (380)..(393): Xaa in position 380 to 393 is any amino acid
  Variant (395)..(413): Xaa in position 395 to 413 is any amino acid
  Variant (414)..(424): Xaa in position 414 to 424 is any or no amino acid
  Variant (426)..(446): Xaa in position 426 to 446 is any amino acid
  Variant (447)..(513): Xaa in position 447 to 513 is any or no amino acid
  Variant (515)..(524): Xaa in position 515 to 524 is any amino acid
  Variant (526)..(537): Xaa in position 526 to 537 is any amino acid
  Variant (538)..(552): Xaa in position 538 to 552 is any or no amino acid
  Variant (554)..(557): Xaa in position 554 to 557 is any amino acid
  Variant (560)..(567): Xaa in position 560 to 567 is any amino acid
PFXNLXXXXXXXQXXRLXXXXXXXXXXXXXXXXXXXXXXXXYXXXXXXXXXDXXXGLXXXLRXXXXXXXXXXXXXXXXXXXXXXXLTXSEXXXLTXYXXXQXXXXPQYIXXSLXXXCXXXXXXXXXXDXXGXXXXXXXXXXXXXCXXXXXXYXFDYXXXLXXXGLXXILXYAYXXXXSXXXXXXXXXXXXXXXXXXKXXXXXLXXXXXXXXXXXXXXXXXYXXXXXXXXXXXXXXXXXXXXXXXSXXXFXXXXXSXXXXXXXXXXXXXXIXXXLXXXGXXXHXGXXWFXXLWXXXXXXXXSXXXWXXXXWCXXXXXXXXXXXXXXXXXXXXXXXDXXXXXXXXXXXXXXXXXXXXXXXXXXXXXXXXXXXXXXXXXXXFXXXXXXXXXXXXXXDXXXXXXXXXXXXXXXXXXXXXXXXXXXXXXLXXXXXXXXXXXXXXXXXXXXXXXXXXXXXXXXXXXXXXXXXXXXXXXXXXXXXXXXXXXXXXXXXXXXXXXXXXXXXXXXXXXXXXXXLXXXXXXXXXXNXXXXXXXXXXXXXXXXXXXXXXXXXXXQXXXXRSXXXXXXXXQ

SEQ ID NO: 4714 - protein, 60 aa, Artificial sequence
  protein pattern
  Variant (3)..(4): Xaa in position 3 to 4 is any or no amino acid
  Variant (6)..(6): Xaa in position 6 is Ile or Leu
  Variant (7)..(7): Xaa in position 7 is any amino acid
  Variant (8)..(8): Xaa in position 8 is Ile or Val
  Variant (11)..(11): Xaa in position 11 is Ala, Glu or Ser
  Variant (13)..(13): Xaa in position 13 is Ala or Thr
  Variant (14)..(14): Xaa in position 14 is Ala or Glu
  Variant (15)..(15): Xaa in position 15 is Asn, Gln or Ser
  Variant (17)..(17): Xaa in position 17 is Ile or Val
  Variant (18)..(18): Xaa in position 18 is any amino acid
  Variant (19)..(19): Xaa in position 19 is Asp, Asn or Ser
  Variant (20)..(20): Xaa in position 20 is Ala, Ser or Val
  Variant (25)..(26): Xaa in position 25 to 26 is Thr or Val
  Variant (29)..(29): Xaa in position 29 is Trp or Tyr
  Variant (30)..(30): Xaa in position 30 is Gly or Ser
  Variant (31)..(31): Xaa in position 31 is any amino acid
  Variant (33)..(33): Xaa in position 33 is any amino acid
  Variant (34)..(34): Xaa in position 34 is Cys, Gly or Ser
  Variant (35)..(35): Xaa in position 35 is Asn or Thr
  Variant (36)..(36): Xaa in position 36 is Phe or Tyr
  Variant (37)..(37): Xaa in position 37 is Asn or Thr
  Variant (38)..(39): Xaa in position 38 to 39 is any amino acid
  Variant (40)..(40): Xaa in position 40 is Glu or Gln
  Variant (41)..(41): Xaa in position 41 is any amino acid
  Variant (42)..(42): Xaa in position 42 is Phe or Met
  Variant (44)..(44): Xaa in position 44 is Arg or Ser
  Variant (45)..(45): Xaa in position 45 is Glu, His or Lys
  Variant (47)..(47): Xaa in position 47 is any amino acid
  Variant (48)..(48): Xaa in position 48 is Leu, Met or Val
  Variant (49)..(49): Xaa in position 49 is His or Tyr
  Variant (50)..(50): Xaa in position 50 is any amino acid
  Variant (51)..(51): Xaa in position 51 is Ser or Val
  Variant (52)..(53): Xaa in position 52 to 53 is any amino acid
  Variant (54)..(54): Xaa in position 54 is Asn or Ser
  Variant (55)..(55): Xaa in position 55 is Asp or Thr
  Variant (56)..(56): Xaa in position 56 is Thr or Val
  Variant (57)..(57): Xaa in position 57 is any amino acid
  Variant (58)..(58): Xaa in position 58 is Cys, Ser or Thr
  Variant (59)..(59): Xaa in position 59 is Cys, Asp or Thr
  Variant (60)..(60): Xaa in position 60 is Cys or Ser
LTXXEXXXLTXYXXXQXXXXPQYIXXSLXXXCXXXXXXXXXXDXXGXXXXXXXXXXXXXX

SEQ ID NO: 4715 - protein, 32 aa, Artificial sequence
  protein pattern
  Variant (2)..(3): Xaa in position 2 to 3 is any amino acid
  Variant (4)..(4): Xaa in position 4 is Ile or Val
  Variant (5)..(5): Xaa in position 5 is Glu or Gln
  Variant (6)..(6): Xaa in position 6 is any amino acid
  Variant (8)..(9): Xaa in position 8 to 9 is any or no amino acid
  Variant (11)..(11): Xaa in position 11 is any amino acid
  Variant (12)..(12): Xaa in position 12 is Ser or Thr
  Variant (13)..(13): Xaa in position 13 is Glu or Asn
  Variant (15)..(15): Xaa in position 15 is Glu, Gly or Gln
  Variant (16)..(16): Xaa in position 16 is Ala, Asp or Ser
  Variant (17)..(17): Xaa in position 17 is Phe or Tyr
  Variant (19)..(19): Xaa in position 19 is Phe or Ile
  Variant (20)..(20): Xaa in position 20 is Ala or Ser
  Variant (21)..(21): Xaa in position 21 is any amino acid
  Variant (23)..(23): Xaa in position 23 is Phe or Leu
  Variant (25)..(25): Xaa in position 25 is Ala, Asp or Val
  Variant (26)..(26): Xaa in position 26 is any amino acid
  Variant (29)..(30): Xaa in position 29 to 30 is any amino acid
NXXXXXRXXIXXXLXXXGXXXHXGXXWFXXLW

SEQ ID NO: 4716 - protein, 22 aa, Artificial sequence
  protein pattern
  Variant (2)..(2): Xaa in position 2 is any amino acid
  Variant (6)..(6): Xaa in position 6 is Lys or Arg
  Variant (7)..(7): Xaa in position 7 is Asp or Glu
  Variant (8)..(8): Xaa in position 8 is any amino acid
  Variant (10)..(10): Xaa in position 10 is Glu or Ser
  Variant (11)..(11): Xaa in position 11 is any amino acid
  Variant (12)..(12): Xaa in position 12 is Ile or Leu
  Variant (15)..(15): Xaa in position 15 is Asp, Gly or Gln
  Variant (16)..(16): Xaa in position 16 is any amino acid
  Variant (19)..(19): Xaa in position 19 is Ala or Asp
YXFDYXXXLXXXGLXXILXYAY

SEQ ID NO: 4717 - DNA, 1314 bp, Saccharomyces cerevisiae
  CDS (1)..(1314)
atgagtgaagaacaggaccctttattagcaggattgggggaaacgtccggcgacaatcacacccaacagtcacacgaacaacaaccagaacaaccacaggaaacggaagaacatcatgaagaggagccttctagagtggatcctgaacaggaggcccataacaaggccttgaatcaattcaagagaaagctgctagaacacagaaggtatgatgatcaattgaagcagcgccgtcaaaatatacgagatctagagaagttatatgacaagactgaaaacgacataaaagctttgcaaagtattggacaattgattggcgaagtcatgaaggaattatctgaagagaaatatatagtgaaggcctcttcgggcccacgttatattgtcggagttagggattcggtagatcgctctaaattaaagaaaggggtgagagtcaccttagatatcaccactttgactataatgagaattttgcccagagagacagatccactggtgtataatatgaccagttttgaacaaggtgaaatcacttttgatggtattggtggtttgactgagcaaatcagagaattaagggaggttatagaattaccattgaagaacccagaaattttccagagggtcggtatcaaacctccaaagggtgtgctactatatggtccccctggtactggtaaaactttactagcgaaggcagttgctgctacgattggagccaacttcattttctctccagcgtctggtattgtggataaatacattggtgagtctgctcgtattattagagaaatgtttgcatatgcaaaggaacacgaaccttgcatcatttttatggatgaagtggatgctattggtggtagaagattcagtgaaggtacttcagcagaccgtgaaattcaacgtacgttgatggagttgttgacccagatggatggttttgataatcttggacagactaaaatcatcatggctacgaatagaccagatactttagatcctgctttgttgaggcccggtagactagacaggaaagttgaaatcccattgccaaatgaggccggcagattagaaattttcaaaattcatactgcaaaagtcaaaaaaacaggggaatttgacttcgaggctgctgtaaaaatgagtgatggtttcaatggtgctgatattcgtaactgtgcaactgaagcaggttttttcgccataagagatgaccgtgatcacatcaaccctgatgatttaatgaaagccgtaagaaaagtagctgaagttaagaaattggaaggcactatagaataccaaaaattatga

SEQ ID NO: 4718 - protein, 437 aa, Saccharomyces cerevisiae
MSEEQDPLLAGLGETSGDNHTQQSHEQQPEQPQETEEHHEEEPSRVDPEQEAHNKALNQFKRKLLEHRRYDDQLKQRRQNIRDLEKLYDKTENDIKALQSIGQLIGEVMKELSEEKYIVKASSGPRYIVGVRDSVDRSKLKKGVRVTLDITTLTIMRILPRETDPLVYNMTSFEQGEITFDGIGGLTEQIRELREVIELPLKNPEIFQRVGIKPPKGVLLYGPPGTGKTLLAKAVAATIGANFIFSPASGIVDKYIGESARIIREMFAYAKEHEPCIIFMDEVDAIGGRRFSEGTSADREIQRTLMELLTQMDGFDNLGQTKIIMATNRPDTLDPALLRPGRLDRKVEIPLPNEAGRLEIFKIHTAKVKKTGEFDFEAAVKMSDGFNGADIRNCATEAGFFAIRDDRDHINPDDLMKAVRKVAEVKKLEGTIEYQKL

SEQ ID NO: 4719 - DNA, 1666 bp, Zea mays
  CDS (113)..(1309)
gaattgaagccctcgttctgggccgggattttggaaaaacagggtccacctccgaaaaaaaaaaaagaaagcctcgcgccgccgccgccgccgaggaaggttgaggaagaggatggccgagggcggggaagaagcccgccgccgtgctgcgatcgccgagtaccgcaagaagctcctcacctgccgggagctcgaggcgcgggtcaaaactgggagggagaatctaaaaaatgcaaagaaaaacttggaaaaaactgaagaggatctaaaatcactgcaaagtgttggtcaaattatcggtgaagtgcttcgacctttggacaaggaacgatttattgtcaaggctagcagcggaccacgttatgttgttgcctgccgaagtaaagttgacaaagaaaagttgattgctggtacacgagttgttcttgacatgacaacacttaccattatgcgcattctgccacgtgaggtcgaccctgtggtttacaacatgctacatgaagatcctggcaatgtaagttactcagctgtaggtgggttgtcagatcaaataagggaactcagagaatccattgaattacctcttatgaacccagaattgtttctccgtgtcgggattaaaccgccgaagggcgtgctgctctacggtccacctggaactgggaagacgctcctagctagagccattgctagcaacattgatgctaattttttgaaggtggtgtcaagtgctatcattgataaatacattggtgaaagtgcacgcttaattcgtgaaatgtttaactatgcacgtgagcatcagccatgcatcattttcatggatgaaattgatgccattggtggccgaagatttagtgagggcacaagtgcagatcgtgagattcagaggacattgatggagcttctaaatcagttagatggattcgatgagcttgggaaggtgaaaatgatcatggcaaccaaccggcctgatgttttggatcctgcactccttcgacctggtcggttggacaggaagatcgagatcccactgccgaatgaacaagggaggatggaggtcctcaagattcatgcagctggcatcgcaaagcatggggagattgactatgaagctgtagtcaaactagctgagggcttcaatggagccgatatgcgcaacttgtgcacagaagccggcatggctgctatccgagcggagcgtgactatgtcattcacgaggacttcatgaaggctgtgcgcaagctgaatgatgccaagaagctcgagtccagtgcgcactacagtgctgacttcggcaaggattgaacggggtatcagtgtatcacctgatccggagctgttctgatcatattgcaaactgtgttaggctgtattcatcttatcctggatggaagaactctcatccagacgccctgggagcaagagcaagcaaactcttgatttttctaaattctatctgatatctgatagattccaggatggttgtggagggaaatttggcagttggatagattccaggatggatgtggagggacatctggcagttgggtcatggatgtagtctgtagacgtccaaattcatgtgaagctcttgttcttgctttttatctctcaatacagggtgcgttcttttgcttaaaaaaaaaaaaaaaaaaagcgtat

SEQ ID NO: 4720 - protein, 398 aa, Zea mays
MAEGGEEARRRAAIAEYRKKLLTCRELEARVKTGRENLKNAKKNLEKTEEDLKSLQSVGQIIGEVLRPLDKERFIVKASSGPRYVVACRSKVDKEKLIAGTRVVLDMTTLTIMRILPREVDPVVYNMLHEDPGNVSYSAVGGLSDQIRELRESIELPLMNPELFLRVGIKPPKGVLLYGPPGTGKTLLARAIASNIDANFLKVVSSAIIDKYIGESARLIREMFNYAREHQPCIIFMDEIDAIGGRRFSEGTSADREIQRTLMELLNQLDGFDELGKVKMIMATNRPDVLDPALLRPGRLDRKIEIPLPNEQGRMEVLKIHAAGIAKHGEIDYEAVVKLAEGFNGADMRNLCTEAGMAAIRAERDYVIHEDFMKAVRKLNDAKKLESSAHYSADFGKD

SEQ ID NO: 4721 - DNA, 1645 bp, Zea mays
  CDS (109)..(1311)
aaggcggcatcatgagctctgcagtcagtagacaaattttacgtaacttgcgtggttctcttcctgcgacggaagcaaacactgcccgagacatagacagacgacgagatggccgatgcggaggacgccgccgccgcgcgccgacgggccgccataaccgactaccgcaagaagctgctcaactgcagggagctcgagtcgcgcgtcggcaccgtgagagaaagccttaaaaatgcaaagagggattttaccaagactgaagacgacttgaaatctctgcagagcgtggggcaaataattggagaggttctccgacctcttgataatgaacgctttattgtgaaggccagcagtggtccccgatatgtggtcggttgccgaagtaaagtagacaaggagaagttgacatctggaactcgtgttgtacttgacatgacgaccttgacaataatgcgcactcttccacgggaggtggatccagtggtatataacatgcttcatgaagatccaggaaatgtcagttactctgctgtaggtggtctgtctgatcagattagagagctcagggagtccattgagttaccacttatgaatcctgaactctttcttcgggtgggaattaagcctcctaagggtgttctactctacggtcctccaggaactgggaagaccctattggcaagggctatcgcaagtaacatcgatgccaactttttgaagattgtttcaagtgctattatcgacaaatacattggagaaagtgctcgtttgattagagaaatgtttggctatgcacgtgaccaccaaccatgcatcatcttcatggatgaaattgatgctattggtggtcgaagatttagtgagggaactagtgctgatcgtgagattcagcggacgttgatggagctccttaaccaattagatggatttgatgagctaggaaaggtaaaaatgatcatggccacaaatcgacctgatgttctggacccggcgctcctgcgtcctggacgtttagataggaagattgaaattccgctacccaacgagcaatcaagaatggaagttctaaaaatccatgcagccggtatcgccaagcatggggagattgattatgaagcagtcgtgaaactagctgaaggtttcaatggggctgatcttcggaacgtgtgcaccgaagctggcatggctgcaattcgtgcagagagagattacgtagtccacgaagacttcatgaaggctgtgaggaagctaaatgatgcaaaaaagctggaatcgagtgcgcattacagtgcagattttggcaaagagtaatgatgctgatgccgatgcaacggacaaatgcatttggcatgtatcatcaggcgagcccagacagatgcgatgcaaaagcgagaaaggaaccagctatttatgttcaggctacaggcagtttctctatttttcctttccttctacgtatctacaaattcagcgcggaaggatttgttcgcttcctcgtctccaagtatccctaatcactattttattacatctcgcattcttataccatattgtatcctttatttaaatatattcctttcattcttctttttttttatatcattacttcctttctttcttttctttttttttttctcattttatt

SEQ ID NO: 4722 - protein, 400 aa, Zea mays
MADAEDAAAARRRAAITDYRKKLLNCRELESRVGTVRESLKNAKRDFTKTEDDLKSLQSVGQIIGEVLRPLDNERFIVKASSGPRYVVGCRSKVDKEKLTSGTRVVLDMTTLTIMRTLPREVDPVVYNMLHEDPGNVSYSAVGGLSDQIRELRESIELPLMNPELFLRVGIKPPKGVLLYGPPGTGKTLLARAIASNIDANFLKIVSSAIIDKYIGESARLIREMFGYARDHQPCIIFMDEIDAIGGRRFSEGTSADREIQRTLMELLNQLDGFDELGKVKMIMATNRPDVLDPALLRPGRLDRKIEIPLPNEQSRMEVLKIHAAGIAKHGEIDYEAVVKLAEGFNGADLRNVCTEAGMAAIRAERDYVVHEDFMKAVRKLNDAKKLESSAHYSADFGKE

SEQ ID NO: 4723 - DNA, 1563 bp, Triticum aestivum
  CDS (90)..(1292)
aggacaccgcggacggagagcgtcaggtcctcccccgctccgctcatcttgggaaggaagcaaagcagagccgcgccgccgaggaggatatggccgaggccgacgacgccgccgccgcccgccggcgcacggtcatcacggagtaccgcaacaagctcctgaactgccgcgagctggagacgagggtccgcacaggtagggaaaacctaaagaaggcgaagaaagattacgatataactgaagatgatttgaagtccttgcagagtgtgggccaaatcattggtgaagtacttcgaccattggacagtgaaagatttatcgtcaaagccagtagtggcccacgttatgtggttggctgcagaagcaaagttgacaaagaaaagctgacagctgcaacacgagttgtccttgacatgacaacattaacaataatgcgcactctaccacgtgaggttgatcccgtggtctataacatgctacacgaagaccccggcaatgtcagttactcagctgtaggtggactgtcggatcaaataagggagctgcgggagtccatcgagttacctcttatgaatccagaattgtttcttcgtgttgggattaaaccaccaaagggcgttctgctctatggcccacctggaacgggaaagacattgcttgctagagccattgctagcaacatcgatgctaactttttaaagattgtttcaagtgctatcattgacaaatatattggtgaaagtgcacgtcttataagagaaatgtttaactatgcacgtgagcatcaaccatgtattattttcatggatgagattgatgccattggtggccgaagattcagtgagggcactagtgcagatcgtgaaatacaacggacattgatggagctcctaaatcagttggatggattcgatgagctcggaaaggtgaagatgatcatggcgacgaaccggcctgatgtcttggaccctgcgctccttcgtcctggacgcctagaccggaagatagagattccgctgccgaatgagcaatccaggacggaggtcctgaaaatccatgcagctggtatcgccaagcatggcgaaattgattacgaggctgtggttaagctggccgagggcttcaatggcgctgatcttcgcaatgtctgcactgaggctggcatggccgccattcgagcagagcgtgactacgtcatccacgaagacttcatgaaggcagttcggaagttgaatgacgccaagaagctcgagtccagcgcacactacagcgccgactttggcaaggactaagatgagagtaggagactatcaggcgacgcgctgtctgttttcttgtaccatggcggagtttgtcacaccgaccccgacgatatagaacatcatgtgtttctaccttttatatgttgtgggacgactgcctttgccgcgcaagttgatgtaatgaaaagttgaaacaggtctgaaaccgactggtttcttagatttacaaaattgtttccttcaagttactgtgccttgattgtggaatcaaaaaaatgtggaaacattcgcgatttcttcc

SEQ ID NO: 4724 - protein, 400 aa, Triticum aestivum
MAEADDAAAARRRTVITEYRNKLLNCRELETRVRTGRENLKKAKKDYDITEDDLKSLQSVGQIIGEVLRPLDSERFIVKASSGPRYVVGCRSKVDKEKLTAATRVVLDMTTLTIMRTLPREVDPVVYNMLHEDPGNVSYSAVGGLSDQIRELRESIELPLMNPELFLRVGIKPPKGVLLYGPPGTGKTLLARAIASNIDANFLKIVSSAIIDKYIGESARLIREMFNYAREHQPCIIFMDEIDAIGGRRFSEGTSADREIQRTLMELLNQLDGFDELGKVKMIMATNRPDVLDPALLRPGRLDRKIEIPLPNEQSRTEVLKIHAAGIAKHGEIDYEAVVKLAEGFNGADLRNVCTEAGMAAIRAERDYVIHEDFMKAVRKLNDAKKLESSAHYSADFGKD

SEQ ID NO: 4725 - DNA, 1692 bp, Sorghum bicolor
  CDS (126)..(1328)
agtccagtagataagccgtaagcgcactaggctagtttacggcacctgcgcgattctcttcttgcgacggaagcaaaacctgcgcgagagagagagagacaggcagacgactgcgggacgacgagatggccgacggggaggacgccgccgccgcgcgccgccgggccgccataaccgactaccgcaagaagctgctcaactgcagggagctcgagtcgcgcgtcggcaccgtgagagaaagccttaaaaatgcaaagaaggattttaccaagactgaagatgacttgaagtctctgcagagcgtggggcaaataattggagaggttctccggcctcttgataatgagcgctttattgtgaaggccagcagtggtccccgatatgtggtcggttgccgaagtaaagtggacaaggagaagttaacatctggaactcgtgttgtacttgacatgacgaccttgacaataatgcggactcttccacgggaggtggatcctgtggtatataacatgcttcatgaagatccaggaaatgtcagttactccgctgtaggcggtttgtctgatcagattagagagctcagggaatccattgagttaccacttatgaaccctgaactctttcttcgggtgggaattaagcctcctaagggtgttctactctacggtccaccaggaactgggaagaccctattggcaagggctatcgcaagtaacattgatgccaactttttgaagattgtttcaagtgctattattgacaaatacattggagaaagtgctcgtttgattagagaaatgtttggctatgcacgtgatcaccaaccatgcatcatcttcatggacgaaattgatgccattggtgggcgaagatttagtgagggaactagtgctgatcgtgagatccagcggacattgatggagctccttaaccaattagacggatttgacgagctaggaaaggtaaagatgatcatggccacaaaccgacctgatgttctggaccctgcgctcctgcgtcctggacgtttagacaggaagattgaaattccgctacccaacgagcaatcaagaatggaagttctaaaaatccatgcagctggtatcgccaaacatggggaaattgattatgaagcagttgtgaaactagctgaaggtttcaatggggctgatcttcggaacgtgtgcactgaagctggtatggctgcaattcgtgcagagagagattatgtagtccacgaagacttcatgaaggctgtgcggaagctaaatgatgcaaaaaagctggaatcgagtgcacattacagtgcagattttggcaaggagtaatgtatgatgctgatgcaatggacaactgcatatggcgtgtatcatcagggagctcagtcagatgcgatgcaaaagggagaaagaaaccagctatttatgttcaggctccaggcagctcctctttttctgatattcacaattttagtgaggaggattgtcaagctgaccagtgggagaaaccattcgagaatttagtagttttgcaccagatgctctttgcttctgtaaatcatacgctatctgctttcgtgcgtgttagtctggtaataactctggtccgagctgttctgttttcacatgtactttggacagtgtggaaaaagaaccagtttttttgcaaaaaaaaacaattaagggcggcgtt

SEQ ID NO: 4726 - protein, 400 aa, Sorghum bicolor
MADGEDAAAARRRAAITDYRKKLLNCRELESRVGTVRESLKNAKKDFTKTEDDLKSLQSVGQIIGEVLRPLDNERFIVKASSGPRYVVGCRSKVDKEKLTSGTRVVLDMTTLTIMRTLPREVDPVVYNMLHEDPGNVSYSAVGGLSDQIRELRESIELPLMNPELFLRVGIKPPKGVLLYGPPGTGKTLLARAIASNIDANFLKIVSSAIIDKYIGESARLIREMFGYARDHQPCIIFMDEIDAIGGRRFSEGTSADREIQRTLMELLNQLDGFDELGKVKMIMATNRPDVLDPALLRPGRLDRKIEIPLPNEQSRMEVLKIHAAGIAKHGEIDYEAVVKLAEGFNGADLRNVCTEAGMAAIRAERDYVVHEDFMKAVRKLNDAKKLESSAHYSADFGKE

SEQ ID NO: 4727 - DNA, 1272 bp, Glycine max
  CDS (1)..(1272)
atgggctcctccgcgatggtgttggacccgaaaccgtcgtcggagccaccgccgttcctcgcgtcgacaaaatccgactacctccaaggcggcttcagcggcagcgacgccacggcctccgacgaggacgacctctacagccgcctcaagaccctgcagcgccagcttgagttcatcgacatccaggaagagtacgtcaaggacgagcagaagaatctcaagcgcgagctcctccgcgcgcaggaggaggtcaagcggatccagtcggtgccgctcgtcatcggccagttcatggaaatggtcgaccagaacaatggcatcgttggatccaccaccggatccaactactacgtcagaatcctcagcaccatcaaccgcgagcttctcaagccctccgcatccgtcgcgctccaccgccactccaacgccctcgtcgacgttcttccaccggaggccgactccagcatctcgctcctcagccagtccgagaagcctgacgtcacttataatgacattggaggatgtgatatccagaaacaggaaatccgcgaggccgtggagctaccccttacgcatcatgaactatacaaacaaattggtattgatcctcctcgtggtgttttactgtatggaccccctggcactggaaaaacaatgcttgccaaagctgttgcgaatcataccactgccgccttcatcagggttgtgggatctgagtttgtgcagaagtatcttggtgagggtccacgaatggttcgtgatgtatttcgtctcgctaaagagaatgcgcctgcaattatatttattgatgaggttgatgcaatagccacggctagatttgatgcccaaactggagctgatagagaagtacagcgtatccttatggaacttttgaatcagatggatggttttgaccaaacagttaatgttaaagttattatggcaactaacagagcagacactttggaccctgctctgttgcgtcctggaaggcttgatcgtaagattgagttccctttgcctgatagacgtcaaaagaggctcgtatttcaggtttgcacagccaagatgaacttgagtgatgaggtagacctggaggattatgtttctcgtcccgacaaaatcagtgctgctgagatatcagctatttgtcaagaagctggaatgcatgctgttcgcaagaatagatatgtcatactgcccaaggacttcgagaagggttacaggacaaacgtgaagaagcctgatactgacttcgaattttacaagtga

SEQ ID NO: 4728 - protein, 423 aa, Glycine max
MGSSAMVLDPKPSSEPPPFLASTKSDYLQGGFSGSDATASDEDDLYSRLKTLQRQLEFIDIQEEYVKDEQKNLKRELLRAQEEVKRIQSVPLVIGQFMEMVDQNNGIVGSTTGSNYYVRILSTINRELLKPSASVALHRHSNALVDVLPPEADSSISLLSQSEKPDVTYNDIGGCDIQKQEIREAVELPLTHHELYKQIGIDPPRGVLLYGPPGTGKTMLAKAVANHTTAAFIRVVGSEFVQKYLGEGPRMVRDVFRLAKENAPAIIFIDEVDAIATARFDAQTGADREVQRILMELLNQMDGFDQTVNVKVIMATNRADTLDPALLRPGRLDRKIEFPLPDRRQKRLVFQVCTAKMNLSDEVDLEDYVSRPDKISAAEISAICQEAGMHAVRKNRYVILPKDFEKGYRTNVKKPDTDFEFYK

SEQ ID NO: 4729 - DNA, 1393 bp, Glycine max
  CDS (19)..(1245)
ataatggccgcctcagcgatggtgttggatccgccgcccttcctcccgtcgacaaagtccgcctacctccaaggcggcgacgccacggccttcgatgaggaagatctctacagccgcctcaaatccctagtgcgtcagctcgagttcgtcgacatccaggaggagtatgtgaaggacgaactgaagaatctcaggcgcgagctcctccgcgcgatggaggaggtgaagcggatccagtcggtgccgctcgtcataggccagttcatggagatgatcgaccagaacaacggcatcgttggatccaccgcaggatccaactactacgtcagaatcctcagcactatcaaccgcgaattgctcaagccttctgcttccgtcgcgctccaccgccactccaacgcgctcgtcgaggtgctgccgccggaggccgactccagcatctcgctcctcagccagtccgagaagcctgacgtcacttataatgacattggaggatgtgatatccagaaacaggaaatccgtgaggctgtggagctaccccttacacatcatgaactatacaaacaaattggtattgatcctcctcgtggtgttttactgtatggaccccctggcactggcaaaacaatgcttgccaaagctgttgctaatcataccactgccgccttcatcagggttgtaggatctgagtttgtgcaaaagtatcttggtgagggtccacgaatggttcgtgatgtatttcgtctcgctaaagagaatgcgcctgctattatatttattgatgaggttgatgcaatagccactgctagatttgatgcccaaactggagctgatagagaagtacagcgtatccttatggaacttttgaatcagatggatggttttgaccaaacagttaatgttaaagttattatggcaactaacagagcagacactttggaccctgctctgttgcgtcctggaaggcttgatcgtaaaattgagttccctttgcctgatagacgtcaaaagaggcttgtatttcaggtttgcacagccaagatgaacttgagtgatgaggtagatctggaggattatgtttctcgccctgacaaaatcagtgctgctgagatatcagctatttgtcaagaagctggaatgcatgctgttcgcaagaatagatatgtcatactgccaaaggacttcgagaagggttataggacaaacgtgaagaagcctgatactaacttcgaattttacaagtgaatttgtacgcatgttgataagttttcttaaatattacacacaatttattaagcttatacgctatacccaataaggaggttaaggaggttgagttgtgttttacgaaattttttgcgattttttttcgtaaatgaagttttgtcttatc

SEQ ID NO: 4730 - protein, 408 aa, Glycine max
MVLDPPPFLPSTKSAYLQGGDATAFDEEDLYSRLKSLVRQLEFVDIQEEYVKDELKNLRRELLRAMEEVKRIQSVPLVIGQFMEMIDQNNGIVGSTAGSNYYVRILSTINRELLKPSASVALHRHSNALVEVLPPEADSSISLLSQSEKPDVTYNDIGGCDIQKQEIREAVELPLTHHELYKQIGIDPPRGVLLYGPPGTGKTMLAKAVANHTTAAFIRVVGSEFVQKYLGEGPRMVRDVFRLAKENAPAIIFIDEVDAIATARFDAQTGADREVQRILMELLNQMDGFDQTVNVKVIMATNRADTLDPALLRPGRLDRKIEFPLPDRRQKRLVFQVCTAKMNLSDEVDLEDYVSRPDKISAAEISAICQEAGMHAVRKNRYVILPKDFEKGYRTNVKKPDTNFEFYK

SEQ ID NO: 4731 - DNA, 1341 bp, Glycine max
  CDS (1)..(1341)
atgggtcagggaacaccgggcggtctgaaccggcagggtcttccgggggaccggaagccggacggcggcgacaagaaggagaaaaagttcgagccggcggccccgccggcccgcgtggggcgtaagcagcggaagcagaaggggccggaggcggcggcgcggctgccgacggtgacgccgctgtcgaagtgcaagctgcggctgctgaagctggagcgcataaaggactacctcttgatggaggaggagtttgtggcgaaccaggagaggctgaaaccacaggaggagaaggccgaggaagatagatccaaggtcgatgatctcagaggttcccctatgagcgttggtaacctcgaggaactcatcgacgagaatcatgccatcgtttcgtcctcggtggggcccgagtactatgttggtattttgtctttcgttgataaggatcagctcgaacctggatgcgctattttgatgcataacaaggttctctctgttgttgggcttcttcaagatgaagttgatccaatggtctctgttatgaaggtcgaaaaggcccctttggaatcatatgctgatattggtggtttagatgctcagatacaggaaattaaagaagcagttgagcttcccctgacacatcctgaactgtatgaagacattggtatcaagcctcctaagggagttattttatatggggaaccaggaactgggaagacattgcttgcaaaggctgtggcaaactcaacatcagcaacctttttgcgtgttgttggtagtgaattaatacaaaaatacttgggagatggtccaaagcttgtaagggaacttttccgagttgctgatgatctttccccatctattgtcttcattgatgagatagacgctgttggtactaagaggtatgatgcccactctggtggagaacgtgaaattcagaggactatgttggagttgctgaaccagttagatggttttgattcaagaggagacgtaaaagttattcttgcaaccaacagaattgaaagccttgatccagctttgctgcgacctggtcgaattgacaggaagattgaatttcctctccctgatattaaaacaagaagacgcattttccagatacacacatcaaggatgacattagctgatgatgtcaatttagaagaatttgttatgaccaaggatgagttctctggagctgatataaaagcaatatgtactgaagctggcttacttgctttacgagaacgccgaatgaaggtgacgcatgccgactttaagaaggcaaaggataaagttatgtttaagaagaaagaaggagtgcccgaaggactgtatatgtga

SEQ ID NO: 4732 - protein, 446 aa, Glycine max
MGQGTPGGLNRQGLPGDRKPDGGDKKEKKFEPAAPPARVGRKQRKQKGPEAAARLPTVTPLSKCKLRLLKLERIKDYLLMEEEFVANQERLKPQEEKAEEDRSKVDDLRGSPMSVGNLEELIDENHAIVSSSVGPEYYVGILSFVDKDQLEPGCAILMHNKVLSVVGLLQDEVDPMVSVMKVEKAPLESYADIGGLDAQIQEIKEAVELPLTHPELYEDIGIKPPKGVILYGEPGTGKTLLAKAVANSTSATFLRVVGSELIQKYLGDGPKLVRELFRVADDLSPSIVFIDEIDAVGTKRYDAHSGGEREIQRTMLELLNQLDGFDSRGDVKVILATNRIESLDPALLRPGRIDRKIEFPLPDIKTRRRIFQIHTSRMTLADDVNLEEFVMTKDEFSGADIKAICTEAGLLALRERRMKVTHADFKKAKDKVMFKKKEGVPEGLYM

SEQ ID NO: 4733 - DNA, 1621 bp, Glycine max
  CDS (95)..(1291)
gcgttctgcttcggttcacaaggcaccagctgctccgttctgcttcggcttcagagtttgtgtaacattctccttccttcttccgatttcgaagatggctgaagcagaggatgccgtaagacgccgtaatgcggtcgccgagtatcggaagaaacttctccagcacaaggaattggaatccagagtccgatccgtcagggagaatttgcgagcttcaaagaaagagttcaataaaacagaagatgatttgaaatctcttcaaagtgttgggcagattattggcgaagttctcaggcctcttgacaatgaacgcctgattgttaaagcaagcagtggtcccaggtatgtggttggttgccgcagtaaagtggataaggaaaaattgacttcagggacaagggtggttcttgatatgacaacactcaccataatgcgagctcttcctcgagaagttgatccagtagtttacaatatgttgcatgaagatcctggtaatatcagctactcagctgttggtggcttatctgatcagatcagggaattgagggagtcaattgaactgcctctaatgaatcctgagctcttccttcgagttggaattaaacctccaaagggtgttctcctttacgggcctcctggtactggtaaaacattgttagctagggcaattgcaagtaatatagatgcaaatttcctaaaggttgtttcaagtgccataattgataagtacattggagaaagtgccaggttaatcagagagatgtttggttatgcacgtgatcaccagccttgcatcatttttatggatgagatcgatgccattggaggtcgccgtttcagtgagggaacaagtgcagatcgtgagattcagagaacgctaatggagctgcttaatcaacttgatggatttgatcaacttggaaaggttaaaatgataatggcaacaaaccgacctgatgtacttgaccctgctctcctgcgtcctgggagattggatagaaaaatagaaatccctctgcctaatgaacaatcaaggatggaaattcttaagattcatgctgctggtatcgctaagcatggtgaaatagactatgaagctgttgtgaagcttgcagagggatttaatggggctgatcttcgaaatgtctgcacagaagctggaatggcagcaattcgtgcagagcgtgattatgtgatccatgaagattttatgaaggctgttaggaaactgaacgaggcaaagaaacttgaatccagtgcgcactacagtgctgattttggtaaagactagaatctattgcaaaattcttgcagagccatggatatctaggcagtgcatcttgagttggaaatacctcgagcaagttactcaattcgtagagctaagcgtgatgttccctttgggttatggcttgtgttttccgaattctaaaattggaagggtaacttaatcaaacggtaaaagggatgttcaatttaattgtattattgttgcccccaccccacccaaaccccttttttttctggactgtagaagggcaactcatattttatactggatcttgggatgtgcacaatttgctttatattttaaaaaaattaaaattgtctaattttacac

SEQ ID NO: 4734 - protein, 398 aa, Glycine max
MAEAEDAVRRRNAVAEYRKKLLQHKELESRVRSVRENLRASKKEFNKTEDDLKSLQSVGQIIGEVLRPLDNERLIVKASSGPRYVVGCRSKVDKEKLTSGTRVVLDMTTLTIMRALPREVDPVVYNMLHEDPGNISYSAVGGLSDQIRELRESIELPLMNPELFLRVGIKPPKGVLLYGPPGTGKTLLARAIASNIDANFLKVVSSAIIDKYIGESARLIREMFGYARDHQPCIIFMDEIDAIGGRRFSEGTSADREIQRTLMELLNQLDGFDQLGKVKMIMATNRPDVLDPALLRPGRLDRKIEIPLPNEQSRMEILKIHAAGIAKHGEIDYEAVVKLAEGFNGADLRNVCTEAGMAAIRAERDYVIHEDFMKAVRKLNEAKKLESSAHYSADFGKD

SEQ ID NO: 4735 - DNA, 1755 bp, Glycine max
  CDS (165)..(1421)
tcgagtcagctacgtaggccccccccaagttacaagtactagtttgtttgttcccctttctaccgacctaacacgagaggagaggagagaagagaggaagttttggggtttgaatctatagaatagaatcaaaccaaattgaaagaagatcgatcgatcgatcgatggctctggtcggagttgaagtgaagcatgcggcggagggcgcaccggaggagaattgctccgccaagcccaccaagcagggcgagggcctccgccactactattctcacaacatccacgagcatcagctccttctccgtcaaaagacgcataacctcaaccgtcttgaggctcagagaaacgagctcaattccagggtgaggatgctgcgcgaagaattacagcttttgcaggaaccaggctcttatgttggtgaagttgtcaaagtcatgggcaagaacaaagtccttgtcaaggtccacccagaaggaaaatatgtcgttgatattgacaaaagtattgacattacaaagattactccatccactagagttgcacttcgcaacgacagttatgttcttcacttagttctgccaagtaaagttgatccattggtcaatctgatgaaagttgagaaggttcccgattctacttacgacatgattggtggtttagaccagcaaattaaagaaataaaagaggtcattgagttaccaatcaaacatcctgagctgtttgaaagtcttggaattgcacaaccaaagggtgtcctgctctatgggccacctggtacaggaaaaacattgttggctagggcagtggctcatcatactgactgtacattcatcagggtgtctggttctgaattagttcagaaatacattggagaaggttctagaatggtcagggaactttttgttatggccagggaacatgctccatcaattatcttcatggacgaaattgacagtattggatctgctcggatggaatctggaagtggcaatggtgatagtgaggtacagcgtactatgctggaacttctcaatcagttggatggatttgaagcttcaaacaagatcaaggttttgatggccacaaatcggattgatatcctggatcaagccctccttagacctggacggattgaccggaagattgaatttccaaaccctaatgaagagtctcggctggatattttgaaaatccattcaagaagaatgaatttaatgcgtggcattgatctgaagaagattgccgagaagatgaatggagcatctggtgctgaacttaaggctgtttgcaccgaagctggaatgtttgcattgagggagcggagggtacacgtgactcaggaggattttgagatggctgtggccaaggtgatgaaaaaggagactgaaaaaaacatgtcattgcggaagttgtggaagtgatttttatttcatgtttgtggtgcacattattatcctgcgaagatgggcagcgaacacaccttagggttatttcaatttacagtggcattggatttcattttgcttaagtttaccaagttatgtaccgaatcatatgattctttctttgagtttttccttgtctgtgtcttcggacggcacactacatttatagagtatttttaaaagatttatattcaagaccactaaaaaagtagtctctaatctaaaactactgaaaatcattggggcacccccatgtcaaaacccattctttttcaaacatcggacaaatggtagtaaaagcttacctacc

SEQ ID NO: 4736 - protein, 418 aa, Glycine max
MALVGVEVKHAAEGAPEENCSAKPTKQGEGLRHYYSHNIHEHQLLLRQKTHNLNRLEAQRNELNSRVRMLREELQLLQEPGSYVGEVVKVMGKNKVLVKVHPEGKYVVDIDKSIDITKITPSTRVALRNDSYVLHLVLPSKVDPLVNLMKVEKVPDSTYDMIGGLDQQIKEIKEVIELPIKHPELFESLGIAQPKGVLLYGPPGTGKTLLARAVAHHTDCTFIRVSGSELVQKYIGEGSRMVRELFVMAREHAPSIIFMDEIDSIGSARMESGSGNGDSEVQRTMLELLNQLDGFEASNKIKVLMATNRIDILDQALLRPGRIDRKIEFPNPNEESRLDILKIHSRRMNLMRGIDLKKIAEKMNGASGAELKAVCTEAGMFALRERRVHVTQEDFEMAVAKVMKKETEKNMSLRKLWK

SEQ ID NO: 4737 - DNA, 1200 bp, Glycine max
  CDS (1)..(1200)
atgacggatgcagctgaagacgctacacgacgccgtaatgcggtggccgagtaccgcaagaaacttcttcaacacaaggaattggaatccagagtacgatccgtcagagaaaatttgcgtgcctcgaagaaagagttcaacaaaactgaagatgatttgaagtctcttcaaagcgttggacagatcattggcgaagttcttaggcctctcgacaatgaacgcttgattgttaaggcaagcagcggacctaggtatgtggttggctgccgcagtaaagtagataaggaaaaactgaccgctggtacaagagtggttcttgatatgaccacgctaaccataatgcgagctcttccacgtgaagttgatccagtagtttacaatatgcttcatgaggatcctggtaatatcagttactctgctgttggtggtttatctgatcagataagggaattgagggaatcaattgaattacctctgatgaatcctgagctcttcattcgagttggaattaaacctcctaagggtgttctcctttatgggcctcctggtactggtaaaacattgttagctagggcaattgccagtaacatagaagctaacttcttgaaggttgtttcaagtgcaataattgataaatacattggagaaagtgccaggttaattcgagaaatgtttggctatgcacgtgatcaccagccttgcatcatttttatggatgagatcgatgccattggtggtcgtcgtttcagtgagggaacaagtgctgatcgtgagattcagagaacactaatggagttgcttaatcaacttgatgggtttgatcaacttgggaaggttaaaatgataatggcaacaaaccgtcctgatgtactggatcctgctcttctgcgtcctggaagattagatagaaaaatagaaattccattgccaaatgaacaatcaaggatggaaattcttaagattcatgctgctgggattgctaagcacggtgaaatagattacgaagctgttgtgaaacttgctgagggctttaatggagctgatcttcgaaatgtgtgcacggaagctggaatggcagcaattcgtgcagaacgcgattatgtgatccatgaagattttatgaaggctgttagaaaactgaatgatgcaaagaaacttgaatccagtgctcactacagtgctgattttggcaaagactaa

SEQ ID NO: 4738 - protein, 399 aa, Glycine max
MTDAAEDATRRRNAVAEYRKKLLQHKELESRVRSVRENLRASKKEFNKTEDDLKSLQSVGQIIGEVLRPLDNERLIVKASSGPRYVVGCRSKVDKEKLTAGTRVVLDMTTLTIMRALPREVDPVVYNMLHEDPGNISYSAVGGLSDQIRELRESIELPLMNPELFIRVGIKPPKGVLLYGPPGTGKTLLARAIASNIEANFLKVVSSAIIDKYIGESARLIREMFGYARDHQPCIIFMDEIDAIGGRRFSEGTSADREIQRTLMELLNQLDGFDQLGKVKMIMATNRPDVLDPALLRPGRLDRKIEIPLPNEQSRMEILKIHAAGIAKHGEIDYEAVVKLAEGFNGADLRNVCTEAGMAAIRAERDYVIHEDFMKAVRKLNDAKKLESSAHYSADFGKD

SEQ ID NO: 4739 - DNA, 1670 bp, Glycine max
  CDS (124)..(1455)
tcagctacgtaggcgattgggtaccggccccccccaaaagccatctccctttcttcctaacacggaacactggtttcgaacccttgttgtggttaggtcttcacatttcgaatttgggaattcatgggtcagggaactccgggcggcatgaaccggcagggcgaccggaagccggacggcggcgacaagaaggagaagaagttcgagccggcggcgccgccagcacgcgtggggcggaaacagcggaagcagaagggcccggaggcggcggcgcggctgccgacggtgactccggtgacgaagtgcaagctgcggctgctgaagctggagcggatcaaggactacctactgatggaggaagagttcgtggcgaatcaggagcgactcaagccgcaggaggagaaggccgaggaagacagatccaaggtcgacgatctccgaggctctcccatgagcgtcggaaatctcgaagagctcatcgacgaaaatcacgctattgtttcctcctccgtcgggcctgagtattacgtcggaatcttgtctttcgtcgataaggatcagttggagcctggttgtgctattttgatgcataataaggttctttctgttgttgggcttcttcaagatgaagttgatccaatggtctctgttatgaaggtcgagaaagctcctctggaatcttatgctgacattggtggtttagatgcccaaatacaggaaattaaagaagcagttgagctacccctgacacatcctgaactatatgaagacattggtatcaagcctcctaagggggtcattttatatggagaacctggtactgggaagaccttgcttgcgaaggccgtggcaaactcaacatcagcaacattcttgcgcgttgttggtagtgaattgatacaaaagtacttgggagatggcccaaaacttgtgagagaacttttcagagttgccgatgatctttctccttctattgtattcattgatgaaatcgatgcagttggtacaaaaaggtatgatgctcactcaggtggagaacgtgagattcaaaggaccatgttagagttgctgaaccagttagatggttttgattctagaggagatgtaaaagtgattctggcaaccaacagaattgaaagtcttgatccagctttgctacggcctggtcgaattgacaggaagatagaatttcctcttcctgatatcaaaacaaggagacgcatctttcagatacacacatcgaggatgacattagctgatgatgtcaacttggaagaatttgttatgactaaagatgaattctctggagctgatataaaggcaatatgtactgaagccggtttacttgctctacgagaacgccgaatgaaggtgactcatgccgactttaagaaggccaaggataaagtgatgtttaagaagaaagaaggggtgcctgaagggctgtatatgtgaaatactatcctctatcatcctcgctcctcctgtctttttttcaatgttctagttatgcgaacaaatgataattcatttgtattatgcgaacaaatgtcagttttattttggaggctttgaatctcaacaacgattttaattcaatatagttttctttcaattccattgattttggaacccgttccatattctattataaagcagctcattaccct

SEQ ID NO: 4740 - protein, 443 aa, Glycine max
MGQGTPGGMNRQGDRKPDGGDKKEKKFEPAAPPARVGRKQRKQKGPEAAARLPTVTPVTKCKLRLLKLERIKDYLLMEEEFVANQERLKPQEEKAEEDRSKVDDLRGSPMSVGNLEELIDENHAIVSSSVGPEYYVGILSFVDKDQLEPGCAILMHNKVLSVVGLLQDEVDPMVSVMKVEKAPLESYADIGGLDAQIQEIKEAVELPLTHPELYEDIGIKPPKGVILYGEPGTGKTLLAKAVANSTSATFLRVVGSELIQKYLGDGPKLVRELFRVADDLSPSIVFIDEIDAVGTKRYDAHSGGEREIQRTMLELLNQLDGFDSRGDVKVILATNRIESLDPALLRPGRIDRKIEFPLPDIKTRRRIFQIHTSRMTLADDVNLEEFVMTKDEFSGADIKAICTEAGLLALRERRMKVTHADFKKAKDKVMFKKKEGVPEGLYM

SEQ ID NO: 4741 - DNA, 1456 bp, Glycine max
  CDS (100)..(1356)
ggttttgttcttctgtctaccgacctaacccaagacgagagaatagaggaagcttggggtttgaatcgaatcgaatcgaagcgattcatcgatcgatcgatggctcttgtaggagttgaactgaagcatgcggcggagggcgtaccggaggcgaattgctccgccaagcccaccaagcagggcgagggcctccgccactactattctctcaacatccacgagcatcagctccttcttcgccaaaagactcataacctcaaccgtctcgaggctcagagaaacgacctcaattctagggtgaggatgctgcgcgaagaattacagcttctgcaggaacccggctcttatgtcggtgaagttgtcaaagtaatgggcaagaacaaagtccttgtcaaggtccacccagaaggaaaatatgttgttgacattgacaaaaatattgacattacaaagattactccatccactagagttgcactccgcaacgacagttatgttcttcacttagttctgccaagtaaagttgatccattggtcaatctgatgaaagttgagaaagttcccgattctacatatgacatgattggtggtttagaccagcaaattaaagaaataaaagaggtcattgagctaccaatcaaacatcctgagctgtttgaaagtcttggaattgcacaaccaaagggtgtcctgctctatgggccacctggtacaggtaaaacattgttggctagggcagtggctcatcatactgactgtacattcatcagggtgtctggttctgagttagttcagaaatacattggagaaggttctagaatggtcagggaactttttgttatggccagggaacatgctccatcaattatcttcatggatgaaattgacagtattggatctgctcggatggaatctggaagtggcaacggtgatagtgaggtacagcgtactatgctggaacttctcaaccagttggatggatttgaagcttcaaataagatcaaggttttgatggccaccaatcggattgatatcctggatcaagccctccttagaccaggacggatagaccggaaaattgaatttccaaaccctaatgaagagtctcggctggatattttgaaaatccattctagaagaatgaatttaatgcgtggcattgatttgaagaagattgccgagaagatgaatggagcatctggtgctgaacttaaggctgtttgcactgaagctggaatgtttgctttgagggagcggagggtacacgtgactcaggaggattttgagatggccgtggcgaaggtgatgaaaaaggagactgaaaaaaacatgtcattgcggaagttgtggaagtgattctcatttcatgtttgtggtgcacattgtcctgcgaagatgggcagagaacacacattagggttatttcaatttacagtggcattggctttcgttttac

SEQ ID NO: 4742 - protein, 418 aa, Glycine max
MALVGVELKHAAEGVPEANCSAKPTKQGEGLRHYYSLNIHEHQLLLRQKTHNLNRLEAQRNDLNSRVRMLREELQLLQEPGSYVGEVVKVMGKNKVLVKVHPEGKYVVDIDKNIDITKITPSTRVALRNDSYVLHLVLPSKVDPLVNLMKVEKVPDSTYDMIGGLDQQIKEIKEVIELPIKHPELFESLGIAQPKGVLLYGPPGTGKTLLARAVAHHTDCTFIRVSGSELVQKYIGEGSRMVRELFVMAREHAPSIIFMDEIDSIGSARMESGSGNGDSEVQRTMLELLNQLDGFEASNKIKVLMATNRIDILDQALLRPGRIDRKIEFPNPNEESRLDILKIHSRRMNLMRGIDLKKIAEKMNGASGAELKAVCTEAGMFALRERRVHVTQEDFEMAVAKVMKKETEKNMSLRKLWK

SEQ ID NO: 4743 - DNA, 1558 bp, Glycine max
  CDS (31)..(1371)
ctaactttcgcatattcgaaaaccaaaagcatgggtcagggaacaccgggcggtctgaaccggcagggtcttccgggggaccggaagccggacggcggcgacaagaaggagaagaagttcgagccggcggcgccgccggcccgcgtgggccgtaagcagcgtaagcagaagggcccggaggcggcggcgcggctgccgacggtgacgccgctgtcgaagtgcaagctaaggctgctgaagctggagcgcataaaggactacctcttgatggaggaggagttcgtggcgaaccaggagaggctgaagccgcaggaggagaaggccgaggaagacagatccaaggtcgatgatctccgaggttctcctatgagcgttggtaacctagaggaactcattgacgagagtcatgccatagtttcgtcctcggtggggcccgagtactatgttggtatcttgtctttcgtcgataaggatcagctcgagcctggatgcgctattttgatgcataacaaggttctctctgttgttgggcttcttcaagatgaagttgatccaatggtctctgttatgaaggttgaaaaggcacctttggaatcatatgctgatattggtggtttagatgctcagatacaggaaattaaagaagcagtcgaacttcccctgacgcatcctgaactgtatgaagacattggtatcaagcctcctaagggagtcattttatacggcgaacctggaactgggaagacgttgctagctaaggctgtggcaaactcgacatcagcaacctttttacgtgttgttggtagtgaattaatacaaaaatacttgggagatggtccaaaacttgtaagggaacttttccgagttgctgatgatctttccccatctattgtcttcattgatgaaattgatgccgttggtacaaagaggtatgatgcccactcaggtggagaacgtgaaattcagaggactatgttggagttgctgaaccagttagatggtttcgattcaagaggtgatgttaaagtgattcttgcaaccaacagaattgaaagccttgatccagccctgctgcgacctggtcgaattgacaggaagattgaatttcctctccctgatatcaaaacaagaagacgcattttccagatacatacttcaaggatgacattagctgatgatgtcaacttagaagaatttgttatgactaaggatgagttctctggagctgatataaaagcaatatgtactgaagctggcttacttgctttacgagaacgccggatgaaggtgacgcatgccgacttcaagaaggcaaaggataaggttatgtttaagaagaaagaaggggtgccagaaggactgtatatgtgaagcatcttcatcatttaccccggccttctttctttattacagtctttttgttgttctgtgaacggatgtttgtattttgatttgtggtcgtttatgggtctacattatcacgggatttaatctcaactatagttacatagctttctttgatttaaaaaaatcgggaaaattttcctgccatttcttc

SEQ ID NO: 4744 - protein, 446 aa, Glycine max
MGQGTPGGLNRQGLPGDRKPDGGDKKEKKFEPAAPPARVGRKQRKQKGPEAAARLPTVTPLSKCKLRLLKLERIKDYLLMEEEFVANQERLKPQEEKAEEDRSKVDDLRGSPMSVGNLEELIDESHAIVSSSVGPEYYVGILSFVDKDQLEPGCAILMHNKVLSVVGLLQDEVDPMVSVMKVEKAPLESYADIGGLDAQIQEIKEAVELPLTHPELYEDIGIKPPKGVILYGEPGTGKTLLAKAVANSTSATFLRVVGSELIQKYLGDGPKLVRELFRVADDLSPSIVFIDEIDAVGTKRYDAHSGGEREIQRTMLELLNQLDGFDSRGDVKVILATNRIESLDPALLRPGRIDRKIEFPLPDIKTRRRIFQIHTSRMTLADDVNLEEFVMTKDEFSGADIKAICTEAGLLALRERRMKVTHADFKKAKDKVMFKKKEGVPEGLYM

SEQ ID NO: 4745 - DNA, 1614 bp, Glycine max
  CDS (125)..(1456)
aaacactagtagtctagtacattacatcacaaaaatatcatccctctttgttcctaaacacggggcactggtttcgaaccctcgttgtggttaggtcttcttcacctttcgaattttggaatccatgggtcagggaactccgggcggcatgaaccggcagggcgaccggaagccggacggcggcgacaagaaggagaagaagttcgagccgtcggctccgccggcgcgcgtggggcggaaacagcggaagcagaaaggtccggaggcggcggcgcggttgccgacagtgactccggtgacgaagtgcaaactgcggcttctgaagctggagcggatcaaggactaccttctgatggaggaggagttcgtggcgaatcaggagcgactcaagccgcaggaggagaaggccgaggaagacagatccaaggtcgatgatctccgaggctctcccatgagcgtcggaaacctcgaagagctcatcgacgagaatcacgctattgtctcctcctccgttgggcctgagtactatgtcggaatcctgtctttcgttgataaggatcagttggagcctggttgtgctattttgatgcataataaggttctttctgttgttgggcttcttcaagatgaagttgatccaatggtctctgtcatgaaggttgagaaggctcctctggaatcttatgctgacattggtggtttagatgcccaaatacaggaaattaaagaagcagttgagctacccctgacgcatcctgaactatatgaagacattggtatcaagcctcctaagggggtcattttatatggagaacctggaactgggaagacattgcttgcgaaggctgtggcaaactcaacatcagcaacattcttgcgtgttgttggtagtgaactgatacaaaagtacttgggagatggcccaaaacttgtaagagaacttttcagagttgctgatgatctttctccttctattgtattcattgatgaaattgatgcagttggtacaaaaaggtatgatgctcactcaggaggagaacgtgaaattcaaaggaccatgctagagttgctgaaccagttagatggttttgattcaagaggagatgtgaaagtgattctggcaaccaacagaattgaaagtcttgatccagctttgctacgacctggtcgaattgacaggaagatagaatttcctcttcctgatatcaaaacaaggagacgcatcttccagatacacacgtcaaggatgacattagctgatgatgtcaacttggaagaatttgttatgactaaagacgaattctccggagctgatataaaggcaatatgtactgaagctggtttacttgctctacgagaacgtcgaatgaaggtgactcatgccgactttaagaaggccaaggataaagtgatgtttaagaagaaagaaggggtgcctgaagggctgtatatgtgaaaaactatcctctattatctctggccctcttgtctttcttttaacgttctagttatgcgaacaaatgccaattcatttgtattctgcgaacaaatgtcagttgtattttaggggctttgaatctcaacaacgattttaattcaatatagttttctttc

SEQ ID NO: 4746 - protein, 443 aa, Glycine max
MGQGTPGGMNRQGDRKPDGGDKKEKKFEPSAPPARVGRKQRKQKGPEAAARLPTVTPVTKCKLRLLKLERIKDYLLMEEEFVANQERLKPQEEKAEEDRSKVDDLRGSPMSVGNLEELIDENHAIVSSSVGPEYYVGILSFVDKDQLEPGCAILMHNKVLSVVGLLQDEVDPMVSVMKVEKAPLESYADIGGLDAQIQEIKEAVELPLTHPELYEDIGIKPPKGVILYGEPGTGKTLLAKAVANSTSATFLRVVGSELIQKYLGDGPKLVRELFRVADDLSPSIVFIDEIDAVGTKRYDAHSGGEREIQRTMLELLNQLDGFDSRGDVKVILATNRIESLDPALLRPGRIDRKIEFPLPDIKTRRRIFQIHTSRMTLADDVNLEEFVMTKDEFSGADIKAICTEAGLLALRERRMKVTHADFKKAKDKVMFKKKEGVPEGLYM

SEQ ID NO: 4747 - DNA, 1191 bp, Coprinopsis cinerea okayama7#130
  CDS (1)..(1191)
atggcttcctcatccacatcacaatttgaccagcgcaaaaaggacgcgctcaaggcctacagagataaattgaagcagcacgaaacgaatagcgaaagcctgaagaaccttcgattctcgttaaaggacctcgagaaagcctatgcaaagacagaggaagacatcaaggccgtccagtccgtcggccaaatcattggagaagtcatgaaacaactcgacgacgaccgctttattgttaaagcatcttcaggaccccgctatgtcgtatcgtacagaccaacactcccagtcgacaaactcaaagcaggaacccgtgtttcattagacatgaccaccctcaccattatgcggatattgccccgagaagtcgacccattggtctacaagatgagtatggaagaccctggaggagcttctttcgccggtattggtggtctcggtgaacaggtccgagaactacgagagatcatcgaactccctctcctcaaccctgaactcttccaaagagtaggcatcaaacctccaaagggtgtcctgctatatggtccaccaggaacaggaaagactctcctcgcccgagcagtcgcagcaaccctcaacaccaacttcctcaaagtcgtctcatccgccatcgtcgacaagtacatcggagagtcagctcgtgtggtcagagagatgttcggttatgcccgtgaacatgagccttgtgtgatattcatggacgaaatcgacgccattggtggtcgtcgtttctcagaaggaacgagtgcggatcgtgaaattcagcgaacgctaatggagttgctaaaccaaatggacggtttcgattcgctaggaaggacgaagctcatcatggccactaaccgacccgataccctcgatccagccctcctacgacccggacgactcgaccgaaagatcgagattccgcttcccaacgagcaagcccgactagaaattctcaagattcacactggtccagtgaacaagaacggcgaaatcgattacgaggcagtcgtgaagctttcagacggtttcaacggtgccgatcttcgaaacgtggttaccgaagctggaatgttcgccatccgggacgacagagagtacatcatccaggaagacttaatcaaggcggcgagaaaggttggcgaggcgaagaaacacgagacgaagctggagtactcgacgtaa

SEQ ID NO: 4748 - protein, 396 aa, Coprinopsis cinerea okayama7#130
MASSSTSQFDQRKKDALKAYRDKLKQHETNSESLKNLRFSLKDLEKAYAKTEEDIKAVQSVGQIIGEVMKQLDDDRFIVKASSGPRYVVSYRPTLPVDKLKAGTRVSLDMTTLTIMRILPREVDPLVYKMSMEDPGGASFAGIGGLGEQVRELREIIELPLLNPELFQRVGIKPPKGVLLYGPPGTGKTLLARAVAATLNTNFLKVVSSAIVDKYIGESARVVREMFGYAREHEPCVIFMDEIDAIGGRRFSEGTSADREIQRTLMELLNQMDGFDSLGRTKLIMATNRPDTLDPALLRPGRLDRKIEIPLPNEQARLEILKIHTGPVNKNGEIDYEAVVKLSDGFNGADLRNVVTEAGMFAIRDDREYIIQEDLIKAARKVGEAKKHETKLEYST

SEQ ID NO: 4749 - DNA, 1392 bp, Coprinopsis cinerea okayama7#130
  CDS (1)..(1392)
atgtcctcctcgacgccgcccaacgatcctccatcaaactcagagaagaagccagaggagacgcctctgctctcctcgacagatcagacagacaatgcacagatggacacctccccagataccgtcccgccacccccgcccgaggaaacttgggacgatattcctgaagacattctctctctgagtgcagacgaaattgctacacgaacacggctaattgacaacgacatcaaggttatgaggtcagagaccctccggctgcaacacgagcaaagcgtgatgaaggagaagattcgtgacaacggggagaagattaaacagaacaaagtattgccttaccttgttgcaaacgtcgtcgaaattcttgacctggatcctgaaggcgaggaagctggttcagcacaggacgagaactctatgaggaaaggaaagtgtgcggtcattaaaacctcaacacggcaaaccgttttcctcccaatgattggcctcgttcctcccgagaaccttaaaccacaagatctcgtcggtgtgaacaaggattcttatctcattctggacaccctccccgtggaattcgactcgcgagtgaaggctatggaagttgatgaacggccgacggagaagtataccgacattggtggtttggaaaagcagattgaggaactagtcgaggctatcgtcctgcctatggaacaagcggacaagttcaagaccctcggaattaaaccgccgaagggttgcttgatgtatggtcctccaggaacgggcaagacccttctcgctcgagcatgtgctgcatctaccaacgcctgctacctcaagctcgctgccccttcgctggttcagatgttcatcggtgacggcgccaagctcgttcgggacgcatttgccctggcaaaggagaaggcacctgctatcattttcatcgacgaactagacgccattggaaccaaacgattcgactcggacaagagtggtgatcgtgaagtccagagaaccatgttggagcttctcaaccagctggatggtttcggaagtgatgaacgtatcaaggtcatcgctgcaacaaaccgaattgacattctcgatcctgcattgctgcgctctggtcgtctggatcggaaaattgaattccctctgccgaacgagaccgctcgtgcccgtatcctggagattcactcacggaagatgtcatgttcaccagacgtcaactacgatgaacttgctaggagtacggacgagttcaacggagcccaactcaaggcggtctgtgtggaggccggtatgattgcactacgcgaaggtgcaactaagctaaatcacgaacacttcttgagcggtatagcagaagtacaaagcaagaagaagaacaacctcatgtatttcgcatag

SEQ ID NO: 4750 - protein, 463 aa, Coprinopsis cinerea okayama7#130
MSSSTPPNDPPSNSEKKPEETPLLSSTDQTDNAQMDTSPDTVPPPPPEETWDDIPEDILSLSADEIATRTRLIDNDIKVMRSETLRLQHEQSVMKEKIRDNGEKIKQNKVLPYLVANVVEILDLDPEGEEAGSAQDENSMRKGKCAVIKTSTRQTVFLPMIGLVPPENLKPQDLVGVNKDSYLILDTLPVEFDSRVKAMEVDERPTEKYTDIGGLEKQIEELVEAIVLPMEQADKFKTLGIKPPKGCLMYGPPGTGKTLLARACAASTNACYLKLAAPSLVQMFIGDGAKLVRDAFALAKEKAPAIIFIDELDAIGTKRFDSDKSGDREVQRTMLELLNQLDGFGSDERIKVIAATNRIDILDPALLRSGRLDRKIEFPLPNETARARILEIHSRKMSCSPDVNYDELARSTDEFNGAQLKAVCVEAGMIALREGATKLNHEHFLSGIAEVQSKKKNNLMYFA

SEQ ID NO: 4751 - DNA, 1206 bp, Coprinopsis cinerea okayama7#130
  CDS (1)..(1206)
atgccagtcgcaacgaaagcaccaatagcaccaggcggaataaagtcgtactaccaggccaagatcgaagcggccgagatcctcatcaaccagaaaacccagaacttgcggcggttggaggctcaacgaaatgctttgaacgctcgagtgcgtctgcttagagaagagttgcagctgttacatgaaccaggcagctatgttggagaagtggtgaaagttatgggcaagaagaaggttctggtgaaggtccagcctgaaggcaaatacatcgttgacatcgactctgaaatcgacatcaattcactgaaaccaacactgcgtgttgccctccgttccgactcctacacaatccaccgaatccttcccaacaaggtcgacccccttgtctcgctcatgatggtcgagaaggtgccagacagcacgtatgaaatggttggcggtctcgacaagcagatcaaggagataaaggaggtcatcgaactgccggtgaaacatccagaactgttcgaagccctcggtatcgcccagcccaagggtgtcctgctgtacgggccaccaggaaccggaaagaccctcctcgcccgtgccgtcgcccaccacacagactgcaaattcatccgagtcagtggaagtgagttggtgcagaagtacattggtgaaggtagcaggatggtgcgagagctgttcgtgatggctcgagaacatgctccaagtatcatcttcatggacgagatcgattccattggtagctcgcgtggagagagcggtagtggaggtggtgactccgaggtgcagcggacgatgttggaacttctgaaccagctggacggcttcgagtcgaccaagaacatcaaagtcatcatggccacgaatcgaatcgacattttggactctgctcttctacgacctggacgaattgaccgcaagatcgagttccctccgccaggccccgaggcccgtgttgccattcttcgaattcactctcgaaagatgtccctgcagcgtggaatcaacctgcgtgctcttgctgagaagatgggtcaatgctctggtgctgaggtcaggggtatctgtacggaagcgggcatgtacgccctacgagaaaggagacaacatgtaacgcaggaggatttcgagtttgcagtagcaaaggttctcaagaagaaccaagacgggaatacgtctgtcaacaaactgttctcttag

SEQ ID NO: 4752 - protein, 401 aa, Coprinopsis cinerea okayama7#130
MPVATKAPIAPGGIKSYYQAKIEAAEILINQKTQNLRRLEAQRNALNARVRLLREELQLLHEPGSYVGEVVKVMGKKKVLVKVQPEGKYIVDIDSEIDINSLKPTLRVALRSDSYTIHRILPNKVDPLVSLMMVEKVPDSTYEMVGGLDKQIKEIKEVIELPVKHPELFEALGIAQPKGVLLYGPPGTGKTLLARAVAHHTDCKFIRVSGSELVQKYIGEGSRMVRELFVMAREHAPSIIFMDEIDSIGSSRGESGSGGGDSEVQRTMLELLNQLDGFESTKNIKVIMATNRIDILDSALLRPGRIDRKIEFPPPGPEARVAILRIHSRKMSLQRGINLRALAEKMGQCSGAEVRGICTEAGMYALRERRQHVTQEDFEFAVAKVLKKNQDGNTSVNKLFS

SEQ ID NO: 4753 - DNA, 1182 bp, Culex pipiens quinquefasciatus
  CDS (1)..(1182)
atgtctgccgccgtcgagccagcccgagagaaagccctccaggactaccggaagaagctgctggagcacaaggaagtggaatcccgactgaaagagttgcgagaatccctgaaggaactgaccaagcagttcgacaagtctgagaatgacctgaaggcgctccagagcgttggtcagattgtaggcgaggtgctgaagcagctgactgaggacaagttcatcgttaaggcaacgaacggtccgcgctatgttgtcggatgtcgtcgccagctggacaagaccaagctaaagtcgggaactcgggtagcgctggacatgacaacgttaaccattatgcgatacctgccgagggaggtcgatcctctagtgtacaacatgtcccacgaagaccccggagaggtcacctattccgcgattggaggtttgtcggaacagattcgagagcttcgagaagtcattgaattaccgctgctcaatccggagctgttccttcgtgttggaattacgccaccgaagggatgtttgctgtacggaccaccgggaacgggtaaaactttgctggcccgtgcggtcgcttctcagctggacgcaaacttcctaaaggtggtttcgtcggccatcgtggataaatatattggagagtcggctcggttaatccgtgaaatgttcaactacgcccgggaccaccagccgtgtatcattttcatggacgagattgacgccatcggtgggcggcgattctccgagggcacttcggccgatcgtgaaattcaacgcacgctgatggagctgctcaaccagatggacggtttcgattcgctgggacaggtcaagatgattatggccacgaaccgaccggatacgttggatcctgcccttctacgtccgggtcgtctggacagaaagattgaaatcccgctacccaacgagcaggccagactggaaattttgaaaattcatgccggtccgatcgccaaacacggagacatcgactacgaagccgtggtgaaactttcggacaactttaacggcgccgatctgcgaaatgtgtgcaccgaggcgggattgtttgcgattcgggccgaacgcgagtacgtcatccaggaagactttatgaaagccgtccggaaggtagcagacaacaagagactggagagcaagctggactacaagccggtctaa

SEQ ID NO: 4754 - protein, 393 aa, Culex pipiens quinquefasciatus
MSAAVEPAREKALQDYRKKLLEHKEVESRLKELRESLKELTKQFDKSENDLKALQSVGQIVGEVLKQLTEDKFIVKATNGPRYVVGCRRQLDKTKLKSGTRVALDMTTLTIMRYLPREVDPLVYNMSHEDPGEVTYSAIGGLSEQIRELREVIELPLLNPELFLRVGITPPKGCLLYGPPGTGKTLLARAVASQLDANFLKVVSSAIVDKYIGESARLIREMFNYARDHQPCIIFMDEIDAIGGRRFSEGTSADREIQRTLMELLNQMDGFDSLGQVKMIMATNRPDTLDPALLRPGRLDRKIEIPLPNEQARLEILKIHAGPIAKHGDIDYEAVVKLSDNFNGADLRNVCTEAGLFAIRAEREYVIQEDFMKAVRKVADNKRLESKLDYKPV

SEQ ID NO: 4755 - DNA, 1230 bp, Culex pipiens quinquefasciatus
  CDS (1)..(1230)
atggccgaggtactgaatgtggacaaggacgagaccgagttccgcccctcgtcgaaggacactccgctggatgaggaatccatggaggatctgtacaccaagtacaagaagttgcagaagatgctcgagttcctcgaggtgcaggaagagtacatcaaggatgagcagcggaacctgaagaaggaatatctgcacgcccaggaggaggtcaaacggatccagtcggttccgctggtgatcggtcagttcctggaggccgtcgaccagaacaacggaatcgtcggatcgaccacgggatcgaactactttgtccggattctttccacgatcgaccgtgagctgctgaaaccttcggccagtgtggccctgcacaagcacagcaatgccctcgtcgatgtgctgccaccggaagcggacagctcaatctcgatgctgcaggcggacgaaaaaccggaagtccaatactcggacattggaggcatggacatgcaaaagcaggaaatccgcgaagccgtcgaacttccgctgacccactttgagctgtacaagcagatcggaatcgacccgccgcggggtgtcctcatgtacggtccgcccggctgtggcaagacgatgttggccaaggccgttgcccaccatacgacggccgccttcatccgcgtggtcggttcggagttcgtgcagaaatatctcggcgaaggaccccgaatggtgcgcgacgtgttccgtctggccaaggagaactcacccgcaatcatcttcatcgacgaaatcgacgccatcgccacgaagcgtttcgacgcccaaaccggtgccgatcgtgaagttcaacgtatcctgctcgagctgcttaaccagatggacggattcgatcagaccaccaacgtgaaggtcatcatggccaccaaccgtgccgacaccctggatccggccctgctccgaccgggtcgtctcgatcgtaaaattgaattcccccttcccgaccggcgtcagaagcgactgatcttttcgaccatcaccgccaagatgaacctctcggaggatgtcgatttggaggattatgtggcgaggccggacaagatttccggtgcggacattaacgccatctgccaggaggcgggaatgcacgcggtgcgcgagaaccggtatatcgtgctggccaaggactttgagaagggttacaagaataacatcaagaaggacgaaaccgagcacgagttttacaaataa

SEQ ID NO: 4756 - protein, 409 aa, Culex pipiens quinquefasciatus
MAEVLNVDKDETEFRPSSKDTPLDEESMEDLYTKYKKLQKMLEFLEVQEEYIKDEQRNLKKEYLHAQEEVKRIQSVPLVIGQFLEAVDQNNGIVGSTTGSNYFVRILSTIDRELLKPSASVALHKHSNALVDVLPPEADSSISMLQADEKPEVQYSDIGGMDMQKQEIREAVELPLTHFELYKQIGIDPPRGVLMYGPPGCGKTMLAKAVAHHTTAAFIRVVGSEFVQKYLGEGPRMVRDVFRLAKENSPAIIFIDEIDAIATKRFDAQTGADREVQRILLELLNQMDGFDQTTNVKVIMATNRADTLDPALLRPGRLDRKIEFPLPDRRQKRLIFSTITAKMNLSEDVDLEDYVARPDKISGADINAICQEAGMHAVRENRYIVLAKDFEKGYKNNIKKDETEHEFYK

SEQ ID NO: 4757 - DNA, 1317 bp, Culex pipiens quinquefasciatus
  CDS (1)..(1317)
atgggtcaaaatcagtccgccggcgggggtggcgacaagaaggatgacaaggacaagaagaaaaagtacgagcccccgattccgacccgggttggcaagaagaagcgcaaggccaagggaccggacgcggccatgaagctgccgcaggtcactccgcacacccggtgccggctgaagctgctgaagctggagcgcatcaaggactatctgctgatggaggaggagttcatccggaaccaggagcggctgaagccccaggacgagaagaacgaggaggaacggtccaaggtcgatgacctgcggggaactccgatgtcggtggggaacttggaggagattattgacgataatcacgcgatcgtgtcgacttcggtgggcagcgagcattacgtgagtattttgtcgtttgtggacaaagaccagctcgagccgggttgttccgtgctgctgaaccacaaagttcacgccgtggtgggtgttttgggggatgacaccgacccgatggtgacggtgatgaagctggagaaggcaccgcaggagacgtacgcggacattggtgggttggacacgcaaatccaggaaattaaggaatctgttgaacttccgctgacccatccggagtactacgaggagatgggaattaagcccccgaagggtgtcattctgtacggaccgccgggaaccgggaagaccctgctggcgaaggccgtggccaatcaaacgtcggcgacgttcctgcgagtggtcgggtcggaactgattcagaaatatctcggcgatggtccgaagctggttcgcgagttgttccgtgtggccgaggagcacgcgccgtcgattgtgtttatcgacgaaattgacgccgtcggaaccaaacggtacgattcgaattcgggtggcgagcgtgaaatccagcgaaccatgttggaactgctgaaccagctggacgggtttgattcgcgcggtgacgtcaaagtcatcatggccaccaaccgtatcgagacgctcgatccggccctgatccgtccgggacgaattgaccggaagattgagttccccctgcccgacgaaaagaccaagcggcgcatcttcaacatccacacggcgcggatgacgctggccgaggacgtgaacctgtcggagctgattatggccaaggacgatctgtccggggcggacatcaaggcgatctgtaccgaggcggggctgatggcactgcgcgagcgccgcatgaaggtcaccaacgaagactttaagaaatccaaggagagtgttctgtaccgcaagaaggagggcacccccgagggactatatctgtag

SEQ ID NO: 4758 - protein, 438 aa, Culex pipiens quinquefasciatus
MGQNQSAGGGGDKKDDKDKKKKYEPPIPTRVGKKKRKAKGPDAAMKLPQVTPHTRCRLKLLKLERIKDYLLMEEEFIRNQERLKPQDEKNEEERSKVDDLRGTPMSVGNLEEIIDDNHAIVSTSVGSEHYVSILSFVDKDQLEPGCSVLLNHKVHAVVGVLGDDTDPMVTVMKLEKAPQETYADIGGLDTQIQEIKESVELPLTHPEYYEEMGIKPPKGVILYGPPGTGKTLLAKAVANQTSATFLRVVGSELIQKYLGDGPKLVRELFRVAEEHAPSIVFIDEIDAVGTKRYDSNSGGEREIQRTMLELLNQLDGFDSRGDVKVIMATNRIETLDPALIRPGRIDRKIEFPLPDEKTKRRIFNIHTARMTLAEDVNLSELIMAKDDLSGADIKAICTEAGLMALRERRMKVTNEDFKKSKESVLYRKKEGTPEGLYL

SEQ ID NO: 4759 - DNA, 1302 bp, Culex pipiens quinquefasciatus
  CDS (1)..(1302)
atgccggaccatctcggagatgatatgcggaaggtcaaggttgacaaggaggccgagccggaaatcgaagctcttgacgatgtcgacatcgagctgctgaaaacctacggacaaggccagtaccacaaagccatcaagcaaatcgaggacgacatccaaaagtccatcaagcaggtcaacgagttgaccggaatcaaggaaagcgacaccgggttggccccgccggcgctgtgggatttggccgcggacaagcaaatcttgcagaatgagcaaccgttgcaggttgcccggtgtacaaagatcatcaacgcggattccgacgatccgaagtatatcatcaacgtgaagcaatttgccaagtttgtggttgatctggccgattccgttgctccgaccgacatcgaggagggaatgcgcgttggcgttgaccggaacaagtatcagattcatattccgttgccgccgaaaatcgatcccacggtgaccatgatgcaggtcgaggagaagccggacgtgacctacagcgatgtcggcggatgcaaggagcagattgagaaactgcgcgaagtggtggagactcccctgctgcatccggaaaagtttgttaaccttggcatcgagccaccaaagggtgtgttgctgtttggaccgcccggaaccggcaaaaccctgtgcgcacgagcggttgcgaaccgtacggatgcctgctttattcgagtgattggatcggaactggtgcaaaagtacgtaggcgaaggtgcccgcatggttcgcgagctgttcgaaatggcccgctccaagaaggcttgtttgatcttcttcgacgaaatcgacgcaatcggaggagctcgattcgacgatggtgccgggggtgacaacgaggtccagagaaccatgttggagctgatcaatcaactggacggtttcgatccccgtggtaacatcaaggtcctgatggccactaaccggccggatacgttggacccggcactgatgcgtccaggtcgtctcgatcgtaaggttgagtttggtctgccagatctggagggcagaacgcacatcttcaagatccacgcccgatcaatgtccgttgaacgggacatccgtttcgaactgctcgcgcgtctctgtcccaactcgaccggggccgaaatcagatcggtctgcacggaagcgggaatgttcgctattcgggctcggcgcaaggtggccaccgaaaaggatttcctcgaagccgtcaacaaggtcatcaagagctacgccaagtttagcgccaccccgagatatatgacttataattag

SEQ ID NO: 4760 - protein, 433 aa, Culex pipiens quinquefasciatus
MPDHLGDDMRKVKVDKEAEPEIEALDDVDIELLKTYGQGQYHKAIKQIEDDIQKSIKQVNELTGIKESDTGLAPPALWDLAADKQILQNEQPLQVARCTKIINADSDDPKYIINVKQFAKFVVDLADSVAPTDIEEGMRVGVDRNKYQIHIPLPPKIDPTVTMMQVEEKPDVTYSDVGGCKEQIEKLREVVETPLLHPEKFVNLGIEPPKGVLLFGPPGTGKTLCARAVANRTDACFIRVIGSELVQKYVGEGARMVRELFEMARSKKACLIFFDEIDAIGGARFDDGAGGDNEVQRTMLELINQLDGFDPRGNIKVLMATNRPDTLDPALMRPGRLDRKVEFGLPDLEGRTHIFKIHARSMSVERDIRFELLARLCPNSTGAEIRSVCTEAGMFAIRARRKVATEKDFLEAVNKVIKSYAKFSATPRYMTYN

SEQ ID NO: 4761 - DNA, 1287 bp, Culex pipiens quinquefasciatus
  CDS (1)..(1287)
atggcgggaaccctggaggacaagtcgatctgggaggacggtgaggaaacgctcggcgaggaggtgctccggatgcccacggacgaaatcgtcagccggaccaggttgatggacaatgagatcaaaattatgaagagcgaagtgatgcggattacgcacgagctgcagacgcaaaacgaaaagattaaggacaacacggaaaagataaaggtgaacaaaacgctgccgtatttggtgtcgaacgtgattgagctgctggacgtggacccgcaggaggaggaggacgacggggcggtggtggtgctggattcgcagcggaagggcaagtgcgccgtcatcaagacttcgacccggcagacgtactttttgcccgtgattgggctcgtcgatccggagaagctgaagccgggcgatttggtgggcgtgaacaaggactcgtacctcatcctggagacacttccggccgagtacgatgcgcgcgtcaaggcgatggaggtggacgaacggcccaccgaacagtactcggacattggcgggttggacaaacaaatccaggaactgatcgaagccgtcgtgctgccgatgacgcacaaggacaagtttaagaacctgggaattcatccgccgaagggagtgttgctttatggacctcccggaacgggaaaaacgctgctggctcgtgcctgcgcggcgcaaacaaagtcgaccttcctgaagctggccggtccgcagctggtgcagatgttcatcggtgacggcgccaagctcgtccgggacgcgttcgcactggccaaggaaaagtcgccggcgatcatcttcatcgacgagttggacgccatcggcacgaaacgtttcgactcggagaaggccggagatcgcgaggtgcagcgaaccatgttggagctgctcaaccagctggacgggttcagttcgacggcggacatcaaggtgatcgccgccaccaaccgggtggacattctcgatccggcactgctgcgttcgggtcgattggatcgaaagatcgaattcccgcacccgaacgaggaggcgcgcgcccgcatcatgcagattcactcgcgcaagatgaacgtcagcccggacgtgaactttgaggagctggcccggtccacggacgattttaacggggcccagtgcaaggccgtgtgcgtcgaggccggtatgattgcgctgcgtcggtcggccgtcgccgtcacccatgaggactttatggacgccatcatggaggtgcaggccaagaagaaggccaaccttaactattatgcttag

SEQ ID NO: 4762 - protein, 428 aa, Culex pipiens quinquefasciatus
MAGTLEDKSIWEDGEETLGEEVLRMPTDEIVSRTRLMDNEIKIMKSEVMRITHELQTQNEKIKDNTEKIKVNKTLPYLVSNVIELLDVDPQEEEDDGAVVVLDSQRKGKCAVIKTSTRQTYFLPVIGLVDPEKLKPGDLVGVNKDSYLILETLPAEYDARVKAMEVDERPTEQYSDIGGLDKQIQELIEAVVLPMTHKDKFKNLGIHPPKGVLLYGPPGTGKTLLARACAAQTKSTFLKLAGPQLVQMFIGDGAKLVRDAFALAKEKSPAIIFIDELDAIGTKRFDSEKAGDREVQRTMLELLNQLDGFSSTADIKVIAATNRVDILDPALLRSGRLDRKIEFPHPNEEARARIMQIHSRKMNVSPDVNFEELARSTDDFNGAQCKAVCVEAGMIALRRSAVAVTHEDFMDAIMEVQAKKKANLNYYA

SEQ ID NO: 4763 - DNA, 1209 bp, Culex pipiens quinquefasciatus
  CDS (1)..(1209)
atgactgccaccaagatggacgtcgattcccagaagggcgaggggttccggtcatactacatccagaagatcgaagagctgcagctgatcgtggcggagaagaaccagaacctgcgccgactgcaggcccagcggaacgagctgaacgccaaggtccggatgttgcgcgaagagttgcagctgctgcaggagcagggcagctacgtaggcgaggttgtcaagccgatggacaagaagaaggtgctggtgaaagtccacccggagggcaagtttgtcgtggacatcgataagaacatcgacattaacgacgtgacgccaaactgccgagttgcgctgcggaacgaaagctacactctgcacaagatcctgccgaacaaggtcgacccgctggtgtcgctgatgatggtcgagaaggtgccggactcgacgtacgaaatggtcggaggattggacaagcaaatcaaggagattaaggaagtcatcgaactgccagtgaagcacccggaactgtttgacgccctcggaatcgcccaacccaagggagtcctgctctacggacctccgggaactggaaaaaccctgcttgctcgtgccgtggctcaccacaccgagtgcaccttcatccgcgtgtccggctccgaactggtccagaagttcatcggcgaaggttctcgaatggtgcgcgaactgttcgtgatggcccgcgagcacgccccgtccatcatcttcatggacgaaatcgattccatcggttcgtcccgtatcgaaagcggcagcggcggcgactccgaagtccagcgtaccatgcttgagctcctcaaccaactggacggtttcgaagccaccaagaacatcaaggtcatcatggccaccaaccgcatcgacatcctggaccccgccctgctccgtcccggccgtatcgatcgcaagatcgagtttcccccaccaaacgaggaagcccgtctggacatcctgaagatccactcgcgtaagatgaacctgacgcgtggaatcaacctgcgcaagatcgccgaactcatgcccggagcgtccggcgccgaggttaagggcgtctgtaccgaggcgggaatgtacgcgctgcgcgagcgtcgtgtccacgtcacccaggaagactttgagatggccgtggccaaggtgatgcagaaggactcggagaagaacatgtccatcaagaagttgtggaagtaa

SEQ ID NO: 4764 - protein, 402 aa, Culex pipiens quinquefasciatus
MTATKMDVDSQKGEGFRSYYIQKIEELQLIVAEKNQNLRRLQAQRNELNAKVRMLREELQLLQEQGSYVGEVVKPMDKKKVLVKVHPEGKFVVDIDKNIDINDVTPNCRVALRNESYTLHKILPNKVDPLVSLMMVEKVPDSTYEMVGGLDKQIKEIKEVIELPVKHPELFDALGIAQPKGVLLYGPPGTGKTLLARAVAHHTECTFIRVSGSELVQKFIGEGSRMVRELFVMAREHAPSIIFMDEIDSIGSSRIESGSGGDSEVQRTMLELLNQLDGFEATKNIKVIMATNRIDILDPALLRPGRIDRKIEFPPPNEEARLDILKIHSRKMNLTRGINLRKIAELMPGASGAEVKGVCTEAGMYALRERRVHVTQEDFEMAVAKVMQKDSEKNMSIKKLWK

SEQ ID NO: 4765 - DNA, 1506 bp, Bombyx mori
  CDS (184)..(1431)
cggcacgagaaaaatcattgaattgcagttttagaaagaaagaaagaattaaaataaccaaataataactaggtacgaatgttcaggtttgatcgtctactacactttgtctctgtgtaaaacacatttcagataatcaaataataatcagatagtacacgaaatctcttagctatagaaacaatggaagagattggaattattttacccgagaaagatgaccaagtcacagactcaaaaggcttggcgtttgctggtcctcaatcttttgatgaactcgaatctgaagatttatacacaaagtacaagaaactccaaagaatgttagagttcttagaagtacaagaagagtacattaaagatgaacaacgaaacttgaagaaagaatatttgcatgcacaggaagaagtaaagcgcatacagtctgttcctcttgtcattggacagtttcttgaggcagttgatcaaaatacaggcatagttggcagcaccactggctcaaattattatgtccgtattctctcaacaattgatagagaattgttgaagccatctgcttcagttgctctgcataagcattctaatgctctagttgacgtcttgcctcctgaagccgacagctcaatctctatgttgcaagctgatgagaaacctgatgttcaatattcggatattggaggcatggatacacaaaaacaagaaattagagaagctgttgaactccctctcactcatgtagagttgtaccggcaaatcggtattgagcctcctcggggtgtgctcatgtatggaccaccaggttgtggcaaaactatgctggctaaagctgttgcgcatcacactacagctgcattcattcgtgtcgtcggatcagagtttgtacagaagtacttaggagaaggaccccgtatggtgcgggacgttttccgtcttgccaaagagaacagcccagcaatcattttcattgatgaaattgatgccattgctactaaaagatttgatgcccaaactggtgctgacagagaagttcaaaggattttacttgaactcctcaatcaaatggatggttttgatcaaactactaatgttaaagtaataatggcgacaaatcgtgctgatacattggaccctgcgttgctaagacctggccgtctcgacagaaaaatcgagtttccacttccagataggcgtcaaaaacgtttgattttctcgacaatcactaccaagatgaacctttcggatgaagtggatttggaagagttcgtggctcgaccggaccgcgtgtccggcgccgacatcaacgccatctgtcaggaggccggcatgcacgctgtcagggaaaacagatatattgtccttcctaaagatttcgaaaagggttacaagaataacatcaagaaagatgagagcgaatatgaattttataaataaacgtcatttttctgtggattgtgtactaatatgtttacaactagaacattaaatctcttttcttaaaaataaaaa

SEQ ID NO: 4766 - protein, 415 aa, Bombyx mori
MEEIGIILPEKDDQVTDSKGLAFAGPQSFDELESEDLYTKYKKLQRMLEFLEVQEEYIKDEQRNLKKEYLHAQEEVKRIQSVPLVIGQFLEAVDQNTGIVGSTTGSNYYVRILSTIDRELLKPSASVALHKHSNALVDVLPPEADSSISMLQADEKPDVQYSDIGGMDTQKQEIREAVELPLTHVELYRQIGIEPPRGVLMYGPPGCGKTMLAKAVAHHTTAAFIRVVGSEFVQKYLGEGPRMVRDVFRLAKENSPAIIFIDEIDAIATKRFDAQTGADREVQRILLELLNQMDGFDQTTNVKVIMATNRADTLDPALLRPGRLDRKIEFPLPDRRQKRLIFSTITTKMNLSDEVDLEEFVARPDRVSGADINAICQEAGMHAVRENRYIVLPKDFEKGYKNNIKKDESEYEFYK

SEQ ID NO: 4767 - DNA, 1191 bp, Bombyx mori
  CDS (1)..(1191)
atgccggctagtacatcggacatggagccgttaagagaaaaggccttccaggattacagaaagaaactcatggagcataaggaagtcgagtcacgactcaaagaaggtcgtgaccaactaaaagatttgaccaaacaatatgacaagagtgaaaatgacctgaaagccctacaaagtgttggacaaatagttggagaagtcttgaaacagctcacagaagaaaaatttattgtaaaagctactaatggccctcgctacgttgttggctgtcgtcggcaacttgacaaaaacaagcttaaaggaggaacacgagttgcccttgacatgaccactcttacaataatgagacatctgcctagagaggttgatcccctagtttacaacatgagtcatgaggatcctggtgatgtgacctattccgccataggaggtcttcaagaacagattagacagctgagagaggtgattgaactgcccctaatgaacccagagctgtttgttcgagtcggtatcactccacccaaaggatgtttgctgtacggacctcctggtacaggaaagactttgctcgcgagggctgtggcttcacagctcgatgctaactttttaaaggtggtgtcatcggcgattgttgacaagtacatcggtgaatcggcccgcctcatccgggagatgttcaactacgcgcgggaccaccaaccctgcatcatattcatggacgagatcgatgccatcggtgggagacgtttttccgaaggcacgagcgccgatcgagagatccaacgtaccctgatggagttgttgaaccaaatggatggtttcgactccttgggacaggtgaagatcatcatggccaccaacagaccagacacgctggaccccgctctgctgaggcccggaagattggacaggaaaatcgaaatacccctgcccaatgaacaggctagattggaaatcttgaagatccacgcgtcgccgatcgccaagcacggcgagatggactacgaggcggtcgtgaagctttcagatactttcaacggcgcggacctgcgcaacgtctgcacggaggcaggactcttcgccatcagggccgagcgggagtacatcatacaggaggatctaatgaaggccgtccgtaaagtagccgacaacaaaaagctggagagcaaactggactacaagcccgtctga

SEQ ID NO: 4768 - protein, 396 aa, Bombyx mori
MPASTSDMEPLREKAFQDYRKKLMEHKEVESRLKEGRDQLKDLTKQYDKSENDLKALQSVGQIVGEVLKQLTEEKFIVKATNGPRYVVGCRRQLDKNKLKGGTRVALDMTTLTIMRHLPREVDPLVYNMSHEDPGDVTYSAIGGLQEQIRQLREVIELPLMNPELFVRVGITPPKGCLLYGPPGTGKTLLARAVASQLDANFLKVVSSAIVDKYIGESARLIREMFNYARDHQPCIIFMDEIDAIGGRRFSEGTSADREIQRTLMELLNQMDGFDSLGQVKIIMATNRPDTLDPALLRPGRLDRKIEIPLPNEQARLEILKIHASPIAKHGEMDYEAVVKLSDTFNGADLRNVCTEAGLFAIRAEREYIIQEDLMKAVRKVADNKKLESKLDYKPV

SEQ ID NO: 4769 - DNA, 1047 bp, Zea mays
  CDS (1)..(1047)
atggagttcgtcgaaatccaggaggagtacgttaaccagtctgtaccgctcgtcattggccagtttatggagatggtcgacggcaacaacggcatcgtgggctctaccactggcagcaactactacgtgcggatcctcagcaccatcaaccgcgagttgctcaagccgtcagcgtccgtcgcgttgcatcgtcactccaacgctctagtcgacgtgctgccgccggaggccgactccagcatctccttgttgggatcgtcggagaagcccaacgtcacttacaacgatattggaggatgtgacatccaaaagcaagaaatacgggaggcggttgaattacccttgactcatcatgagttgtacaagcagattggtattgatcctccaagaggggtgcttctgtatggtcctccgggtactggcaagaccatgcttgccaaagcagttgcacatcataccactgctgcttttatcagggtcgtcggttcagagggtgttcaaaagtacttgggtgagggccctagaatggtgcgtgacgtgttccgtttggccaaggagaatgccccagcaatcattttcattgatgaggttgatgctatagccactgctcgttttgatgctcagactggtgctgaccgagaagttcagcgtattcttatggagctactcaatcagatggatgggtttgatcaaacagtcaatgtgaaggttataatggcaactaatcgggcagacactctagatcctgctttgttgcgtcctggtagacttgacaggaaaattgagttccctctgccagaccggcgtcagaagaggcttgtttttcaagtttgcactgccaaaatgaacctgagcgatgaggttgatttggaagattatgtttccagaccggataagatcagtgctgctgatattgctgctatctgccaagaggctggcatgcatgctgtccgcaaaaaccgatatgtcatcctccccaaggactttgaaaagggctaccgaaccaacgtgaagaagcccgagacagactttgatttctacaaatga

SEQ ID NO: 4770 - protein, 348 aa, Zea mays
MEFVEIQEEYVNQSVPLVIGQFMEMVDGNNGIVGSTTGSNYYVRILSTINRELLKPSASVALHRHSNALVDVLPPEADSSISLLGSSEKPNVTYNDIGGCDIQKQEIREAVELPLTHHELYKQIGIDPPRGVLLYGPPGTGKTMLAKAVAHHTTAAFIRVVGSEGVQKYLGEGPRMVRDVFRLAKENAPAIIFIDEVDAIATARFDAQTGADREVQRILMELLNQMDGFDQTVNVKVIMATNRADTLDPALLRPGRLDRKIEFPLPDRRQKRLVFQVCTAKMNLSDEVDLEDYVSRPDKISAADIAAICQEAGMHAVRKNRYVILPKDFEKGYRTNVKKPETDFDFYK

SEQ ID NO: 4771 - DNA, 1287 bp, Saccharomyces cerevisiae
  CDS (1)..(1287)
atggaggaactaggtattgtgacacctgtcgaaaaggcagtcgaagaaaaaccagccgtcaaatcatacgcatcattgttggctcaactcaatggtacagtcaacaataacagtgccctgtctaatgtgaattctgatatatatttcaaattgaagaaattagaaaaagagtatgaactgctgactttgcaagaagactatattaaggacgaacaacgccatttgaaacgtgaattgaagagagctcaagaagaagtaaagagaatccagtcggttccattagttatcgggcaattcttagaacctattgatcagaacacaggtattgtttctagtaccacaggtatgagttatgtcgttagaatattatcaaccctagaccgtgaactattaaagccatctatgtctgtagctttacatcgtcattcaaatgctttagttgacatcctaccacctgattccgactctagcatatccgtaatgggcgaaaacgaaaaacctgacgtcacttatgcagatgttggtgggttagatatgcaaaagcaagaaatcagggaagccgtagagctgccattagttcaggctgatctatacgagcaaatcggtattgaccctcctaggggtgttctattatatggtccaccaggtaccggtaagacgatgcttgttaaagccgtcgccaatagtacaaaagctgcattcataagagttaatggctccgaatttgttcacaaatatcttggtgaaggtccaagaatggttcgtgacgtctttagactcgccagggaaaatgctccatccattatattcatagatgaggtagattccattgccacaaagcgttttgatgctcaaacgggttccgatcgtgaagtacagcgtatcctgattgagttgttgacacaaatggatggtttcgatcaatccaccaacgttaaagtcatcatggctacaaacagggcagacacattggacccagctttgctgagaccaggcagattagatagaaagattgagtttccctcacttcgtgataggcgtgaacgtcgtttgattttcggtaccattgccagtaagatgtcccttgccccagaagcggacttagactcgcttattattcgtaacgactctctatcaggtgctgttattgcagcgatcatgcaggaagctggtttaagagcagtgaggaaaaacagatatgtcatcttacaaagcgatctggaagaagcttacgccactcaagtcaagacagataataccgtcgataaattcgacttctacaaatga

SEQ ID NO: 4772 - protein, 428 aa, Saccharomyces cerevisiae
MEELGIVTPVEKAVEEKPAVKSYASLLAQLNGTVNNNSALSNVNSDIYFKLKKLEKEYELLTLQEDYIKDEQRHLKRELKRAQEEVKRIQSVPLVIGQFLEPIDQNTGIVSSTTGMSYVVRILSTLDRELLKPSMSVALHRHSNALVDILPPDSDSSISVMGENEKPDVTYADVGGLDMQKQEIREAVELPLVQADLYEQIGIDPPRGVLLYGPPGTGKTMLVKAVANSTKAAFIRVNGSEFVHKYLGEGPRMVRDVFRLARENAPSIIFIDEVDSIATKRFDAQTGSDREVQRILIELLTQMDGFDQSTNVKVIMATNRADTLDPALLRPGRLDRKIEFPSLRDRRERRLIFGTIASKMSLAPEADLDSLIIRNDSLSGAVIAAIMQEAGLRAVRKNRYVILQSDLEEAYATQVKTDNTVDKFDFYK

SEQ ID NO: 4773 - DNA, 1272 bp, Arabidopsis thaliana
  CDS (1)..(1272)
atggcaacggcgatggcggaggatacgagcttcgagggagaccaactagcttccatgactactgatgacatcggtagagcttctcgtctcttagccaacgagattcgcatcctcaaggaagaatcgcagaggacaaaccttgatttggaatcagtgaaggagaaaataaaggagaaccaggagaagattaagcttaacaaacagcttccttacttagttggcaatatcgttgagattcttgagatgagtccagaggatgatgcagaggaagatggagcgaatatcgatctggactctcagaggaagggaaagtgtgtcgttctaaaaacatcaactcgtcagaccatcttcctccctgttgttggacttgttgatccagatacattgaagcctggggacttagttggagttaacaaagatagttacttgattctggatactttaccttctgagtatgattcaagagtaaaagcaatggaggtcgacgaaaaacctactgaagactacaatgatatagggggactagaaaaacagatacaagaacttgttgaagccattgtgttgccaatgactcataaagagcagttcgaaaagttgggtatccgtccaccaaaaggtgtactcttgtatggtcctcctggaaccggaaagacgttgatggcccgagcttgtgcagcacagacaaatgcaactttcctcaaactagcagggccacaacttgttcagatgttcatcggagatggagcaaaacttgtccgtgatgctttcctgcttgcaaaagagaaatccccttgtattatattcatagatgagattgacgcaatagggacaaagcgttttgatagcgaagttagtggagaccgtgaggtacaaaggacaatgttggagctgctcaaccagcttgatggattcagcagcgatgatcgcattaaggttattgcagcgacaaatcgtgctgatatactagatcctgcccttatgcgttctggtcgtttggatcgtaaaatcgagtttccgcaccccactgaagaagctagaggcaggatcttacagatacattcaaggaaaatgaatgtgaatgcagacgtcaattttgaagagcttgctcggtcaacggatgatttcaatggagctcaactcaaagcagtgtgtgttgaagcgggtatgcttgccctgcgccgggatgcaactgaggtgaaccatgaggatttcaatgaaggtataattcaagtacaagccaagaagaaagcaagcttgaattactacgcctaa

SEQ ID NO: 4774 - protein, 423 aa, Arabidopsis thaliana
MATAMAEDTSFEGDQLASMTTDDIGRASRLLANEIRILKEESQRTNLDLESVKEKIKENQEKIKLNKQLPYLVGNIVEILEMSPEDDAEEDGANIDLDSQRKGKCVVLKTSTRQTIFLPVVGLVDPDTLKPGDLVGVNKDSYLILDTLPSEYDSRVKAMEVDEKPTEDYNDIGGLEKQIQELVEAIVLPMTHKEQFEKLGIRPPKGVLLYGPPGTGKTLMARACAAQTNATFLKLAGPQLVQMFIGDGAKLVRDAFLLAKEKSPCIIFIDEIDAIGTKRFDSEVSGDREVQRTMLELLNQLDGFSSDDRIKVIAATNRADILDPALMRSGRLDRKIEFPHPTEEARGRILQIHSRKMNVNADVNFEELARSTDDFNGAQLKAVCVEAGMLALRRDATEVNHEDFNEGIIQVQAKKKASLNYYA

SEQ ID NO: 4775 - DNA, 1200 bp, Arabidopsis thaliana
  CDS (1)..(1200)
atgagcgacggagacgacgctgctagacgccgtaccgcggcggtgactgattaccggaagaagctccttcatcacaaggagctcgaatcccgtgtccgaacagctagggagaatttaagagcagctaagaaggaattcaacaaaactgaggatgatttgaagtctcttcaaagcgttggccagattattggagaagtactacgtcctcttgataacgagcgattgattgttaaggcaagtagtggccctcgttatgtggtgggttgtcgtagcaaggtggacaaggaaaagcttacttctggaactcgagttgtcctggatatgactacgctgacaattatgcgagcccttcctcgtgaagttgatcctgttgtttataacatgttgcatgaagatccaggcaacattagttactcagctgtgggtggtttaggtgatcagatcagagaacttagggaatctattgagctgcctctcatgaatcctgaacttttccttagagttgggattaaacctcctaagggtgtccttctgtatggacctccgggtactggaaaaactctactagctagggctattgccagcaatatcgacgccaacttcttgaaggttgtatctagtgcaatcatagacaaatacattggagaaagtgctaggttgattcgagaaatgtttaactatgctcgtgaacatcagccttgtatcattttcatggatgaaatcgatgctattggtggacgccgttttagtgaaggaactagtgctgatcgtgaaattcaaagaacacttatggagttacttaaccagcttgatgggtttgaccaacttggaaaggtgaaaatgataatggccaccaacaggccggatgttcttgatccagcacttctccgtccgggtaggttagatagaaagatcgagatcccgttgccaaatgaacaatcaagaatggaaatcctcaagatccacgcatctggcattgccaagcatggagaaatagactatgaggctatcgtgaaacttggagagggtttcaatggtgccgatctgcgtaacatatgcactgaagctggaatgttcgcaatcagagcagagcgtgactatgtaatacatgaagacttcatgaaggctgtgagaaagctgagcgaggccaagaagcttgagtcgagctctcactataacgcggattttgggaaagagtaa

SEQ ID NO: 4776 - protein, 399 aa, Arabidopsis thaliana
MSDGDDAARRRTAAVTDYRKKLLHHKELESRVRTARENLRAAKKEFNKTEDDLKSLQSVGQIIGEVLRPLDNERLIVKASSGPRYVVGCRSKVDKEKLTSGTRVVLDMTTLTIMRALPREVDPVVYNMLHEDPGNISYSAVGGLGDQIRELRESIELPLMNPELFLRVGIKPPKGVLLYGPPGTGKTLLARAIASNIDANFLKVVSSAIIDKYIGESARLIREMFNYAREHQPCIIFMDEIDAIGGRRFSEGTSADREIQRTLMELLNQLDGFDQLGKVKMIMATNRPDVLDPALLRPGRLDRKIEIPLPNEQSRMEILKIHASGIAKHGEIDYEAIVKLGEGFNGADLRNICTEAGMFAIRAERDYVIHEDFMKAVRKLSEAKKLESSSHYNADFGKE

SEQ ID NO: 4777 - DNA, 1395 bp, Arabidopsis thaliana
  CDS (1)..(1395)
atgatcataagagatattatggaggatcctgagaatgagggcccccacaatatgcgttcagactttgaacctctcttatcagtgctccgcctccgggattacgagacaggtgacatcatagagtttgatagtacagaggcaagtgaagaagcgctttctgacattacagagtttgggagtacggaggcaagtgaagcacattttgaggagccttactctgcacgcataaagaaagtagagaaagaaatcaatgagctcgccgagaagatctgcaatcttggtatcaaggagtccgatactggtttagctcctcccaatcaatgggatcttgtatctgataagcaaatgatgcaagaggagcaacctctgcttgttgcgacatgcacacagataatcagtccaaacactgaagatgcaaagtatgtcgttgatatcaaaaagataggcaagtatgttgttggacttggcgataaagcttctcccactgacatagaagcaggaatgcgtgtgggagttgatcagaagaaatatcagatacagattcctctacctccaaagattgatcctagtgtgaccatgatgacggttgaagagaaacctgatgcaacttacagtgatatcggtggctgcaaggagcagattgagaagattagagaggtcgttgaactgccaatgcttcatccagagaaatttgtgaggcttggaatagatcctcccaagggtgttctttgctatggtcctcctggtagcggaaaaacccttgtcgctagagctgtggcgaatagaactggtgcttgctttatcagggttgttggcagtgagctcgttcagaagtacattggtgaaggagctaggatggttcgtgaactgtttcagatggcacggtcaaagaaagcttgcattttgttctttgacgaaattgatgccattggcggtgcaagatttgatgacggtgtaggcagtgataatgaagtccaacgtaccatgcttgagattttgtatcagcttgatgggtttgacgcacgtggtaacatcaaggttcttatggcaacaaacaggcctgacatactagacccagctcttttacgtcctggacgtcttgaccgcaaggttgagttttgtctgcctgatctggagggcagaacacagatcttcaagattcacacacgaacaatgagttgtgaaagagacatccggtttgaactccttgctggcctctgcccaaactcaaccggagctgatatcagaagtgtatgcatagaagccggaatgtatgcaatcggagctaggagaaagtctgtgactgagaaggactttctggacgcagtgaacaaagttgttaaaggttatcaaaagttcagtgcaacacccaagtatatggcctactacatttag

SEQ ID NO: 4778 - protein, 464 aa, Arabidopsis thaliana
MIIRDIMEDPENEGPHNMRSDFEPLLSVLRLRDYETGDIIEFDSTEASEEALSDITEFGSTEASEAHFEEPYSARIKKVEKEINELAEKICNLGIKESDTGLAPPNQWDLVSDKQMMQEEQPLLVATCTQIISPNTEDAKYVVDIKKIGKYVVGLGDKASPTDIEAGMRVGVDQKKYQIQIPLPPKIDPSVTMMTVEEKPDATYSDIGGCKEQIEKIREVVELPMLHPEKFVRLGIDPPKGVLCYGPPGSGKTLVARAVANRTGACFIRVVGSELVQKYIGEGARMVRELFQMARSKKACILFFDEIDAIGGARFDDGVGSDNEVQRTMLEILYQLDGFDARGNIKVLMATNRPDILDPALLRPGRLDRKVEFCLPDLEGRTQIFKIHTRTMSCERDIRFELLAGLCPNSTGADIRSVCIEAGMYAIGARRKSVTEKDFLDAVNKVVKGYQKFSATPKYMAYYI

SEQ ID NO: 4779 - DNA, 1332 bp, Arabidopsis thaliana
  CDS (1)..(1332)
atgggtcaaggaccttccggcggattgaatcggcaaggagatcggaaaccagatggtggagagaagaaggagaagaagttcgaaccagccgcaccacctgctcgtgtagggaggaagcaacggaagcagaaaggacctgaagcggcggcgagattgccgacggtgactccttctactaaatgtaagcttcgattgctgaaattggagcgaatcaaggactatttgcttatggaggaagagttcgtagcgaatcaggagagattgaaacctcaggaagagaaagctgaggaagatagatctaaagttgatgatcttcgtggtacacctatgagtgttggcaatcttgaagagcttattgatgagaatcacgccattgtttcttcttcggttggtcctgagtactacgttggcattttgtctttcgttgataaggatcagcttgaacctggctgctctattttgatgcataacaaggtactctctgttgttgggattcttcaagatgaagtggatccaatggtgtctgtgatgaaagtggagaaggctcctttggagtcatatgctgacattggaggtttagaagctcagattcaggagattaaggaagctgttgagttacctttaacacatcccgagctgtatgaagatattggaattaagccaccaaaaggtgtgatcttgtatggtgagccaggcactgggaagacattgcttgctaaggcagtggcaaattctacttcagctactttcttgcgtgttgtcggtagtgaactgattcagaagtatttaggagatggtcccaagcttgtgagggaacttttcagggttgctgatgacctttctccttctattgttttcatagacgagattgatgctgttggcaccaagcggtatgacgcaaactcaggtggggaacgtgaaatccaaagaaccatgttggaactactgaaccagcttgatgggtttgattcaagaggagatgttaaggttattctcgcgacaaacaggatcgagagtcttgacccggcacttcttagaccaggccggatcgacaggaaaatcgaattccctcttccagatatcaaaacaagaagacgtatcttccagatacacacatcaaagatgactttggctgaagatgtgaacttagaagagtttgtaatgacaaaagacgagttctcaggagctgatataaaggcaatatgcacagaagctggtctgcttgctcttagagagcgtcggatgaaagtgacgcatgtggacttcaagaaggcgaaggagaaggttatgttcaagaagaaagaaggagttcctgaaggtctttacatgtga

SEQ ID NO: 4780 - protein, 443 aa, Arabidopsis thaliana
MGQGPSGGLNRQGDRKPDGGEKKEKKFEPAAPPARVGRKQRKQKGPEAAARLPTVTPSTKCKLRLLKLERIKDYLLMEEEFVANQERLKPQEEKAEEDRSKVDDLRGTPMSVGNLEELIDENHAIVSSSVGPEYYVGILSFVDKDQLEPGCSILMHNKVLSVVGILQDEVDPMVSVMKVEKAPLESYADIGGLEAQIQEIKEAVELPLTHPELYEDIGIKPPKGVILYGEPGTGKTLLAKAVANSTSATFLRVVGSELIQKYLGDGPKLVRELFRVADDLSPSIVFIDEIDAVGTKRYDANSGGEREIQRTMLELLNQLDGFDSRGDVKVILATNRIESLDPALLRPGRIDRKIEFPLPDIKTRRRIFQIHTSKMTLAEDVNLEEFVMTKDEFSGADIKAICTEAGLLALRERRMKVTHVDFKKAKEKVMFKKKEGVPEGLYM

SEQ ID NO: 4781 - DNA, 1275 bp, Arabidopsis thaliana
  CDS (1)..(1275)
atggcaactcctatggttgaagatacgtcaagcttcgaagaggatcagcttgcttccatgtccaccgaagatatcactagagctactcgtcttctcgacaacgagattcgaattctcaaggaagacgcgcaaagaacaaatctagaatgtgattcttacaaggagaagattaaggagaatcaggagaagattaaactcaacaagcagctgccttacttggttggcaacattgtcgagattttggagatgaatccagaagatgatgctgaggaagatggtgcaaatattgatcttgactcgcaacggaaaggaaaatgtgttgtgttgaaaacgtctacacggcagaccatctttctaccagttgttggactcgtggatcctgatagtttgaaacctggtgacttggttggagttaacaaagatagctacttgattttggataccttgccatccgagtatgactctagggttaaagccatggaggtcgatgaaaaaccaactgaagattacaatgacattggaggactagagaagcagatccaagagcttgtagaggcaattgtgcttcccatgacgcacaaggaacgttttgagaagctgggtgttcgtccaccaaagggagtgctcttgtatggtcccccagggactggtaaaactttaatggctcgtgcctgcgcagcacagaccaatgccaccttccttaaattggcaggccctcaattggtccagatgttcattggagacggagcaaagcttgtccgtgatgcctttcaacttgccaaagagaaagctccgtgcattatcttcatagatgaaatcgatgccattggtacaaagcgtttcgacagtgaagtcagcggagacagggaagtgcagaggactatgttggagttgctcaatcaacttgacggattcagtagcgatgaacgtattaaggtgattgcagctactaaccgtgcagatattctggacccagcactcatgcgttctggtcgattagacagaaagattgagttcccacacccaaccgaagaagcgagagcaagaatcttgcagattcactcaaggaagatgaatgtccacccagacgtcaactttgaggagcttgcacgatcaacagatgatttcaatggagctcagctgaaagcagtgtgtgtagaggcaggcatgttagctcttcgccgtgatgccacagaggtgaaccatgaagacttcaatgaaggtatcatccaagtccaggccaagaagaaagcaagcttgaactactacgcctga

SEQ ID NO: 4782 - protein, 424 aa, Arabidopsis thaliana
MATPMVEDTSSFEEDQLASMSTEDITRATRLLDNEIRILKEDAQRTNLECDSYKEKIKENQEKIKLNKQLPYLVGNIVEILEMNPEDDAEEDGANIDLDSQRKGKCVVLKTSTRQTIFLPVVGLVDPDSLKPGDLVGVNKDSYLILDTLPSEYDSRVKAMEVDEKPTEDYNDIGGLEKQIQELVEAIVLPMTHKERFEKLGVRPPKGVLLYGPPGTGKTLMARACAAQTNATFLKLAGPQLVQMFIGDGAKLVRDAFQLAKEKAPCIIFIDEIDAIGTKRFDSEVSGDREVQRTMLELLNQLDGFSSDERIKVIAATNRADILDPALMRSGRLDRKIEFPHPTEEARARILQIHSRKMNVHPDVNFEELARSTDDFNGAQLKAVCVEAGMLALRRDATEVNHEDFNEGIIQVQAKKKASLNYYA

SEQ ID NO: 4783 - DNA, 1332 bp, Arabidopsis thaliana
  CDS (1)..(1332)
atgggacaaggaccatcgggaggattgaatcggcaaggagatcggaaacctgatggtggagataagaaagagaagaagtttgagccggcggcaccaccggctcgtgtagggaggaagcaaaggaagcagaaagggccagaggcggcggcgagacttccgacggtgactccgtctactaagtgtaagctccggttactgaaattggaacggatcaaggattatttgttgatggaggaagagtttgtggcgaatcaagagaggttgaaacctcaggaagagaaagctgaggaagatagatctaaggttgatgatcttcgtggtacacctatgagtgttgggaatttggaagagttgattgatgagaatcacgctattgtttcttcttctgttggacctgagtactacgttgggattttgtccttcgttgataaagatcagcttgaacctggatgttcgattttgatgcataataaggttctctctgttgttgggattctacaagatgaagtggatccaatggtgtctgtgatgaaagttgagaaagctcctttggagtcatatgctgatattggaggtttagaagctcagattcaggagattaaggaagctgttgagcttcctttgactcatcctgagttgtatgaagatattggtattaaaccaccaaagggtgtaattttgtatggtgagcctggaactgggaagacattgcttgctaaggcggttgcgaattcaacatcagctactttcttgagagttgttggtagtgagctgattcagaagtatttgggagatggtcctaagcttgtgagagaacttttcagagttgctgatgacctttcaccatcaatcgtcttcatagatgagattgatgctgttggtaccaagcggtatgacgctcactcaggaggtgaacgtgagatccaaagaactatgttggaacttctgaaccagcttgatggatttgattcaagaggagatgttaaggtcatccttgcaacaaacagaatcgagagtcttgacccagcactgcttcgacctggacggattgataggaaaatcgagttccctctcccagatatcaaaacaagaagacgtatcttccagatacacacatcgaagatgactctctcggaagatgtaaacctcgaagagtttgtgatgacgaaagacgagttctcaggagctgatataaaggctatatgcactgaggctggtctactagctctcagggagcgtcgtatgaaggtgacacatcctgatttcaagaaagcaaaggagaaggttatgttcaagaagaaagaaggcgtccctgaaggcctctacatgtaa

SEQ ID NO: 4784 - protein, 443 aa, Arabidopsis thaliana
MGQGPSGGLNRQGDRKPDGGDKKEKKFEPAAPPARVGRKQRKQKGPEAAARLPTVTPSTKCKLRLLKLERIKDYLLMEEEFVANQERLKPQEEKAEEDRSKVDDLRGTPMSVGNLEELIDENHAIVSSSVGPEYYVGILSFVDKDQLEPGCSILMHNKVLSVVGILQDEVDPMVSVMKVEKAPLESYADIGGLEAQIQEIKEAVELPLTHPELYEDIGIKPPKGVILYGEPGTGKTLLAKAVANSTSATFLRVVGSELIQKYLGDGPKLVRELFRVADDLSPSIVFIDEIDAVGTKRYDAHSGGEREIQRTMLELLNQLDGFDSRGDVKVILATNRIESLDPALLRPGRIDRKIEFPLPDIKTRRRIFQIHTSKMTLSEDVNLEEFVMTKDEFSGADIKAICTEAGLLALRERRMKVTHPDFKKAKEKVMFKKKEGVPEGLYM

SEQ ID NO: 4785 - DNA, 1260 bp, Arabidopsis thaliana
  CDS (1)..(1260)
atggcggccgtaggagtggaggcgagacctcctgtgacagcgatggaggaaacctgcaacgttaagggagcggcggcgaaacaaggagaagggcttaacaagtactacctccagcatctcgatgagctccagcgcctgcaacgcgaaaagtcgtataaccttaatcgtcttgaagctcagaggaatgaactcaattctcgagtacgaatgctcagagaagagttacagctccttcaagaacctgggtcctatgtgggtgaagtggtaaaagtgatgggaaaaaacaaggtcttggttaaggttcatccagaggggaagtatgttgtcgatattgacaaaagtatagacataacgaaactcactccatcaacgagagttgctctccgtaatgatagctatgttctccacctggttctgccaagtaaagtagatcccttggttaaccttatgaaagttgagaaggttccagactccacatatgacatgattggtggtcttgaccagcaaatcaaggaaataaaggaggtcattgaactgccaatcaagcatcctgaattgtttgagtctcttggaattgcgcagccaaagggtgtgttgttgtacggtccacctggaactgggaagacactattggctcgggctgtggcacatcacactgactgtactttcatcagagtttctggttctgagctggtccagaaatacattggagaaggttctagaatggtcagagaactttttgtgatggcaagggagcatgcaccatcaatcatcttcatggatgaaatcgatagtatcgggtctgctcgtatggaatctggtagtggaaatggtgacagtgaggtgcaaaggactatgcttgagcttctcaatcaacttgacggattcgaggcgtcaaacaaaatcaaggttttgatggctacaaatcgtattgatattctggatcaagctcttctccggcctggaaggattgataggaaaattgaatttcctaatcctaatgaagagtcacgttttgatatcttgaagatacactcaaggaaaatgaatttgatgcgtggaatcgatctgaaaaagattgcagagaagatgaatggtgcttcaggtgctgagctgaaggctgtatgcacggaggcgggcatgtttgcacttcgtgagaggagagtacatgtgactcaggaagactttgagatggctgtggcgaaggtaatgaagaaagacacagagaagaacatgtctctgcgtaagctctggaagtag

SEQ ID NO: 4786 - protein, 419 aa, Arabidopsis thaliana
MAAVGVEARPPVTAMEETCNVKGAAAKQGEGLNKYYLQHLDELQRLQREKSYNLNRLEAQRNELNSRVRMLREELQLLQEPGSYVGEVVKVMGKNKVLVKVHPEGKYVVDIDKSIDITKLTPSTRVALRNDSYVLHLVLPSKVDPLVNLMKVEKVPDSTYDMIGGLDQQIKEIKEVIELPIKHPELFESLGIAQPKGVLLYGPPGTGKTLLARAVAHHTDCTFIRVSGSELVQKYIGEGSRMVRELFVMAREHAPSIIFMDEIDSIGSARMESGSGNGDSEVQRTMLELLNQLDGFEASNKIKVLMATNRIDILDQALLRPGRIDRKIEFPNPNEESRFDILKIHSRKMNLMRGIDLKKIAEKMNGASGAELKAVCTEAGMFALRERRVHVTQEDFEMAVAKVMKKDTEKNMSLRKLWK

SEQ ID NO: 4787 - DNA, 1200 bp, Arabidopsis thaliana
  CDS (1)..(1200)
atgaccgacgtcgatgaatccgttagacgccgtacagccgccgtttccgagtaccggaaaaagctcctccaacataaggaactcgaatcccgtgttcgaacagctagggagaacttaagaggagctaaaaaggaattcaacaaaaccgaggatgatctcaagtctcttcaaagtgttgggcagattattggagaagtgcttcgacccctggataatgaaagattgattgtgaaagcgagcagtggtccacgttatgtggtgggttgccgaagcaaagtggataaggaaaagctaacctccggaactcgagttgttctcgatatgacaacactaacaattatgcgagcccttccccgagaagttgatcctgttgtttataacatgcttcatgaagaccctggcaacattagctactccgctgtcggagggttaggtgatcagatcagagaactcagggaatctattgagctccctctcatgaatcctgagcttttcctcagagtagggatcaaacctccaaagggtgtccttctgtatggacctccaggtactggaaaaactctactagccagggctattgccagcaacatcgatgctaacttcttgaaggttgtatccagtgcaatcatagacaagtacattggagaaagtgctaggctgattcgggagatgtttaactatgcccgtgaacatcagccttgtatcatattcatggatgaaatcgatgctattggtgggcgtcgttttagtgagggaactagtgctgatcgtgaaattcaaagaacgcttatggagttactcaaccagcttgatgggtttgacaacctcggaaaggtgaaaatgataatggccacaaacaggcctgatgtgcttgatcctgcgcttctccgtccgggaaggttagatagaaagattgagatccctttgccaaacgagcagtcaagaatggatattcttaagatccatgcagctggtatcgccaaacatggtgaaatcgattacgaggctattgtcaaacttgcagagggattcaatggtgctgatctgcgtaacatatgcacggaagctggaatgtttgcaatccgagcagagcgggattatgtgatccatgaagatttcatgaaggcggtgagaaagctgagtgaggccaagaaactggagtccagttcgcactataacgctgattttggaaaagagtga

SEQ ID NO: 4788 - protein, 399 aa, Arabidopsis thaliana
MTDVDESVRRRTAAVSEYRKKLLQHKELESRVRTARENLRGAKKEFNKTEDDLKSLQSVGQIIGEVLRPLDNERLIVKASSGPRYVVGCRSKVDKEKLTSGTRVVLDMTTLTIMRALPREVDPVVYNMLHEDPGNISYSAVGGLGDQIRELRESIELPLMNPELFLRVGIKPPKGVLLYGPPGTGKTLLARAIASNIDANFLKVVSSAIIDKYIGESARLIREMFNYAREHQPCIIFMDEIDAIGGRRFSEGTSADREIQRTLMELLNQLDGFDNLGKVKMIMATNRPDVLDPALLRPGRLDRKIEIPLPNEQSRMDILKIHAAGIAKHGEIDYEAIVKLAEGFNGADLRNICTEAGMFAIRAERDYVIHEDFMKAVRKLSEAKKLESSSHYNADFGKE

SEQ ID NO: 4789 - DNA, 1260 bp, Arabidopsis thaliana
  CDS (1)..(1260)
atggcggccgtaggagtagattcgaggcgtcctgagacagcgatggaggaaacctgtaacgtgaaaggagcggcggcgaaacaaggggaagggcttaagcagtactatctccagcacatccatgagctccagcgccagcttcgacagaagactaataacctcaatcgccttgaagctcaaaggaatgaactcaattctcgagtgagaatgctcagagaagagttacagctccttcaagaacctgggtcctatgtgggagaagtggtaaaagttatgggaaagaacaaggtcttggttaaggttcatccagaggggaagtatgttgttgatattgacaaaagtatagacattacgaaaatcactccatcaacgagagttgctcttcgtaatgatagctatgttctccacctggttctgccaagtaaagtagatcccttggttaaccttatgaaagttgagaaggttccagactccacctatgacatgattggtggtcttgaccagcagattaaggaaataaaggaggtcattgagctgccaatcaagcatcctgaattgtttgagtctcttggaattgcgcagccaaagggtgtgttgttatacggtccacctggaactgggaagacactattggctcgggctgttgcacatcacactgactgtactttcataagagtttctggttccgagcttgtccagaaatacattggagaaggttctagaatggtcagagaactttttgtgatggcaagggagcatgcaccatcaatcatcttcatggatgaaatcgatagtattgggtctgctcgtatggaatctggaagtggaaatggtgacagtgaggtgcaacggaccatgctcgagcttctcaatcaacttgacggttttgaagcgtcaaacaaaatcaaggttttgatggctacaaatcgtattgatattctggatcaagctcttctcaggcctggaagaattgataggaaaattgaatttcctaatcctaatgaagagtcacgttttgacatcttgaagattcactcgaggaaaatgaatttgatgcgtggaatcgatctgaaaaagattgcagagaagatgaatggcgcttcaggtgctgagctgaaggctgtgtgcacggaggcgggaatgtttgctctgcgtgagaggagagtacacgtgacacaagaagactttgagatggcggtggccaaggtaatgaagaaagacacggagaagaacatgtctctgcgtaagctgtggaagtag

SEQ ID NO: 4790 - protein, 419 aa, Arabidopsis thaliana
MAAVGVDSRRPETAMEETCNVKGAAAKQGEGLKQYYLQHIHELQRQLRQKTNNLNRLEAQRNELNSRVRMLREELQLLQEPGSYVGEVVKVMGKNKVLVKVHPEGKYVVDIDKSIDITKITPSTRVALRNDSYVLHLVLPSKVDPLVNLMKVEKVPDSTYDMIGGLDQQIKEIKEVIELPIKHPELFESLGIAQPKGVLLYGPPGTGKTLLARAVAHHTDCTFIRVSGSELVQKYIGEGSRMVRELFVMAREHAPSIIFMDEIDSIGSARMESGSGNGDSEVQRTMLELLNQLDGFEASNKIKVLMATNRIDILDQALLRPGRIDRKIEFPNPNEESRFDILKIHSRKMNLMRGIDLKKIAEKMNGASGAELKAVCTEAGMFALRERRVHVTQEDFEMAVAKVMKKDTEKNMSLRKLWK

SEQ ID NO: 4791 - DNA, 1173 bp, Drosophila melanogaster
  CDS (1)..(1173)
atgccggacaatctgcgggtgaaagccttatccgagtaccgaaagaagttgctagagcacaaggaaatcgagggacgcctcaaagaaaagcgcgaggagatcaaggatctgaccaagctgtacgacaagtcggagaacgatctaaaggccctgcagagcgtgggacagatcgttggtgaggtgctgaagcagctgaccgaggataaattcattgtgaaggccaccaatggaccccgctacgtggtcggctgccgccggcagctggacaaagccaagctgaagtccggaactcgtgtggccctcgacatgaccacactgaccattatgcgctacttgccgcgcgaggtggacccactggtgtacaatatgtcgcacgaggatcccggggatgtcacctactcggccatcggcggcctaaccgaccaaattcgcgagctgcgcgaagtgatcgagctgcccctactgaatccggagctcttcctgcgcgtcggcatcacgccaccgaagggttgtttgctgtacggacctcctggcaccggcaagaccctgctggcccgtgcagtggcctcccagctggacgccaacttcctcaaggtcgtgtcctcggcgattgtcgacaagtatattggcgagagtgcgcgtctcattcgcgagatgttcaactatgcccgcgaccatcagccctgcatcattttcatggacgaaatcgacgctatcggtggtcggcgcttctccgagggcacctctgccgatcgcgagatccagcgcaccctgatggagctgctcaaccagatggacggcttcgattcgcttggccaagtcaagatgatcatggcaaccaatcgtccggacaccctcgatcctgcccttctgcgtccgggtcgcttggacaggaagatcgagattccgctgcccaacgagcaggctaggttggaaattctcaagattcacgcactgaagatcgccaagcacggcgaaatcgactacgaggccattgtcaagctgtcggacaactttaatggcgctgatctgcgtaatgtctgcacggaggcgggtctctttgccattcgtgcggagcgggagtacgtcatccaggaggacttcatgaaggcggtgcgcaaggtgtcggacaacaagaagttggagagcaagctggactacaagcccgtctag

SEQ ID NO: 4792 - protein, 390 aa, Drosophila melanogaster
MPDNLRVKALSEYRKKLLEHKEIEGRLKEKREEIKDLTKLYDKSENDLKALQSVGQIVGEVLKQLTEDKFIVKATNGPRYVVGCRRQLDKAKLKSGTRVALDMTTLTIMRYLPREVDPLVYNMSHEDPGDVTYSAIGGLTDQIRELREVIELPLLNPELFLRVGITPPKGCLLYGPPGTGKTLLARAVASQLDANFLKVVSSAIVDKYIGESARLIREMFNYARDHQPCIIFMDEIDAIGGRRFSEGTSADREIQRTLMELLNQMDGFDSLGQVKMIMATNRPDTLDPALLRPGRLDRKIEIPLPNEQARLEILKIHALKIAKHGEIDYEAIVKLSDNFNGADLRNVCTEAGLFAIRAEREYVIQEDFMKAVRKVSDNKKLESKLDYKPV

SEQ ID NO: 4793 - DNA, 1173 bp, Encephalitozoon cuniculi GB-M1
  CDS (1)..(1173)
atgttccaggaggagaaaaacaagctttacgaggaatacacacaagccctgcttagcaatgaaaaggcttacaaggcactcaaagcagagcaagaggtgtacagacaaacccataaacactacctgaagagcgaaagcgacgtcaaggctctacagacggtggggcacataattggcgaggtgctggaaaagctaagtgatgagaagtttatagtcaagagcagccaggggccaagatatgttgtggggtgcatgaaggcaatagacagagcaaaaatagctacaggaacaagggttgcattggacatcacgaccttgacgatcatggttgtacttcccagagaggtggatccaatgattcatttgatgggagaggaaagccccagagagatttcctttgagtctgttgggggtttgaaggaccagatcagggagctaagagaggtgatcgagctcccattgaagaacccggatatattcaagaggattggagtccatgccccgaaaggggttcttttatatggaccgcctggaacaggtaagacgttactggcaagaatagttgcagccacgatggacgtgaacttcctgaaagttgtgtcgtctgcactaattgaaaaatacataggagagtcgtcgcgaatgatcagagagatgtttgcttatgcaagaagaaaggcaccgtgcataatattcatggatgaaatcgatgcaattggaggaaaaaggtcgagggagtcgagctcttcggatagagaggttcagagaacgctcatggagcttctcaaccagctggatggattcaaggagcttgacagtgtgaaggttatcatggcaacaaacagaccagacatacttgatcctgcgcttctacgtccaggaagactggacagaaagatagagattcctcttcctaatgagcagggaaggaaggaaatcttgaagatccattccagacttatgaattctattgaagaaattgactacgactcgctggtgaagctaacctcagggtttaacggcgcggatctaaggaatgtttgcacggaggctggtatgattgccttgaaggacgagagggattatgtgaaacacgaagactttgttaaatccgccagaaaaatagcagatgcaaagaaactcgaaactagattggactacaggaagaagtaa

SEQ ID NO: 4794 - protein, 390 aa, Encephalitozoon cuniculi GB-M1
MFQEEKNKLYEEYTQALLSNEKAYKALKAEQEVYRQTHKHYLKSESDVKALQTVGHIIGEVLEKLSDEKFIVKSSQGPRYVVGCMKAIDRAKIATGTRVALDITTLTIMVVLPREVDPMIHLMGEESPREISFESVGGLKDQIRELREVIELPLKNPDIFKRIGVHAPKGVLLYGPPGTGKTLLARIVAATMDVNFLKVVSSALIEKYIGESSRMIREMFAYARRKAPCIIFMDEIDAIGGKRSRESSSSDREVQRTLMELLNQLDGFKELDSVKVIMATNRPDILDPALLRPGRLDRKIEIPLPNEQGRKEILKIHSRLMNSIEEIDYDSLVKLTSGFNGADLRNVCTEAGMIALKDERDYVKHEDFVKSARKIADAKKLETRLDYRKK

SEQ ID NO: 4795 - DNA, 1275 bp, Encephalitozoon cuniculi GB-M1
  CDS (1)..(1275)
atgagcagagacaaatccgagcgggataaccttcaggacacaaccacaataaacctgaggaggcgcaggagagtaaaggagggcaaggcagcctccaagccgccgcaggtgtatccattgatgaagtgtaagctgagatatctgaagttgaagaagctggcgcacttattatctttagaagacaacatactgagcttatgcgagccagacaagtcgtccgagggatcgaatagccagaagcatgttgttgagcagcttcgcgggagccctctttctgtcgggacgcttgaggagtttgtcgacgaccaccacggaataattaccacgggtgttgggttggaatactatgtcaacatcatgtcgtttgttgacaaggacctacttgagcctggatgcactgttctcctgaactacaaagacaatagtgttgtgggcgttctggagggggagatggatccaatggtcaatgtcatgaagttggaaaaggcaccttcggagacatatgcggacatcggggggcttgaggaacagatccaagagataaaggaaagtgttgagcttccactgacgaaccccgagctttaccaggaaatggggataaagcccccaaagggagtgattctgtacggacttcctggaacagggaagactctcctagccaaggccgttgcaaaccagacatctgcaacttttcttagggttgttgggacggagcttatacaggagtatctcggggaaggcccgaagcttgtaagggagctcttcagggttgcagacatgcatgcaccatcaataatttttattgacgagatagatgcaattggagggaaaaggtacaatacatcctctggtgggcggagggaggtccaaaggacgatgctagagttgctgaaccaactggatggatttgacaccaggaacgatatcaaggtgataatggccacgaataagatagaagcccttgacccggctttgatcaggcctggcagaatcgataggaaaatcgagtttggcatgccggatgccgctacaaagaagaaaatattcgatattcatacatcgaggatgacactggatgaaagtgtgaacatcgagctactaataacgagcaaggaggatttgagcggagctgatataaaggcaatctgcacagaggctggtatgatagcattgagagaaaggagaaaaacagttaccatgaaggactttatttctgcaagagaaaaggtattcttttcaaagcaaaagatggtttctgctgggctttattcctga

SEQ ID NO: 4796 - protein, 424 aa, Encephalitozoon cuniculi GB-M1
MSRDKSERDNLQDTTTINLRRRRRVKEGKAASKPPQVYPLMKCKLRYLKLKKLAHLLSLEDNILSLCEPDKSSEGSNSQKHVVEQLRGSPLSVGTLEEFVDDHHGIITTGVGLEYYVNIMSFVDKDLLEPGCTVLLNYKDNSVVGVLEGEMDPMVNVMKLEKAPSETYADIGGLEEQIQEIKESVELPLTNPELYQEMGIKPPKGVILYGLPGTGKTLLAKAVANQTSATFLRVVGTELIQEYLGEGPKLVRELFRVADMHAPSIIFIDEIDAIGGKRYNTSSGGRREVQRTMLELLNQLDGFDTRNDIKVIMATNKIEALDPALIRPGRIDRKIEFGMPDAATKKKIFDIHTSRMTLDESVNIELLITSKEDLSGADIKAICTEAGMIALRERRKTVTMKDFISAREKVFFSKQKMVSAGLYS

SEQ ID NO: 4797 - DNA, 1206 bp, Encephalitozoon cuniculi GB-M1
  CDS (1)..(1206)
atgtcactggaggagcttgaggcaatggatcaaagcaaccccggggagtttctcgaaagggtacgagagaagatcagaatgctgaactccgaaaccaggattcttcagagccgggttaacacgatcaagcacgacatttcgacaaagaatgcatcgattgcagagaacatggagaggataaggctcaacaagcagcttccgtatctggttggaaatgttgttgaagtccttgacgagcacagcggcgtagtaaatgcatccacaaggatgtcttcatatcttccgatcacagggcttattcccaactctgagcttcgccctggagatcttgtagccctgcacaaggacacaaatatagtgtttgagaagcttccgcccgattatgacatgaaggtgggagggatggtcctgaagtctgatgcaaagccggatgagacctatgaggacatcgggggcctagagaggcagatagaggagctcaatgaggcaatagtcctttctctcacacatccggagaggttcgagaagttgaacataaagcctccaaagggagttttgatgtacggacctcccgggacgggaaagaccctcatggcacgagcatgcgcaagcaagaccaatgcaacgtttctcaagcttgcagggcctcagctggtgcagatgtatattggggacggggcaaggctggtaagggatgcatttgcccttgcaaaggaaagaaagccgacgattatctttatagatgaaattgatgcaatcggcgcaaagaggtcggactcggaccaaacaggagatagagaggtccaaaggacaatgctggagcttctcaatcagctcgatgggttttcttcttctgaagaggtgaaaatcattgcggcaaccaacagagtggacattctggaccctgcactgttgagaagcggaaggctcgacaggaagattgagttccctctgccaaataccctgggaaggaagaggatcctgcaaatccatgcaagaaagatgagtgttagggacgatgtaaacttcgatgaactggccagaagcaccgagggattcaatggggcacagtgcaaagcggtctgcgtagaggctgggatggctgcccttaggaaagagaagacggagatctcccaaaacgactttatggatggaatccaagaggttctgagcagaaagaagtcaaagctgctctactttacatga

SEQ ID NO: 4798 - protein, 401 aa, Encephalitozoon cuniculi GB-M1
MSLEELEAMDQSNPGEFLERVREKIRMLNSETRILQSRVNTIKHDISTKNASIAENMERIRLNKQLPYLVGNVVEVLDEHSGVVNASTRMSSYLPITGLIPNSELRPGDLVALHKDTNIVFEKLPPDYDMKVGGMVLKSDAKPDETYEDIGGLERQIEELNEAIVLSLTHPERFEKLNIKPPKGVLMYGPPGTGKTLMARACASKTNATFLKLAGPQLVQMYIGDGARLVRDAFALAKERKPTIIFIDEIDAIGAKRSDSDQTGDREVQRTMLELLNQLDGFSSSEEVKIIAATNRVDILDPALLRSGRLDRKIEFPLPNTLGRKRILQIHARKMSVRDDVNFDELARSTEGFNGAQCKAVCVEAGMAALRKEKTEISQNDFMDGIQEVLSRKKSKLLYFT

SEQ ID NO: 4799 - DNA, 1248 bp, Encephalitozoon cuniculi GB-M1
  CDS (1)..(1248)
atgaatggccagaagcaggagaacatcattgaagagaaggatgtggggtttatcctgagctacggaaggaactattacgccgatggaatagtggagaaggaggcagagataaggagactttttgagcaaataagcttaaagctcgggacaagggaggtggagacagggcttgcaccgccgatgtgttgggaccttctgggagatagaaacagaatacaaagcgagccgaacctgcaggtggccagggtctgcaaggtgcttgatggataccaggagccaagatacatgatagggatcaagatgatagccaagtttattgttgggaaggggaagcgagtggactccagcctcatacaggaggggatgagggtaggagttgatagaaacaagtaccagattatcctcccactgccccggaaaatagatgcatctgtcaccctgatgcaggttgaagaaaggcctgatgttacatatcatgatatcggaggatgcaaagaggagattgaaaagataagggaggttgttgaagcgcctcttctgaatcctgagaggtttgttgcactggggattgatcccccaaagggtgttcttttatatggacctcctggaaccgggaagactttgctggcaagggccgtagccaacagaacgaatgcatgcttcataagggtcattgggtctgagcttgtgcagaagtatgtcggggagggcgcaaggatggtcagggagatttttgcgatggccaagggaaagaaggcctgcattattttctttgacgaggtagatgcgtttggaggaacgcggtttgacgacgacgatgacaacgaggttcagaggacaatgctcgagctgataaaccagttggacggctttgatccaagagggaacataaaggttctgatggcaacgaacaggccggacacccttgacccggctctcctcagacctggaaggctggacaggaaggtcgagtttggcctcccagaccttgaggggaggacatcgattctaaggatccacgcaaaaacaatgagtgttgacaaggacatcaggtttgatctgattgcaaggctctgcaacaatgcaacgggtgcagagctgaggagtgtttgtacagaagcagggatgtttgccataagagaaagaaggaagattgcgacggaaaaggattttttgaaggctgtcgataaggtcgtcaagggatatgcaaagttctcctccacgccaagatacctgacatataactaa

SEQ ID NO: 4800 - protein, 415 aa, Encephalitozoon cuniculi GB-M1
MNGQKQENIIEEKDVGFILSYGRNYYADGIVEKEAEIRRLFEQISLKLGTREVETGLAPPMCWDLLGDRNRIQSEPNLQVARVCKVLDGYQEPRYMIGIKMIAKFIVGKGKRVDSSLIQEGMRVGVDRNKYQIILPLPRKIDASVTLMQVEERPDVTYHDIGGCKEEIEKIREVVEAPLLNPERFVALGIDPPKGVLLYGPPGTGKTLLARAVANRTNACFIRVIGSELVQKYVGEGARMVREIFAMAKGKKACIIFFDEVDAFGGTRFDDDDDNEVQRTMLELINQLDGFDPRGNIKVLMATNRPDTLDPALLRPGRLDRKVEFGLPDLEGRTSILRIHAKTMSVDKDIRFDLIARLCNNATGAELRSVCTEAGMFAIRERRKIATEKDFLKAVDKVVKGYAKFSSTPRYLTYN

SEQ ID NO: 4801 - DNA, 1326 bp, Methanosarcina acetivorans C2A
  CDS (1)..(1326): transl_table=11
atgaacttaaatattattcggagctccatgacggaaattaccaaaagtaaggatgaaagcatgcgcagtcaccttgtgaagcccggatctgtgtatgacggaatcgagcctggagagctgggggagtcaactgaaagcgtccaggaccgagtgaggcaactcgaaagccgcaacagttttctggaagagcagtgcagccagatagagtccgaaaaacgctatttggagaaccagaagatcaagtatgagagagaaatacgaaagcttcagtcggaactcgatcgcatgaagacctctccgctgatcattggtacggttattgatgtgatcaagaatgatcgtataatcgtccgtagcagcaatggccctcagtttctggttaacgtctcacaatatattgacgagaaaaaactgctgccaggggcaaaggtcgccttgaaccagcatacacttgccattgcagaggttattccttcaacagaagagccttttgttgctgcaatggaagtaattgaaagtattgaagttgattacgaccagatcggcggtctcgatgagcagattcaggaacttcaggaagcagtcgaacttccgctaatcgaacctgagcgctttgccaggataggaattgagccccccaaaggagtattactctatgggctcccgggaacaggtaaaaccctgctcgcaaaagccgtagcccacaggaccaatgcgacatttatcagagttgttggttccgaacttgtacagaaatacataggggacggttccaaactggtaagagaaatcttcgagatggcgaggaaaaaagctcccagcatcatatttatcgatgaactggattcgatagctgcaaggcgcttaaacgagacgactggcgcagatagggaagttcagagaactttgatgcagcttcttgcagaaatggatggttttgacaagaggaaaaacattcggatcattgcagccacaaacagaccggatgtccttgaccctgcaattctcaggccgggccgttttgacaggcttgtccatgtcccgatgcccggaatagaggccagaggaaaaatcctcaaaatccattgtggaaagatgactcttgcgggagatatcgactttaaaaagcttgcaaaagttaccgaagggatgagcggggcagacctgaaggcaattgccacagaagcaggcatgttcgcggtcagaaaagataaggcccttgttgaaatggaagatttcctcgaagcagtagagaaggtatctatggctgcggatacgcagaagatgatgcctggcaaccttccagagacaacaatgttcgtgtaa

SEQ ID NO: 4802 - protein, 441 aa, Methanosarcina acetivorans C2A
MNLNIIRSSMTEITKSKDESMRSHLVKPGSVYDGIEPGELGESTESVQDRVRQLESRNSFLEEQCSQIESEKRYLENQKIKYEREIRKLQSELDRMKTSPLIIGTVIDVIKNDRIIVRSSNGPQFLVNVSQYIDEKKLLPGAKVALNQHTLAIAEVIPSTEEPFVAAMEVIESIEVDYDQIGGLDEQIQELQEAVELPLIEPERFARIGIEPPKGVLLYGLPGTGKTLLAKAVAHRTNATFIRVVGSELVQKYIGDGSKLVREIFEMARKKAPSIIFIDELDSIAARRLNETTGADREVQRTLMQLLAEMDGFDKRKNIRIIAATNRPDVLDPAILRPGRFDRLVHVPMPGIEARGKILKIHCGKMTLAGDIDFKKLAKVTEGMSGADLKAIATEAGMFAVRKDKALVEMEDFLEAVEKVSMAADTQKMMPGNLPETTMFV

SEQ ID NO: 4803 - DNA, 1323 bp, Methanosarcina mazei Go1
  CDS (1)..(1323): transl_table=11
atgaacttaaataatattcggagctccatgacggaaagtaccaagagtaaggatgaaagcatgcgcagtcaccttgtgaagcccggatctgtgtatgacggaatcgagcctggagagctgggggaaacaactgaaagcgtccaggaccgagtgaggcaacttgaaagccgcaacagttttctggaagagcagtgcagccagatagagtccgaaaaacgctatttagagaaccaaaagatcaaatatgagagggagatacgaaagctgcagtccgagctagatcggatgaaaacctctcctctgatcattggtacggttattgacgtgatcaagaatgatcgtattatagtccgtagcagtaacgggcctcagttcctggtaaacgtctcacaatatattgacgagaaaaagctgctgccaggggcaaaagttgccttgaaccagcatacacttgccattgcagaggttatcccttccacggaagagccttttgtagctgcaatggaggttatcgaaagtgttgaagttgattacgatcagataggtggtctcgacgagcagattcaggaacttcaggaagcagtagaacttccgttaacttcgcctgaacgctttgcccggataggaattgagcccccaaaaggagtattactttacgggcttccgggaacgggcaaaaccttgcttgcaaaagccgtagcccacaggaccaatgctacatttatcagagttgttggttctgaactggtgcagaagtacataggggacgggtccaagctggtcagggaaatcttcgagatggcacggaaaaaagctcccagtatcatttttatcgatgaactggattcgatagctgcaaggcgtttaaacgagacaactggcgcagatagagaggttcagagaactttgatgcagcttcttgcagaaatggatggctttgacaagaggaaaaacatcaggattattgcagcaacaaacagaccggacgtccttgaccctgcaattctcaggccaggccgttttgataggcttgtccatgttcccatgcccggtatcgaagccaggggaaaaatccttaaaatccattgcgaaaagatgactcttgcagaagacatcgatttcaaaaagcttgcaaaagctaccgaaggaatgagcggggcagacctgaaagctatagctaccgaagcaggcatgttcgcggtcagaagagataaggaactggttgagatggaagagttcctcgaagcagtggaaaaggtgtccatggctgcggatacgcagaagatgatgccttccaaccttccggaaaccatgttcgtgtaa

SEQ ID NO: 4804 - protein, 440 aa, Methanosarcina mazei Go1
MNLNNIRSSMTESTKSKDESMRSHLVKPGSVYDGIEPGELGETTESVQDRVRQLESRNSFLEEQCSQIESEKRYLENQKIKYEREIRKLQSELDRMKTSPLIIGTVIDVIKNDRIIVRSSNGPQFLVNVSQYIDEKKLLPGAKVALNQHTLAIAEVIPSTEEPFVAAMEVIESVEVDYDQIGGLDEQIQELQEAVELPLTSPERFARIGIEPPKGVLLYGLPGTGKTLLAKAVAHRTNATFIRVVGSELVQKYIGDGSKLVREIFEMARKKAPSIIFIDELDSIAARRLNETTGADREVQRTLMQLLAEMDGFDKRKNIRIIAATNRPDVLDPAILRPGRFDRLVHVPMPGIEARGKILKIHCEKMTLAEDIDFKKLAKATEGMSGADLKAIATEAGMFAVRRDKELVEMEEFLEAVEKVSMAADTQKMMPSNLPETMFV

SEQ ID NO: 4805 - DNA, 1197 bp, Drosophila melanogaster
  CDS (1)..(1197)
atgtctgctccacttgcaaatcccccaacagacgacgagcgtgtgagggcgctgaccaattaccgtaccaagcttctggagcaccgcgagatcgaatccaaattgaaagctttgcgagacaagtacaaggtcgtgaatgccgagtacgaaaagtccgaggacgatctgaaggctctccagagtgtgggtcagatggtcggggaaatcctgaagcagctcacaccggacaacttcatcgtgaaggcctcgaacggaccgcgctacgtggtcggatgtcgccggcagattaacaaggagaagctaaagcccggcacacgtgtcgccctggatgtgaccactctcaccatcatgcgctatttgccgcgggaagtggatcccctggtgtacaacatgacccatgaagatcccggaaacgtaaactacgctgaaatcggtggacttggtcagcaaatccgcgagcttcgcgaggtcattgaactgccgctactaaatccagatattttcctacgcgttggcataagtccgcccaagggatgcctgctctacggaccgcctggcaccggaaaaactctcctggcccgcgccatcgcctcccagatggacgccaatttcttgaaggtcgtttcctctgcaattgtggacaagtacattggcgagagtgcccgactgatccgggagatgtttgcatacgcccgtgatcatcagccatgtatcatattcatggacgagatcgacgcaatcggtggtcgccgcttctcggagggaacatccgccgaccgagagatccagcgcacgctgatggaactgcttaaccagatggatggattcgatgctcttggccaggtgaaaatgatcatggccaccaatcgtccggatacactggatccggcgctgctgcgtcctggacgacttgatcgcaaattggaaattccgctgcccaacgaagtggcgcgtatggacattcttaagattcacgccgaaccactgaacaaacgcggcgaaatcgactatgaggcggtggttaagctctccgatttgttcaatggtgccgatctacggaacatttgcacggaagccgggctttttgccctccgctgcgatagggagtttgtcattcaagaagatttcatgaaggccgtccgcaaaatagcggacaataagaagctggagtctcgtctggactacaagcctatatag

SEQ ID NO: 4806 - protein, 398 aa, Drosophila melanogaster
MSAPLANPPTDDERVRALTNYRTKLLEHREIESKLKALRDKYKVVNAEYEKSEDDLKALQSVGQMVGEILKQLTPDNFIVKASNGPRYVVGCRRQINKEKLKPGTRVALDVTTLTIMRYLPREVDPLVYNMTHEDPGNVNYAEIGGLGQQIRELREVIELPLLNPDIFLRVGISPPKGCLLYGPPGTGKTLLARAIASQMDANFLKVVSSAIVDKYIGESARLIREMFAYARDHQPCIIFMDEIDAIGGRRFSEGTSADREIQRTLMELLNQMDGFDALGQVKMIMATNRPDTLDPALLRPGRLDRKLEIPLPNEVARMDILKIHAEPLNKRGEIDYEAVVKLSDLFNGADLRNICTEAGLFALRCDREFVIQEDFMKAVRKIADNKKLESRLDYKPI

SEQ ID NO: 4807 - DNA, 1200 bp, Drosophila melanogaster
  CDS (1)..(1200)
atgagcaaagacgtaggaatcccagagggttccgaaggctttcattcatattatacgcagaaaatatcagagcttcagttcactgtgaacgaacgccaaaagaacttgctccgtttgcaggctcagagaaatgaactcaacctcaaggttcgcttgctgcgcgaggagctgcagttgctccaggagcaggggagctatattgcggaggttgtgaagcccatggacaagaataaggtccttgtgaaggttcatcccgagggcaagtatgtagtggatgtggacaagaccatcaatattaaggatgtgacacccagcagcagggtggccctgcgaaacgagagctacacgcttcacaaaattctgcccaataaggtggacccattagtatcccttatgttggtggaaaaggtgcccgactccacctacgaaatggtgggtggcttggacaagcagatccaggagatcaaggaggtgattgagctgcctgtaaagcatccggaattatttgacgccttgggcattacccagccaaagggagtgctcctctacggaccgcctggaactgggaaaaccctgttagcccgagctgtagcccatcacacggagtgcacttttatacgggtttcagggtcggaactggttcagaaattcatcggcgagggttcgagaatggtaagggagctttttgtgatggctagggaacacgctccatccataatattcatggacgagatcgactcgattggttccgctcgactggaaaccggaacgggggattcggaggtccagcgaaccatgctggagcttctgaaccaactggacggcttcgaggctactaaaaacattaaggtgatcatggccaccaatcgcatcgatgtcttggatcaggcattactgcgtcctggtcgaattgaccgcaagatcgagtttccgccaccaaacgaagaggccagattggatatcctgaagatacattctcgcaagatgaacctcaccagaggcatcaatcttcgcaagattgctgaagaaatgccgggggcttctggtgctgaagtcaagggtgtttgcaccgaggcgggaatgtatgctctgagggaaagacgggtccatgtcacccaggaggactttgaaatggccgtctccaaggtaatgatgaaggactccgagaagaacatgtccatcagaaagttctggaaatag

SEQ ID NO: 4808 - protein, 399 aa, Drosophila melanogaster
MSKDVGIPEGSEGFHSYYTQKISELQFTVNERQKNLLRLQAQRNELNLKVRLLREELQLLQEQGSYIAEVVKPMDKNKVLVKVHPEGKYVVDVDKTINIKDVTPSSRVALRNESYTLHKILPNKVDPLVSLMLVEKVPDSTYEMVGGLDKQIQEIKEVIELPVKHPELFDALGITQPKGVLLYGPPGTGKTLLARAVAHHTECTFIRVSGSELVQKFIGEGSRMVRELFVMAREHAPSIIFMDEIDSIGSARLETGTGDSEVQRTMLELLNQLDGFEATKNIKVIMATNRIDVLDQALLRPGRIDRKIEFPPPNEEARLDILKIHSRKMNLTRGINLRKIAEEMPGASGAEVKGVCTEAGMYALRERRVHVTQEDFEMAVSKVMMKDSEKNMSIRKFWK

SEQ ID NO: 4809 - DNA, 1110 bp, Nanoarchaeum equitans Kin4-M
  CDS (1)..(1110): transl_table=11
atggatgaaaaagaaatagaggaaatactagaggaaaataaaaggctaaaatctatggtaaattatttgcaaaaagaattagaaaaatttagaagtccccccttagttgtagcagaagtaataaagccttatggagaaagagcaatcgtaagattgccaacgggtatggaattgttagtggaaaagctatcaaaaatagaaatagagccaggggatactgtatttctaaaccaatctaatatggttattgtaggcaaagcagaaaaaaggaaaaaattcaacatcgatgcttttgttattactgagaaaccaaatgtagattggtctcaaattggtgggcttaaagagcaaatcgaagaaattagagaggcaattgaattaccattaactaaaccagagatattcgaaaaaataggtatagaacctccaaaaggtgttctattgtatggcccccctggaactggtaaaacattaataggaaaagctttagccaaatccgctaatgccacttttatatatatagtaggttctgagctagttcaaaaatatattggagagggtgcaaaactagttaaagaattgtttgattatgctagggagcacgccccagcgatagtttttattgatgaaatagatgctatcgctgctagaagaatagagactggcacttctggagaaagagaagtacaaagaacttttatgcagcttttagcagaaatagatggttttaaacctttagataaggtaaaggttattggtgcaaccaatagattagatatattagatcctgctatattaagacctggcagattcgatagaataatacatattcctttgcctgacaaacaaggaagaatagaaatattcaaaatacatactaggaaaatgagaactaaagacatagattattcattattagcagagttaaccgaaggttttagcggggcagagataaaacaagtttgtatagaagcaggttatttggcgataagaaataaaagggattatgttatattagaggatttcataaaagcgatagacaaagtaaagaaaatgcgtaaaaaagaggaataccaacgctttttaaaaggtttatcttatttcggctaa

SEQ ID NO: 4810 - protein, 369 aa, Nanoarchaeum equitans Kin4-M
MDEKEIEEILEENKRLKSMVNYLQKELEKFRSPPLVVAEVIKPYGERAIVRLPTGMELLVEKLSKIEIEPGDTVFLNQSNMVIVGKAEKRKKFNIDAFVITEKPNVDWSQIGGLKEQIEEIREAIELPLTKPEIFEKIGIEPPKGVLLYGPPGTGKTLIGKALAKSANATFIYIVGSELVQKYIGEGAKLVKELFDYAREHAPAIVFIDEIDAIAARRIETGTSGEREVQRTFMQLLAEIDGFKPLDKVKVIGATNRLDILDPAILRPGRFDRIIHIPLPDKQGRIEIFKIHTRKMRTKDIDYSLLAELTEGFSGAEIKQVCIEAGYLAIRNKRDYVILEDFIKAIDKVKKMRKKEEYQRFLKGLSYFG

SEQ ID NO: 4811 - DNA, 1332 bp, Strongylocentrotus purpuratus
  CDS (1)..(1332)
atgggtcaaaaccagtcaggaggacctggcgggggtggaaggaatggggacaagaaagatgacaaggacaagaagaagaagtatgagcctccagttcccacccgtgttggcaagaagaagaggaggacgaaaggacctgacacagcaagcaagctaccacaagtcacaccacacacaaaatgcagacttcgccttctcaagatggagcgcatcaaggattatttgttgatggaggaagaattcatccgcaatcaggagagactcaagccacaagaagagaaagatgaggaagagcgttctaaggtggatgatcttagagggacccctatgtcagtaggttctctggaggagatcatcgatgataaccatgccattgtctcggcctcagtaggctcagaatactacgtcagtatcctgtctttcgttgacaaggatcagttggagccaggctgcaccgtcttactaaatcacaaggtgttagctatcgttggagtgctaggggatgacacagaccccatggtgtctgtcatgaagctggagaaggcgccacaagagtcctacgcggacataggaggtctcgacacacaaattcaagagatcaaggaatctgttgagctaccactaacccatcctgagtattatgaagagatgggcatcagacctcccaagggtgtcattctatatggtgctcctggaacaggtaaaactctccttgctaaagctgttgccaatcaaacatcagccacattccttcgtgttgtaggctcagaactcatccagaaatacttgggtgacggaccgaagcttgtaagggagctgttcagagtggctgaagagcatgctccatcaatagtcttcattgatgagatcgatgctattggaacaaagaggtacgagtccaactctggaggagagcgtgaaatccagaggaccatgttagaactactcaatcagttggatgggttcgattctagaggtgatgtcaaggtcatcatggcaaccaataggattgagacacttgaccctgctctcattagaccaggtcgtatcgaccgtaagatcgaatttcccctccccgatgagaagacaaagaggagaattttcaacatccacaccagccgcatgacgctatctaacgatgttaaccttgatgagtatatcacctccaaggatgatctatcaggagctgatattaaggctatatgtacagaggccggtctcatggcattacgtgagcgtaggatgaaggtgaacaatgaagacttcaagaagtcaaaagagaatgtcttgtaccgaaagacagaaggcaccccagaaggactctacctttaa

SEQ ID NO: 4812 - protein, 443 aa, Strongylocentrotus purpuratus
MGQNQSGGPGGGGRNGDKKDDKDKKKKYEPPVPTRVGKKKRRTKGPDTASKLPQVTPHTKCRLRLLKMERIKDYLLMEEEFIRNQERLKPQEEKDEEERSKVDDLRGTPMSVGSLEEIIDDNHAIVSASVGSEYYVSILSFVDKDQLEPGCTVLLNHKVLAIVGVLGDDTDPMVSVMKLEKAPQESYADIGGLDTQIQEIKESVELPLTHPEYYEEMGIRPPKGVILYGAPGTGKTLLAKAVANQTSATFLRVVGSELIQKYLGDGPKLVRELFRVAEEHAPSIVFIDEIDAIGTKRYESNSGGEREIQRTMLELLNQLDGFDSRGDVKVIMATNRIETLDPALIRPGRIDRKIEFPLPDEKTKRRIFNIHTSRMTLSNDVNLDEYITSKDDLSGADIKAICTEAGLMALRERRMKVNNEDFKKSKENVLYRKTEGTPEGLYL

SEQ ID NO: 4813 - DNA, 1395 bp, Magnaporthe grisea 70-15
  CDS (1)..(1395)
atgtcgaccctcgaagagcttgatgacctcgaccgtcaagagcgcgaggacaaggataagaaggatggcaagaaggatggcggcaaagacgacaagaacaagtctggtgatggtgacgatgagatgaaggatgcggagcccgaggaggatgatgtcctcgacgaggagattttgagcctcagcacacaggatatcctgacccggaggcggctgctcgaaaacgactcgaggatcatgaggagcgaatatcagcggctctcgcacgagaggcagacgatgcaagaaaagattaaggacaatctcgaaaagatcgcaaacaaccgtcaacttccttacctggtcggaaacgttgtcgagctcctggatcttgacccaacagccgagtcgtcggaggagggcgccaacattgacctggacgccacgcgggtcggcaagtcagcagtcatcaagacgtccacaagacagacaatattcctacctttgatcggtttggtcgacccagcaaccctcaaaccggctgatctgatcggtgtgaacaaggactcgtacctcatcctcgacacgctgcccgcagagtatgacagcagagtcaaggccatggaggtggacgagaagcccactgaaaagtacagtgacgttggtggtctggacaaacagatcgaggagttggtggaggctattgtctggcccatgaaggaggcagagcgcttcaagaagattggcatcaaggcacctaaaggtgcactgatgtacggtcctcctggaaccggaaagacgctcctggctcgtgcatgcgcggcccagacggatgcaaccttcctcaagcttgccggtcctcagctggtacagatgttcataggagatggagccaagctggtgcgcgactgctttgccctcgccaaggagaaggcaccgtccattatcttcatagacgagctggacgctgtaggaacaaagcgtttcgacagcgagaagtcaggtgaccgtgaggtgcagaggaccatgttggaactgctcaaccagttggacggtttcgcatctgacgaccgcatcaaggtgctggcggcgaccaaccgtgtcgatgtgttggaccctgccctgctgcgttccggacgtcttgaccgcaagatcgaatttccgctccccaacgaggaagcgcgggcacagattctcaagattcacagccgaaagatgcgttttgacccagcagtcaactggggcgagctggcacggagtaccgacgagttcggtggtgctatgctgaaggctgtctgcgttgaggccggcatgattgctctccgtatgggcaagaacaagattgggcacgagcattatgtggacgccatcgccgaggtgcaggccaagaagaaggacaccgtcaacttttacgcgtga

SEQ ID NO: 4814 - protein, 464 aa, Magnaporthe grisea 70-15
MSTLEELDDLDRQEREDKDKKDGKKDGGKDDKNKSGDGDDEMKDAEPEEDDVLDEEILSLSTQDILTRRRLLENDSRIMRSEYQRLSHERQTMQEKIKDNLEKIANNRQLPYLVGNVVELLDLDPTAESSEEGANIDLDATRVGKSAVIKTSTRQTIFLPLIGLVDPATLKPADLIGVNKDSYLILDTLPAEYDSRVKAMEVDEKPTEKYSDVGGLDKQIEELVEAIVWPMKEAERFKKIGIKAPKGALMYGPPGTGKTLLARACAAQTDATFLKLAGPQLVQMFIGDGAKLVRDCFALAKEKAPSIIFIDELDAVGTKRFDSEKSGDREVQRTMLELLNQLDGFASDDRIKVLAATNRVDVLDPALLRSGRLDRKIEFPLPNEEARAQILKIHSRKMRFDPAVNWGELARSTDEFGGAMLKAVCVEAGMIALRMGKNKIGHEHYVDAIAEVQAKKKDTVNFYA

SEQ ID NO: 4815 - DNA, 1248 bp, Nasonia vitripennis
  CDS (1)..(1248)
atggaagaaatgagcatcaccgtgccagataaggacgttgctgaagttgacatgaagccagtgattggacatggaactggagctatggaggaactagacgttgaagatctttatactaaatataagaaactacaacgaatgcttgaatttttggaagtccaagaagaatacatcaaagatgagcaaagaaacttgaaaaaagaatatttacatgctcaagaagaagtgaaacgtatacaaagtgtaccattagtgattggtcaatttttagaggcagttgatcaaaacactggaattgtcggttctacaaccggatctaactactatgtgcgcattttatcaactattgatcgagaactactaaagccatcagctagtgttgctttgcataaacacagcaatgccctggtggatgttttaccaccagaggcagattctagcatctctatgcttcaagcagatgagaagcctgatattctatacagtgacattggaggtatggacatgcaaaaacaagagataagagaagcagtagagctacctcttactcattttgaactttacaaacaaattggtattgacccgccaagaggtgttttgatgtatggtccaccaggttgtggaaaaactatgcttgctaaagctgttgccagacatacaacagctgctttcattcgtgtggttggatctgagtttgtgcaaaaatatctgggagaaggtccaagaatggtgagagacgtctttcgtttagcaaaagaaaactctccagctattatctttgtagacgaaattgatgctattgctacaaagcgttttgatgctcaaactggagctgatcgtgaagtacagcgtattctcttggagttgctaaatcaaatggacggttttgatcaaactaccaatgtcaaagttatcatggctactaacagagctgatactcttgaccctgctctgctgcgtccaggaagattggatcgtaaaattgaattcccactgcccgatcgtcggcaaaaacgactgattttttcaacaatcactacaaagatgaacttgagtgaggaagttgatcttgaagattatgttgctcgtccagacaaaatttctggtgctgatatcaatgctatctgtcaggaagctggaatgcacgctgtgcgcgaaaatcgttacatcgttcttgcgaaggacttcgagaagggttacaaaaacaacattaagaaagatgaatctgaacatgaattttataaataa

SEQ ID NO: 4816 - protein, 415 aa, Nasonia vitripennis
MEEMSITVPDKDVAEVDMKPVIGHGTGAMEELDVEDLYTKYKKLQRMLEFLEVQEEYIKDEQRNLKKEYLHAQEEVKRIQSVPLVIGQFLEAVDQNTGIVGSTTGSNYYVRILSTIDRELLKPSASVALHKHSNALVDVLPPEADSSISMLQADEKPDILYSDIGGMDMQKQEIREAVELPLTHFELYKQIGIDPPRGVLMYGPPGCGKTMLAKAVARHTTAAFIRVVGSEFVQKYLGEGPRMVRDVFRLAKENSPAIIFVDEIDAIATKRFDAQTGADREVQRILLELLNQMDGFDQTTNVKVIMATNRADTLDPALLRPGRLDRKIEFPLPDRRQKRLIFSTITTKMNLSEEVDLEDYVARPDKISGADINAICQEAGMHAVRENRYIVLAKDFEKGYKNNIKKDESEHEFYK

SEQ ID NO: 4817 - DNA, 1182 bp, Nasonia vitripennis
  CDS (1)..(1182)
atggcggccaccgtagatgctgtgagagaaaaagctcttcaagattataggaaaaaactactggagcataaggaggtggagtctcgcctcaaggagatgcgagatcacctcaaagacttaacgaagcagtatgacaagtcagaaaatgatttgaaggcattacagagtgttggccagatcgttggtgaagtcctgaaacagctcacggaagaaaaattcattgtcaaagcaacaaatggaccaagatatgttgttggatgtagacgtcaattggacaaaaacaagctaaagtcaggaactagagttgctttggatatgacaactctcacaatcatgcgttacttacccagagaagttgacccattagtttacaatatgtcacatgaagatcctggtgatgtcacatactccgaaatcggaggtttaagtgagcaaattcgagagttgagagaagtaattgaattgccattattgaatccagaactcttccagagggtaggtatcacacctccaaaaggttgtctgttatatggaccaccaggtactggaaaaacattgttggcacgagctgtggcaagtcaactggatgccaactttttaaaagttgtatctagtgctattgttgataaatacattggcgaatctgctagattgatcagagaaatgttcaactatgccagggatcatcagccttgtattatatttatggatgaaattgatgctatcggtggtagaagattttctgaaggaacaagtgctgatcgtgaaatccagaggaccttgatggagttgttgaaccaaatggatggttttgattctttagggcaagtaaaaatgatcatggctacgaacagacctgacaccctagatcctgctctgctacgacctggtagattggacaggaaaatagaaatcccactgccaaatgaacaggctagactggaaattttgaaaattcatgctaatcctattgccaagcatggagaaatagactatgaagctgtagtgaaattgtctgatggatttaatggtgcagatttaagaaatgtgtgtacagaagcaggactttttgcaatacgtttagaaagagaatacgttattcaggaagactttatgaaggctgttaggaaagtatctgacaataagaaactggaatcgaaattggattacaaaccagtataa

SEQ ID NO: 4818 - protein, 393 aa, Nasonia vitripennis
MAATVDAVREKALQDYRKKLLEHKEVESRLKEMRDHLKDLTKQYDKSENDLKALQSVGQIVGEVLKQLTEEKFIVKATNGPRYVVGCRRQLDKNKLKSGTRVALDMTTLTIMRYLPREVDPLVYNMSHEDPGDVTYSEIGGLSEQIRELREVIELPLLNPELFQRVGITPPKGCLLYGPPGTGKTLLARAVASQLDANFLKVVSSAIVDKYIGESARLIREMFNYARDHQPCIIFMDEIDAIGGRRFSEGTSADREIQRTLMELLNQMDGFDSLGQVKMIMATNRPDTLDPALLRPGRLDRKIEIPLPNEQARLEILKIHANPIAKHGEIDYEAVVKLSDGFNGADLRNVCTEAGLFAIRLEREYVIQEDFMKAVRKVSDNKKLESKLDYKPV

SEQ ID NO: 4819 - DNA, 1287 bp, Nasonia vitripennis
  CDS (1)..(1287)
atgacaacgttggaggacaaatcgatttgggaagatggagaggaaacgcttcgcgaagaagttttgcgtatgtcaacagatgaaatagtatctcgtaccagattactagacaatgaaatcaaaataatgaagagcgaggtgatgcgtatctcccatgaactgcaggctcagaatgacaagatcaaggagaatactgaaaagatcaaagtcaacaaaactctaccttacctagtatccaatgttatcgagttacttgatgttgacccgcaagatatgggagaagaagatggagctgttgttgatctggatgctcaacgtaaaggaaaatgtgctgtgataaaaacgtcaacgagacaaacgtacttccttcctgtaatagggcttgttgatgcagaatcactaaaaccaggtgatcttgttggagtcaataaggacagttatttagttctggaaactctcccagctgaatatgatgctagagtaaaggctatggaagttgacgagcgccccacagagcaatattcagacatcggtggtctggataagcaaattcaagagcttatagaagctgtagttcttccaatgacccacaaagaaaagtttgaaaatcttggtatccagccaccaaaaggtgttctattgtatggacctcctggaactggtaaaacactgctagcaagagcgtgtgcagcccagactaaatctacattcttgaaattggctggaccacaactggtgcagatgttcattggtgatggtgccaaacttgtaagagatgcattcagtcttgcaaaagagaaagctccagcaatcattttcattgatgagcttgatgctattggtaccaagagatttgattctgaaaaagctggagatcgtgaagtgcaaagaaccatgttggagctcctcaatcaactcgatggtttcagttctacagccgacattaaagtaattgctgctacaaaccgagttgatattttggatcctgctctgctcagatctggtagattagacaggaaaatcgaatttcctcatccaaatgaagaagcaagagcaagaatcatgcaaattcactcaaggaaaatgaacatgtccccggatgtcaactttgaagaacttgccaggagtacagatgatttcaatggagctcagtgcaaggctgtctgtgttgaggcgggtatgattgctttaaggcgtaatgctacagctgtgacgcatgaagatttaatggaagccattaatgaagtgcaagccaagaagaaggcaaaccttaattattatgcctaa

SEQ ID NO: 4820 - protein, 428 aa, Nasonia vitripennis
MTTLEDKSIWEDGEETLREEVLRMSTDEIVSRTRLLDNEIKIMKSEVMRISHELQAQNDKIKENTEKIKVNKTLPYLVSNVIELLDVDPQDMGEEDGAVVDLDAQRKGKCAVIKTSTRQTYFLPVIGLVDAESLKPGDLVGVNKDSYLVLETLPAEYDARVKAMEVDERPTEQYSDIGGLDKQIQELIEAVVLPMTHKEKFENLGIQPPKGVLLYGPPGTGKTLLARACAAQTKSTFLKLAGPQLVQMFIGDGAKLVRDAFSLAKEKAPAIIFIDELDAIGTKRFDSEKAGDREVQRTMLELLNQLDGFSSTADIKVIAATNRVDILDPALLRSGRLDRKIEFPHPNEEARARIMQIHSRKMNMSPDVNFEELARSTDDFNGAQCKAVCVEAGMIALRRNATAVTHEDLMEAINEVQAKKKANLNYYA

SEQ ID NO: 4821 - DNA, 1287 bp, Aedes aegypti
  CDS (1)..(1287)
atggccggaacactggaggacaaatccatctgggaagacggtgaggaaacactgggcgaggaagtgctccggatgccaaccgatgaaatagtgagcagaacccgtctgatggacaatgaaatcaaaatcatgaaaagcgaagtgatgcggatcaatcatgagctgcaaacaatgaacgaaaagattaaggataatacggaaaagatcaaggttaacaaaactctcccgtatttggtgtcgaatgtgatcgaactgctggatgtggatccgcaggaggaggaagatgacggcgcggtggtggtgctggattcgcagcggaagggcaaatgcgccgtcatcaaaacatcgacccggcagacatacttcctgccggtgatcgggctggtcgatccggagaagctcaagccgggagatctggtcggggtgaacaaggattcgtatctgattctggaaacgcttccggccgagtacgatgcccgtgttaaggccatggaagtggatgaacggccgacggaacagtactcggatattggtgggttggacaagcagatccaggaactgatcgaagcggttgtgctgccgatgacgcacaaggacaaattcaagaatctgggcattcacccgccgaagggtgtgctgctgtatggacctcctggaaccggaaaaactctgctggcccgtgcatgtgctgctcaaaccaagtccactttcctcaaactggccgggcctcagttggtgcagatgttcatcggagatggtgccaagctggtgcgtgatgccttcgctctggccaaagagaaatccccggcaattatcttcatcgacgagctggatgccatcggtaccaagcgtttcgactcggagaaggccggcgatcgtgaagtgcagcgtactatgttggagctgctgaatcagttggacggtttcagttccactgcggacatcaaggtcatcgcagctactaatcgggtggacattctggatccggctttgctgcgttccggtcgtctggatcgtaagattgaattcccgcacccgaacgaggaagcccgtgcgcgtattatgcagatccattcgcgtaagatgaacgtcagtccggacgtgaactttgaggagctggctcgttcgaccgacgacttcaacggtgcccagtgtaaggcggtgtgcgtcgaggccggtatgattgcactgagacgttcggcggtggccgttacccatgaggactttatggatgccatcatggaggtgcaggccaagaagaaggccaatctgaactactacgcgtaa

SEQ ID NO: 4822 - protein, 428 aa, Aedes aegypti
MAGTLEDKSIWEDGEETLGEEVLRMPTDEIVSRTRLMDNEIKIMKSEVMRINHELQTMNEKIKDNTEKIKVNKTLPYLVSNVIELLDVDPQEEEDDGAVVVLDSQRKGKCAVIKTSTRQTYFLPVIGLVDPEKLKPGDLVGVNKDSYLILETLPAEYDARVKAMEVDERPTEQYSDIGGLDKQIQELIEAVVLPMTHKDKFKNLGIHPPKGVLLYGPPGTGKTLLARACAAQTKSTFLKLAGPQLVQMFIGDGAKLVRDAFALAKEKSPAIIFIDELDAIGTKRFDSEKAGDREVQRTMLELLNQLDGFSSTADIKVIAATNRVDILDPALLRSGRLDRKIEFPHPNEEARARIMQIHSRKMNVSPDVNFEELARSTDDFNGAQCKAVCVEAGMIALRRSAVAVTHEDFMDAIMEVQAKKKANLNYYA

SEQ ID NO: 4823 - DNA, 1510 bp, Aedes aegypti
  CDS (107)..(1423)
gcaacttcagtgctccagtaatcatcgcagaaaactgtaaattcacggaagcatctggtagaaatctcttttttctaggagatattgtgcctatttttaagaaaaaatgggacaaaatcaatcagccggaggtggcggcgataaaaaggatgacaaagacaagaagaagaaatacgagcccccgattccgacgcgcgttggaaagaaaaagcggaagaacaagggtccggatgccgccatgaaattaccccaggtcactcctcatactcggtgtcgtttgaagttgttgaaattggagcgcatcaaggattatttgctgatggaggaggaattcattcgtaaccaggaacgactaaagccccaggatgaaaagaacgaagaggaacgttccaaagtcgatgatctgcgaggaacgccaatgtctgtgggcaacttggaggaaatcatagacgataatcatgcgattgtgtccacttccgtcggaagtgagcattacgttagcatcctgtctttcgttgataaagatcaattggaaccggggtgttcggtcttactgaatcataaggttcatgccgtggtcggagtgctgggagacgatactgacccgatggttaccgttatgaagctggagaaggctccccaggaaacgtatgccgatattggagggttagacactcagattcaagaaatcaaggaatccgtagagttgcctttgactcatcccgaatactacgaagaaatgggtataaaaccgccgaagggagttatcctctatggacctccaggaacgggtaaaacactactcgccaaggccgtggccaatcaaacttcagcgacatttttgcgagtggtcggatcggagttgatccagaagtacttgggtgatggacccaaactggttcgagaactattccgtgtcgctgaggaacatgctccttcaattgtcttcattgacgaaatcgatgcagtaggcacaaaacgttacgattctaattccggaggagaacgtgagatccagagaaccatgttggaactgctgaaccagctggacggtttcgattcacgcggggatgtgaaggttattatggcaaccaatcgcattgaaactctcgatccagctttgattcgtcctggtcgtattgatcgcaagattgagttcccacttccggacgagaaaaccaagcgtcgtatttttaacattcacaccgcccgtatgacgttggcagatgatgtgaacctttccgagctgattatggccaaggatgacctttccggggccgacatcaaagccatctgcactgaagcgggtctgatggctttacgtgagcgccgtatgaaagtgacgaacgaagactttaaaaaatccaaggaaagtgtcctttaccgcaagaaggaaggaactcccgaaggattgtatctctaggttggtatatgtcatgtgcattagccgtattatattcagatttgcttttgtctgatcatttaataaactcaaatgaaagaaaagtag

SEQ ID NO: 4824 - protein, 438 aa, Aedes aegypti
MGQNQSAGGGGDKKDDKDKKKKYEPPIPTRVGKKKRKNKGPDAAMKLPQVTPHTRCRLKLLKLERIKDYLLMEEEFIRNQERLKPQDEKNEEERSKVDDLRGTPMSVGNLEEIIDDNHAIVSTSVGSEHYVSILSFVDKDQLEPGCSVLLNHKVHAVVGVLGDDTDPMVTVMKLEKAPQETYADIGGLDTQIQEIKESVELPLTHPEYYEEMGIKPPKGVILYGPPGTGKTLLAKAVANQTSATFLRVVGSELIQKYLGDGPKLVRELFRVAEEHAPSIVFIDEIDAVGTKRYDSNSGGEREIQRTMLELLNQLDGFDSRGDVKVIMATNRIETLDPALIRPGRIDRKIEFPLPDEKTKRRIFNIHTARMTLADDVNLSELIMAKDDLSGADIKAICTEAGLMALRERRMKVTNEDFKKSKESVLYRKKEGTPEGLYL

SEQ ID NO: 4825 - DNA, 1305 bp, Aedes aegypti
  CDS (1)..(1305)
atgccggaccatttgggagatgatatgcgtaaggtgaagatcgataacaaagaggctgagccggaaatcgaagccctcgatgaagtggatattgagcttctgaaaacttatggtcaaggccagtaccacaagtcgatcaaacagatcgaggacgacatccaaaagtccatcaaacaggtcaacgagctgacgggcattaaggaaagcgatacaggtttggcgccaccggctctgtgggatttggcggccgataagcagatcttgcagaatgaacaacctttacaggttgctcgttgcacgaaaatcatcaacgcggactcggatgacccgaagtacatcattaatgtgaaacagtttgccaagtttgtggttgacttggcagattcggtggcccctaccgatatcgaggaaggaatgcgtgttggagttgaccgtaacaagtaccagattcatattcctctgccgccgaagattgatcccacggtgacgatgatgcaggtggaagagaaacccgatgtgacctacagcgatgtgggcggatgtaaggaacagatcgagaagctccgagaagtcgtagaaacccctctgctgcatccggagaaattcgtgaacctgggaattgaaccgccgaaaggagtgttgctgtttgggcctcccggaactggcaagaccctgtgtgcccgtgcggttgctaatcgtaccgatgcttgcttcattcgtgtgatcggttcagaactggtgcagaaatacgtcggagagggagctcgtatggtgagagagctgttcgaaatggcccgctccaaaaaggcctgtttgatcttcttcgatgaaatcgacgccattggaggtgctcgattcgatgacggtgccggaggagataatgaagttcagcgtaccatgttggagttgattaaccagctggatggattcgatccacgtggaaacatcaaggttctgatggctactaatcgtcccgatacgttggaccctgccttgatgcgtcctggtcgtttggatcgtaaagtagagtttggtttgcctgatttggaaggtagaacgcacatcttcaagatccatgcccgatcgatgtccgtcgagagggacatccgtttcgaactgttggcgcgtttgtgtccgaactctacgggcgctgaaatccggtccgtttgcaccgaggcaggtatgtttgcaattcgcgcgagacgtaaggtggccaccgagaaggatttccttgaagccgtgaacaaagtcatcaagagttacgccaagttcagcgccactccaagatatatgacttacaattaa

SEQ ID NO: 4826 - protein, 434 aa, Aedes aegypti
MPDHLGDDMRKVKIDNKEAEPEIEALDEVDIELLKTYGQGQYHKSIKQIEDDIQKSIKQVNELTGIKESDTGLAPPALWDLAADKQILQNEQPLQVARCTKIINADSDDPKYIINVKQFAKFVVDLADSVAPTDIEEGMRVGVDRNKYQIHIPLPPKIDPTVTMMQVEEKPDVTYSDVGGCKEQIEKLREVVETPLLHPEKFVNLGIEPPKGVLLFGPPGTGKTLCARAVANRTDACFIRVIGSELVQKYVGEGARMVRELFEMARSKKACLIFFDEIDAIGGARFDDGAGGDNEVQRTMLELINQLDGFDPRGNIKVLMATNRPDTLDPALMRPGRLDRKVEFGLPDLEGRTHIFKIHARSMSVERDIRFELLARLCPNSTGAEIRSVCTEAGMFAIRARRKVATEKDFLEAVNKVIKSYAKFSATPRYMTYN

SEQ ID NO: 4827 - DNA, 1287 bp, Chlamydomonas reinhardtii
  CDS (1)..(1287)
atggcgacgatagacaaagaaattttcgacgactcaactgaggatgccctgcctgaggagttttcctatatgagcgcagaggctatccagcaacgtgtgcgtctcctggacaatgagcttcgcgtgctaaaagacgagagcacccgccttacgttagagcaggacggtctgaaggagaaaattaaggagaacaaggagaagatcaagctcaacaaccagctgccatacctggttggcaatatcgtggaggtgctggacattaagccagaggaggacgaggaggaggacgggtcgactgtagatctcgatgctcagcgtcgcgggaagtgcgtggtgctcaaaacctcaacccgccaaaccattttcctgccggtagttggcctggtggacgcaaacacgctcaagccgggtgacctggtgggcgtgaacaaggacagctacctggtgctggacaccctccctgcggagtatgactcccgcgtgaaggcgatggaggtggacgagaagcccacggaggactactcggacgtgggcggtctggataagcagattcaggagctggtggaggctatcgtgctgcccatccagcacaaggaccgcttcaccaagctgggcatcaagccgccaaagggcgtgctgtgctacggccctcccggcacgggcaagacgctcattgcgcgtgcggtggcggcgcagacaaatgccaccttcctgaagctggcggggccacagctggtccagatgttcatcggtgacggcgccaagatggtgcgcgacgcgttcgcgctggccaaggagaagtcgccctgcatcatcttcattgatgagattgacgccatcggcaccaagcgcttcgactccgagctgtcgggagaccgcgaggtccagcgcaccatgctggagctgctcaaccagctggacggcttcagcagcaacgacgacgtcaaggtcattgccgccaccaaccgcgccgatatcctggaccccgcgctcatgcgctccggccgcctggaccgcaagatcgagttcccgcaccccaacgaggacgcgcgcgccaagatcctgcgcatccacagtcgcaagatgaacgtggcggcggacgttaactatgaggagctggggcggagcacggacgacttcaacgcggcgcagctgaaggccgtgtgcgtggaggcgggcatgctggcgctgcggcgagacggcacggaggtgacgcacgaggactttgtggagggcatcacgcaggtgcaggccaagaagaaggccaacctgcagtactatgcgtaa

SEQ ID NO: 4828 - protein, 428 aa, Chlamydomonas reinhardtii
MATIDKEIFDDSTEDALPEEFSYMSAEAIQQRVRLLDNELRVLKDESTRLTLEQDGLKEKIKENKEKIKLNNQLPYLVGNIVEVLDIKPEEDEEEDGSTVDLDAQRRGKCVVLKTSTRQTIFLPVVGLVDANTLKPGDLVGVNKDSYLVLDTLPAEYDSRVKAMEVDEKPTEDYSDVGGLDKQIQELVEAIVLPIQHKDRFTKLGIKPPKGVLCYGPPGTGKTLIARAVAAQTNATFLKLAGPQLVQMFIGDGAKMVRDAFALAKEKSPCIIFIDEIDAIGTKRFDSELSGDREVQRTMLELLNQLDGFSSNDDVKVIAATNRADILDPALMRSGRLDRKIEFPHPNEDARAKILRIHSRKMNVAADVNYEELGRSTDDFNAAQLKAVCVEAGMLALRRDGTEVTHEDFVEGITQVQAKKKANLQYYA

SEQ ID NO: 4829 - DNA, 1332 bp, Chlamydomonas reinhardtii
  CDS (1)..(1332)
atgggacagaaccagagtgcacaaggcccgggagcgcccggcgagggcaagaaggaccaggaaaagaagaagaagtacgagcccccggctccccctcctcgtgtgggaaagaagcaaaagaagcgcgatacggcagccagcctgggggcaaagctgccgaccgtgtaccccacagccaaatgcaagctgcgattgctgaagctggagcgcatcaaggactacctcctcatggaggaggagtttgtgcaaaaccaggagcaactcaagccgcaggaggagcgcaacgaggaggaccgctccaaggtggacgacctgcgcgggacgcccctgagtgtgggcaccctggaggagattattgatgagaaccacgcaattgtgtcctcgtcggtgggccccgagtactacgtgtgcatcctgtcctttgtggacaagacgcagctggagccgggctgcagcgtgctgctgcactacaagagcatgtcggtggtgggcatcctgagcgatgagaccgaccccatggtgtcggtcatgaaggtggagaaggcgccgctggagagctatgccgacgtgggcgggctggagccccagatccaggagatcaaggaggcggtggagctgccgctcacacatcccgagctgtacgaggacatcgggataaagccgcccaagggcgtcatcctgtacggcgagcccggcaccggcaagacgctgctggccaaggcggtggccaactccacctccgccaccttcctgcgcgtggtgggcagcgagctgatccagaagtacctgggcgacgggcccaagctggtgcgcgagctgttccgggtggcagacgagctcgcgccctccatcgtgttcatcgacgagatcgacgccatcggcaccaagcgctacgacgcgcacagcggcggcgagcgcgagatccagcgcaccatgcttgagctgctcaaccaactggacggctttgactcaatgagcgacgtcaaggtgatcatggccaccaaccgcattgagtcgctggacccggcgctcatccgccccggccgcatcgaccgcaagatcgagttcccgctgcccgacgccaagaccaagcgccgcatctttggcatccacaccggccgcatgacgctgagcgaggatgtcaacctggaggagtttgtcatggccaaggacgagctgagcggcgccgacatcaaggccgtgtgtaccgaggcgggtctgctggcgctgcgcgagcgccgcatgcgcgtgacgcaggccgacttccgcaaggccaaggagaaggtgctctacaagaagaaggagggcgtgccggaggggttgtacatgtaa

SEQ ID NO: 4830 - protein, 443 aa, Chlamydomonas reinhardtii
MGQNQSAQGPGAPGEGKKDQEKKKKYEPPAPPPRVGKKQKKRDTAASLGAKLPTVYPTAKCKLRLLKLERIKDYLLMEEEFVQNQEQLKPQEERNEEDRSKVDDLRGTPLSVGTLEEIIDENHAIVSSSVGPEYYVCILSFVDKTQLEPGCSVLLHYKSMSVVGILSDETDPMVSVMKVEKAPLESYADVGGLEPQIQEIKEAVELPLTHPELYEDIGIKPPKGVILYGEPGTGKTLLAKAVANSTSATFLRVVGSELIQKYLGDGPKLVRELFRVADELAPSIVFIDEIDAIGTKRYDAHSGGEREIQRTMLELLNQLDGFDSMSDVKVIMATNRIESLDPALIRPGRIDRKIEFPLPDAKTKRRIFGIHTGRMTLSEDVNLEEFVMAKDELSGADIKAVCTEAGLLALRERRMRVTQADFRKAKEKVLYKKKEGVPEGLYM

SEQ ID NO: 4831 - DNA, 1200 bp, Chlamydomonas reinhardtii
  CDS (1)..(1200)
atgtcctcagaggcggagaagcgtgaggcggcagtcacagattaccgtaagaagctgcttaagcacaaggagatcgacactaaagtccgggctctccgcgagtccgtcaaggacctgaagaaggagtatgacaagacggaggatgacctgaaggcgctacagagcgtgggacagattattggcgaggtgctgcggcagctggatgaggagcgattcattgttaaggccagcagcgggccacgctacgtggtgggcgtccggacaaaggtggacaagaccaagctgactgcgggcacgcgcgtgtctctggatatgaccaccctcaccatcatgcgcatgctgccgcgcgaggtggacccggttgtgttcaacatgctccaagaggaccccggcaaggtggactacagctccatcggcggcctgagcgagcagatccgcgagctgcgcgagtccatcgagctgccgctcatgaaccccgagctcttcctgcgcgtgggcatcaagccgcccaagggagtgctgctgtacggcccgccaggcacgggcaagacgcttctggctcgcgccatcgcctccaacatcgacgccaacttcctcaaggtggtgtcgtcggccatcgtagacaagtacattggcgagtcggcgcgcatcatccgcgaaatgttcgggtacgcgcgcgagcaccagccctgcgtcatctttatggacgaggtggacgccattggcgggcggcgcttcagcgagggcaccagcgccgaccgcgagatccagcgcacgctcatggagctgctcagccagctggacggcttcgacgtggtgggcaaggtcaagatgatcatggccacaaacaggcctgacgtgctggaccccgcgctgctgcgccccggccgcctggaccgcaagattgagatccccctgcccaacgagaacgcgcgcatggagatcctgaagatccacgcctccaagctggccaagcacggcgacatcgactacgagtccgtcatcaagctggcggagggcttcaacggagccgacctgcgcaacatctgcacggaggcgggcatgttcgccatccgggacgagcgcgattacgtggtgcaggaggacttcatgaaggcggtgcgcaagatggcggacgccaagaagctggagaccacactcaactacgactcggcgttcggggacggcggccagaagtaa

SEQ ID NO: 4832 - protein, 399 aa, Chlamydomonas reinhardtii
MSSEAEKREAAVTDYRKKLLKHKEIDTKVRALRESVKDLKKEYDKTEDDLKALQSVGQIIGEVLRQLDEERFIVKASSGPRYVVGVRTKVDKTKLTAGTRVSLDMTTLTIMRMLPREVDPVVFNMLQEDPGKVDYSSIGGLSEQIRELRESIELPLMNPELFLRVGIKPPKGVLLYGPPGTGKTLLARAIASNIDANFLKVVSSAIVDKYIGESARIIREMFGYAREHQPCVIFMDEVDAIGGRRFSEGTSADREIQRTLMELLSQLDGFDVVGKVKMIMATNRPDVLDPALLRPGRLDRKIEIPLPNENARMEILKIHASKLAKHGDIDYESVIKLAEGFNGADLRNICTEAGMFAIRDERDYVVQEDFMKAVRKMADAKKLETTLNYDSAFGDGGQK

SEQ ID NO: 4833 - DNA, 1284 bp, Chlamydomonas reinhardtii
  CDS (1)..(1284)
atgggcgaggacaagaagcacgaggatcctgacaaggatgcccccatcaaagcgctggatgagactgatatcgctttcctgaagaactacggtttggggccctacgctgctcccatcaagaaggtcgagcaggacgtcaaggatgtactcaagcgcatcaacgacgtgtgcggcgtgaaggagtcggacacgggcctagcgccgcccagccgttgggacctggtgtcggacaagcagatgcagcaggaggagcagccgctgcaggtggctcgctgcaccaagatcatcaaccccaacacggacgacgccaagtacgtcatcaacgtcaagcagatcgccaagttcgtggtggggctgggcgacaaggtggctcccaccgacattgaggagggcatgcgggtgggcgtggaccgcaccaagtaccagatccagatcccgctgccgcccaagatcgaccccagcgtcaccatgatgacggttgaggagaagcccgacatcacatacagcgacatcggcggcagcaaggagcagatggacaagatgcgcgaggtggtggagctgcccatgctgcaccccgagaagttcgtgcagctgggcatcgacccgcccaagggcgtgctcatgtacggcccgcccggcaccggcaagacgctgctggcgcgcgcggttgccaaccgcaccgacgcctgcttcatccgcgtcatcggctcagagctggtccagaagtacgtgggcgagggcgcgcgcatggtgcgcgagctgttccagatggcccggtccaagaaggcctgcatcgtgttcttcgacgaggtggacgccatcggcggtgcgcgcttcgacgacggcgcgggcggcgacaacgaggtgcagcgcaccatgctggagatcgtcaaccagctggacggcttcgacgcgcgcggcaacgtcaaggtgctgatggccaccaaccggcccgacacgctggaccccgcgctgctgcgacccggccgcctggaccgcaaggtggagttcgggcttcccgacctggccagccgcacccagatcttccagatccacacacgtaccatgaacgtggagcgggacatccgcttcgagctgctagcgcggctgtgccccaactccaccggcgccgacatcaggtcggtttgcacggaggcgggaatgtacgctatccgcgctcgccggaaaactgtgacggagaaggacttcttggaggctgttaacaaggtcatcaagggctaccagaagttcagcgccacgcccaagtacatgatcttcaactga

SEQ ID NO: 4834 - protein, 427 aa, Chlamydomonas reinhardtii
MGEDKKHEDPDKDAPIKALDETDIAFLKNYGLGPYAAPIKKVEQDVKDVLKRINDVCGVKESDTGLAPPSRWDLVSDKQMQQEEQPLQVARCTKIINPNTDDAKYVINVKQIAKFVVGLGDKVAPTDIEEGMRVGVDRTKYQIQIPLPPKIDPSVTMMTVEEKPDITYSDIGGSKEQMDKMREVVELPMLHPEKFVQLGIDPPKGVLMYGPPGTGKTLLARAVANRTDACFIRVIGSELVQKYVGEGARMVRELFQMARSKKACIVFFDEVDAIGGARFDDGAGGDNEVQRTMLEIVNQLDGFDARGNVKVLMATNRPDTLDPALLRPGRLDRKVEFGLPDLASRTQIFQIHTRTMNVERDIRFELLARLCPNSTGADIRSVCTEAGMYAIRARRKTVTEKDFLEAVNKVIKGYQKFSATPKYMIFN

SEQ ID NO: 4835 - DNA, 1341 bp, Physcomitrella patens subsp. patens
  CDS (1)..(1341)
atgggacaggggcagtcgggagggttgcccaagcaagggcctggtggagaccgcaacaaaggaaatggcgagaagaaggagaagaaatatgatcctccggcgccaccgacgcgcgtgggacgcaagcagcgcaagcagaaaggctctgaggctgccgcgcggttgcccgttgtgacgcctgctacgaagtgtaagctacggttgctgaagctggatcgtgtgaaggattacttgttgatggaggaagagtttgtgacgaatcaggagcggctgaagccccaggaggacaagaacgaggaggatcggtccaaggtggatgatcttcgggggtctcctatgagcgtgggcaacttggaggaaattattgacgaaaatcacgcaatcgtttcgtcttccgtggggcccgagtattatgtgaacattttgtcgttcgtggacaaggatcagctcgagcccggttgcgcaatcctcatgcacaataaggtcttatcagtggtggggttactgcaagatgatgtggaccctatggtatctgtaatgaaggtagagaaggctccactagagtcttatgctgatataggtggattagatcctcagattcaggagattaaagaagcagttgagttgccgttgacacatccggagctgtatgaagacattggtatcaagccccccaagggagttattttgtatggtgaacccggcactgggaaaactcttcttgctaaggctgttgcaaattccacgtctgccacatttcttcgtgttgtaggaagtgagctgatacagaagtatctaggagatggaccgaagttggtgcgagagctatttcgggtggctgatgaactgtctcctaccattgtttttatcgatgaaattgatgctgtcggtacaaaaagatatgatgcccattccggtggagagcgagaaattcaaaggactatgttggagttgctgaatcagttggatggttttgatgctcgtggtgatgttaaggttatattggctactaatcgaattgaaagcttagatccggccctgcttcggcctggtagaatcgatcgcaagatcgagtttccattgcctgatattaaaaccaagagaagaatttttcagatacatacttctagaatgacaatggctgatgatgtcaacttggaggaattcgtgatgaccaaggatgaattctctggtgctgacattaaagctatctgcacggaagctggtcttcttgcattaagggagcgccgtatgaaggtgactcaagcggacttcaagaaggctaaggacaaagtgatgtacaagaagaaggaaggtgtacccgaggggttatatatgtag

SEQ ID NO: 4836 - protein, 446 aa, Physcomitrella patens subsp. patens
MGQGQSGGLPKQGPGGDRNKGNGEKKEKKYDPPAPPTRVGRKQRKQKGSEAAARLPVVTPATKCKLRLLKLDRVKDYLLMEEEFVTNQERLKPQEDKNEEDRSKVDDLRGSPMSVGNLEEIIDENHAIVSSSVGPEYYVNILSFVDKDQLEPGCAILMHNKVLSVVGLLQDDVDPMVSVMKVEKAPLESYADIGGLDPQIQEIKEAVELPLTHPELYEDIGIKPPKGVILYGEPGTGKTLLAKAVANSTSATFLRVVGSELIQKYLGDGPKLVRELFRVADELSPTIVFIDEIDAVGTKRYDAHSGGEREIQRTMLELLNQLDGFDARGDVKVILATNRIESLDPALLRPGRIDRKIEFPLPDIKTKRRIFQIHTSRMTMADDVNLEEFVMTKDEFSGADIKAICTEAGLLALRERRMKVTQADFKKAKDKVMYKKKEGVPEGLYM

SEQ ID NO: 4837 - DNA, 1341 bp, Physcomitrella patens subsp. patens
  CDS (1)..(1341)
atggggcagggtcagtccggaggattgcccaagccggggcccggcggagaccgcaacaagggcgatggcgcgaagaaggagaagaagtacgagcccgcggctccacctactcgcgttgggcgcaagcagcgcaagcagaagggctccgaggctgcggcgcgattgcctgtggtgacgcctgcaactaagtgtaagctgcggttgctgaagctggaacgcgtgaaagactatctgttgatggaagaagagtttgtgaccaatcaggagcggttgaagccgcaggaagataagaacgaagaggatcggtctaaggtcgatgacctacgggggtcgccgatgagtgtaggcaacttggaagaaattattgatgagaaccatgcgattgtgtcgtcgtccgtgggtcctgagtattatgtgaatattttgtcgttcgtagacaaggatcagctggagcctggctgcgcaatcctcatgcacaacaaggtcctttcagtggttgggttgctgcaagatgacgtggaccctatggtgtcagtgatgaaagttgaaaaagctcctctagagtcatatgccgatatcggtggactagatcctcagattcaagaaattaaggaagcagtggagctacccttaacgcatccagagctttacgaggatattggtatcaagcctcccaagggggttattttatatggtgaaccgggaactggaaagacgcttcttgccaaggctgttgcaaattcaacttctgccacgtttcttcgcgttgtaggaagtgagctaattcagaagtatctgggggatggacctaagttggtgcgagagttatttcgggtcgcggatgaattatctccttccattgtctttattgacgaaattgatgcagtgggtacaaagagatatgatgctcattcaggtggggaaagagagattcagaggactatgttggagttgctgaatcagttggatggatttgattctcgtggagatgtgaaggttattttggctaccaatcgtattgaaagcttggacccggcgttgctccgacctggtagaattgatcgtaagatagaattcccattgccagatatcaaaaccaagaggcgaattttccagattcatacttctagaatgactatggctgatgatgtaaacctggaggaattcgtaatgaccaaggatgaattttctggtgctgacattaaagccatttgcacggaggctggtcttcttgcgttgcgtgagcgccggatgaaggtgactcaagttgatttcaagaaggccaaagagaaggtaatgtataagaagaaggaaggtgtacctgagggattatacatgtag

SEQ ID NO: 4838 - protein, 446 aa, Physcomitrella patens subsp. patens
MGQGQSGGLPKPGPGGDRNKGDGAKKEKKYEPAAPPTRVGRKQRKQKGSEAAARLPVVTPATKCKLRLLKLERVKDYLLMEEEFVTNQERLKPQEDKNEEDRSKVDDLRGSPMSVGNLEEIIDENHAIVSSSVGPEYYVNILSFVDKDQLEPGCAILMHNKVLSVVGLLQDDVDPMVSVMKVEKAPLESYADIGGLDPQIQEIKEAVELPLTHPELYEDIGIKPPKGVILYGEPGTGKTLLAKAVANSTSATFLRVVGSELIQKYLGDGPKLVRELFRVADELSPSIVFIDEIDAVGTKRYDAHSGGEREIQRTMLELLNQLDGFDSRGDVKVILATNRIESLDPALLRPGRIDRKIEFPLPDIKTKRRIFQIHTSRMTMADDVNLEEFVMTKDEFSGADIKAICTEAGLLALRERRMKVTQVDFKKAKEKVMYKKKEGVPEGLYM

SEQ ID NO: 4839 - DNA, 1179 bp, Physcomitrella patens subsp. patens
  CDS (1)..(1179)
atggcggatcccgaagcggtgcgcgttgaatacaggcgcaagcttctgcagcacaaggagattgattcgaggctaaggagtttgcgagataatgtcaaggctgcaaggagggagttcgataagacggaggatgacctgaaggctctgcagagcgtgggtcaaatcatcggggaagtgttgagacagcttgattctgaacgattgattgttaaggccagcagtggtccacgatatgtggtcggatgccgcaacaaggtcgacaaagaaaagttggtggctggtactcgagtggcactagatatgaccactctcacgatcatgcgagcacttcccagagaggttgatcccgtagtgtacaacatgcttcacgaggaccctggtaatattagctactcagctgttggaggactaagtgaccaaattcgagaacttcgtgagtcaattgagttgccgcttatgaaccctgagctcttccttcgagttggcattaagcctccaaagggtgtattgttgtatggcccccctggaactggcaaaacccttctggcgcgagcaattgctagcaatattgatgctaatttcttaaaagtggtttctagtgcgattgtggataagtacattggagaaagtgcgagacttattagggagatgtttagttacgcccgtgaccatcaaccttgcatcatatttatggatgagattgatgccattggaggccgtcgttttagcgagggtactagtgcagatcgagaaatccagcgtacccttatggagttattgaatcaacttgatggttttgatcagcttggcaaggtaaagatgatcatggcaaccaaccggccagatgttcttgaccctgctcttctacgacctggtcgtttggatcgaaagattgaaattccactaccaaatgaacagtctcgtacagagattttgaagattcatgcatctggtattacgaagcatggagagattgattacgaggctattgttaaacttgccgagggctttaacggagctgatcttcgaaatgtctgtactgaagcgggcatgttcgccatccgagctgatcgtgactatgttgttcaagaggatttcatgaaggctgttcggaagctcacggacgcaaagaagctggaatcaagtgctcattacagcaccgattttggcaaggagtag

SEQ ID NO: 4840 - protein, 392 aa, Physcomitrella patens subsp. patens
MADPEAVRVEYRRKLLQHKEIDSRLRSLRDNVKAARREFDKTEDDLKALQSVGQIIGEVLRQLDSERLIVKASSGPRYVVGCRNKVDKEKLVAGTRVALDMTTLTIMRALPREVDPVVYNMLHEDPGNISYSAVGGLSDQIRELRESIELPLMNPELFLRVGIKPPKGVLLYGPPGTGKTLLARAIASNIDANFLKVVSSAIVDKYIGESARLIREMFSYARDHQPCIIFMDEIDAIGGRRFSEGTSADREIQRTLMELLNQLDGFDQLGKVKMIMATNRPDVLDPALLRPGRLDRKIEIPLPNEQSRTEILKIHASGITKHGEIDYEAIVKLAEGFNGADLRNVCTEAGMFAIRADRDYVVQEDFMKAVRKLTDAKKLESSAHYSTDFGKE

SEQ ID NO: 4841 - DNA, 1239 bp, Physcomitrella patens subsp. patens
  CDS (1)..(1239)
atggaagtcaccgccgtgaccgcaacgggcattgcgcctgttctctcggcgaagtccttcctgccagagcctgtggtggcggagctcgacgaggaggatctgtacaccaggcaaaagctcttgcagcggcagctggagtttgtggatattcaggaagagtatatcaaggatgagcagaagaatttgaagcgagagttgcttagggcgcaggaggaggtgaagcggattcagtctgtgccactggtgattgggcagttcaatgagatggtagaccagaataatgggattgtcgggtcgaccacgggttcgaactattacgtgcgaattctcagtactatcaatcgggaactgttgaaaccatcgtcctcggttgcgcttcacaggcactcgaatgccttagttgatgtgctgccacctgaagctgattcaagcatctctttaatgacacaaaccgagaagcctgatgtagcgtatactgatattggtggatgtgatatacaaaaacaagagattagagaggccgtggagcttccacttacacatcatgaactatacaagcagattggcatcgacccaccccgtggcgtgttgttgtatggaccccctgggacaggaaagactatgcttgccaaggctgtcgctcatcatactaccgcagctttcattcgtgttgttggttctgagtttgtacagaagtatcttggggagggtccccgtatggtgcgtgatgtattccgtctagcgaaggagaatgccccagccattatatttattgatgagattgatgcaattgcaacagctcgttttgacgctcaaactggagcagatagggaagttcagcgtatcttgatggagcttttgaatcagatggatggtttcgaccaaactgtgaatgtgaaggtgatcatggccaccaatcgtgctgatactcttgatccagcgctgctacgacctggacgtcttgatcgtaaaattgaattcccattgcctgacaggagacagaagcgccttgtgtttcaggtgtgcacagcaaagatgaatttaagtgaagaagttgacctggaagactacgtctctagacccgataagataagtgcagctgagatctccgcaatttgtcaagaggctggcatgcatgccgtacgaaaaaatcgctatgttattttaccgaaggacttcgaaaaaggctataggtcaaatgttaggaaatctgacacggactttgagttttaccgatag

SEQ ID NO: 4842 - protein, 412 aa, Physcomitrella patens subsp. patens
MEVTAVTATGIAPVLSAKSFLPEPVVAELDEEDLYTRQKLLQRQLEFVDIQEEYIKDEQKNLKRELLRAQEEVKRIQSVPLVIGQFNEMVDQNNGIVGSTTGSNYYVRILSTINRELLKPSSSVALHRHSNALVDVLPPEADSSISLMTQTEKPDVAYTDIGGCDIQKQEIREAVELPLTHHELYKQIGIDPPRGVLLYGPPGTGKTMLAKAVAHHTTAAFIRVVGSEFVQKYLGEGPRMVRDVFRLAKENAPAIIFIDEIDAIATARFDAQTGADREVQRILMELLNQMDGFDQTVNVKVIMATNRADTLDPALLRPGRLDRKIEFPLPDRRQKRLVFQVCTAKMNLSEEVDLEDYVSRPDKISAAEISAICQEAGMHAVRKNRYVILPKDFEKGYRSNVRKSDTDFEFYR

SEQ ID NO: 4843 - DNA, 1179 bp, Physcomitrella patens subsp. patens
  CDS (1)..(1179)
atggcggaccccgaagtggtgcgcgctgagtataggcgcaagcttttgcagcacaaagagctcgatgcaaggctgcgaaatttgcgtgaaaatgtgaaggctgcgaggaaagagtttgacaagacagaagatgatttgaaggcgttgcagagcgtgggtcaaatcatcggagaagtgttgaggcagctggattctgaacgcttaattgtgaaggcgagcagtggcccacggtatgtggttggatgccgcaacaaggtggataaagagaagctggtggctggtactcgagttgcactagacatgaccaccctcacaatcatgcgagcgcttcctcgagaggttgaccccgtagtgtacaacatgcttcatgaggaccccggaaatatcagctattcagctgttggaggactaagtgaccaaattcgagaacttcgtgagtcgattgagttgccgttaatgaatcctgaactctttctgcgagttggcattaaacctccaaagggtgtgttgttatatgggcctcctgggactggtaaaactcttttagcacgagcaattgccagcaacattgatgctaattttctgaaggtggtgtctagtgcgattgtggataagtatataggagaaagtgcgagactcattagagagatgtttagttatgctcgcgaccatcaaccgtgcataatatttatggatgagattgatgcaattggaggacgtaggtttagcgaaggtacaagtgcagatcgagagattcaacgcacactcatggagttattgaatcaacttgatggttttgatcagcttggaaaggtaaagatgataatggccactaatcggcctgatgttcttgatcctgctttgctccggcctggccgtttggatcgaaaaattgaaattccactgcctaatgagcaatctcgcacagagattttgaaaatccatgcatctggcattactaagcatggagagattgattatgaggctattgttaaacttgctgagggcttcaacggagctgatcttcgcaacgtgtgcactgaagcgggcatgtttgctatccgggctgatcgggactatgttgtacaagaagactttatgaaggctgttcgaaagcttacagatgcaaagaagttggaatcaagtgctcattatagcacagattttggcaaggagtag

SEQ ID NO: 4844 - protein, 392 aa, Physcomitrella patens subsp. patens
MADPEVVRAEYRRKLLQHKELDARLRNLRENVKAARKEFDKTEDDLKALQSVGQIIGEVLRQLDSERLIVKASSGPRYVVGCRNKVDKEKLVAGTRVALDMTTLTIMRALPREVDPVVYNMLHEDPGNISYSAVGGLSDQIRELRESIELPLMNPELFLRVGIKPPKGVLLYGPPGTGKTLLARAIASNIDANFLKVVSSAIVDKYIGESARLIREMFSYARDHQPCIIFMDEIDAIGGRRFSEGTSADREIQRTLMELLNQLDGFDQLGKVKMIMATNRPDVLDPALLRPGRLDRKIEIPLPNEQSRTEILKIHASGITKHGEIDYEAIVKLAEGFNGADLRNVCTEAGMFAIRADRDYVVQEDFMKAVRKLTDAKKLESSAHYSTDFGKE

SEQ ID NO: 4845 - DNA, 1487 bp, Physcomitrella patens subsp. patens
  CDS (1)..(1164)
atgacgacggcaatggaagaggatctctacactaggcaaaagctgttaatgcggcagctggagttcctggacattcaagaggagtacattaaggatgagcagaaaaatttgaaacgtgagttgcttagggcacaggaggaggttaagcggattcaatccgtgccgcttgtcattggacagtttatcgagatggtggaccagaataatggaattgtcgggtctactaccgggtcgaactattatgtgcggattttgagtacgatcaatcgagagcttctgaagccatcgtcctcggttgcgcttcataggcattcgaatgcgttagtggatgtgctgccgcctgaagcagattctagcatctctctgttgacacaatccgagaagcctgatgtgtcctataatgatataggtgggtgtgatattcagaaacaagagattagggaagctgtggagcttccacttactcatcacgagttatacaagcagattggtattgacccaccccgaggtgtgttgctttatggacctcctggaacggggaagaccatgcttgctaaggctgttgctcatcacacgactgcagctttcattcgtgttgtcggttctgagttcgtgcagaaatatcttggagagggtccccgcatggtacgtgacgtattccgactggcaaaggagaatgccccagccattatcttcattgatgagattgatgcaattgcgacagctcgttttgatgctcaaaccggagcagatagggaggttcagcgtatcttgatggagctcttgaaccagatggatggtttcgatcaaacagttaatgtaaaggtaattatggccaccaatcgagcggatactcttgaccccgctttactgcgacctggacgactcgatcggaaaattgagtttccactgcctgacaggagacagaaacgtcttgttttccaggtgtgcactgcaaagatgaacttaagcgaggaagttgatctcgaagactatgtctcgaggcccgacaagatcagtgctgcagagatttccgctatttgtcaggaggctggtatgcatgcagtacggaagaatcgttacgtgattttgcccaaggattttgaaaagggctatagatctaatgttaaaaagtctgatacagactttgagttctacaggtagatgcctattagctttctgatttctgcaatgcagctgaacataaagaaagaattgctttaggtttattaattccttcaatggtgtgaaccgggatatagaggggctaatgcttcttgtaatttgacctacaaagggctttaataggtaaagtttgtgagtcctttaataggtaaagtttgtgagtcctttaataggtaaagtttgtgtagtcgatttcgtttgtgcatcatttatatgtaacctggtaaacagttagatggctctatgctcggcatagtctaagacgaaattgaactgttgtgaaattgctgtgcttcagctct

SEQ ID NO: 4846 - protein, 387 aa, Physcomitrella patens subsp. patens
MTTAMEEDLYTRQKLLMRQLEFLDIQEEYIKDEQKNLKRELLRAQEEVKRIQSVPLVIGQFIEMVDQNNGIVGSTTGSNYYVRILSTINRELLKPSSSVALHRHSNALVDVLPPEADSSISLLTQSEKPDVSYNDIGGCDIQKQEIREAVELPLTHHELYKQIGIDPPRGVLLYGPPGTGKTMLAKAVAHHTTAAFIRVVGSEFVQKYLGEGPRMVRDVFRLAKENAPAIIFIDEIDAIATARFDAQTGADREVQRILMELLNQMDGFDQTVNVKVIMATNRADTLDPALLRPGRLDRKIEFPLPDRRQKRLVFQVCTAKMNLSEEVDLEDYVSRPDKISAAEISAICQEAGMHAVRKNRYVILPKDFEKGYRSNVKKSDTDFEFYR

SEQ ID NO: 4847 - DNA, 1179 bp, Physcomitrella patens subsp. patens
  CDS (1)..(1179)
atggcggatcccgaagcggtgcgcgtggagtacaggcgcaagcttctgcaacacaaggagctcgatgcacggctaaggaatttgcgagagaacgtgaaggctgcgaggaaggagtttgataagacagaggacgacctcaaggcgttgcaaagtgtggggcaaatcatcggagaagtcttgagacagcttgattctgaacgcttgattgtcaaggcaagcagtggaccgcgatatgtggttggatgccgcaacaaggttgacaaagagaagttgatggctggtactcgagttgcattggatatgactactctcacgattatgcgagcacttcccagagaggttgatcccgttgtgtacaatatgctgcacgaggaccctggaaatattagctactcagccgttggaggactcagtgatcaaatccgagagctccgtgagtcaattgagttgccgcttatgaatcccgagctcttcctgcgagttggcattaagcctccaaagggtgtattgttgtatggccccccaggaaccggcaaaacccttctggcacgagcaattgccagcaacattgatgctaatttcttaaaggtggtttctagtgcgattgtggacaagtacataggagaaagtgcaagactcattagggagatgtttagttatgcccgcgaccatcaaccttgcatcatttttatggatgaaattgatgcgatcggaggtcgtcggtttagcgagggtacaagcgctgatcgagaaattcagcggacgctaatggagttgttgaatcaactcgatggatttgatcagcttggaaaggtaaagatgatcatggcaaccaatcgacctgatgttcttgaccctgcattgctccgacccggccgtttagatcgaaagattgaaattccactaccaaatgaacaatctcggacagagattctgaaaattcatgcatctgggatcactaaacatggagagattgattacgaagctattgtcaaactcgctgaggggttcaatggagccgatcttcgtaatgtctgcactgaagcgggcatgttcgctatccgggctgatcgtgactatgttgtgcaagaggatttcatgaaggctgttcggaagcttacggacgcaaagaagctggaatcaagtgcacactacagcaccgattttggcaaggagtaa

SEQ ID NO: 4848 - protein, 392 aa, Physcomitrella patens subsp. patens
MADPEAVRVEYRRKLLQHKELDARLRNLRENVKAARKEFDKTEDDLKALQSVGQIIGEVLRQLDSERLIVKASSGPRYVVGCRNKVDKEKLMAGTRVALDMTTLTIMRALPREVDPVVYNMLHEDPGNISYSAVGGLSDQIRELRESIELPLMNPELFLRVGIKPPKGVLLYGPPGTGKTLLARAIASNIDANFLKVVSSAIVDKYIGESARLIREMFSYARDHQPCIIFMDEIDAIGGRRFSEGTSADREIQRTLMELLNQLDGFDQLGKVKMIMATNRPDVLDPALLRPGRLDRKIEIPLPNEQSRTEILKIHASGITKHGEIDYEAIVKLAEGFNGADLRNVCTEAGMFAIRADRDYVVQEDFMKAVRKLTDAKKLESSAHYSTDFGKE

SEQ ID NO: 4849 - DNA, 1341 bp, Physcomitrella patens subsp. patens
  CDS (1)..(1341)
atggggcaggggcagtcgggaggattgccaaagcagggtcctggcggggaccgcaccaagggagatggtggcaagaaggagaagaagtacgagcccgcggcaccgccgtcacgcgttggacgcaagcagcggaaacagaagggttccgaggctgcggcgcggttgcccgtggtcactcccgcgaccaaatgtaagctgcgattgctgaagctggaacgtgtgaaggattatttattgatggaggaggaatttgtgacgaatcaggagcggttgaagccgcaggaggataagaacgaggaggaccggtcgaaggttgatgacctgcgagggtcgccaatgagcgttggtaacttggaggaaatcattgacgagaatcacgctattgtgtcatcgtccgtgggtcctgagtattatgtgaatattttatcgttcgtggacaaggatcagctcgagcctggttgcgcaatcctcatgcacaacaaggtcctttcagttgtgggattgctgcaagatgacgtggacccaatggtttctgttatgaaagttgaaaaagctcctctagagtcatatgctgacattggtggattagaccctcagattcaagaaatcaaggaagcagtggagctacctctaacacatccagagctttatgaggatattggtatcaagcctcccaagggtgtaattttgtatggtgaaccaggaactggaaagacgctccttgctaaggctgttgcaaattccacgtctgctacatttctccgcgttgttgggagtgagctgatacagaagtatctgggtgatggaccaaagttggtacgagagttgtttcgggttgcagacgaattgtctcctaccatcgtctttattgacgaaattgatgccgtcggtacgaagagatacgatgctcactccggtggagaacgagaaattcagcggactatgttggagttgttgaatcagttggatggatttgatgctcgtggtgacgtaaaagtcattctggctactaatcgtatcgaaagcctggatccggctctgcttcgacctggtagaattgatcgcaagattgagtttccattgccagatatcaaaaccaagaggagaattttccagattcatacttctagaatgactatggctgatgatgtaaacctagaggagtttgtgatgaccaaagatgagttttctggtgctgacattaaagctatctgtacggaagctggtcttcttgcattgcgtgagcgccgcatgaaggtgactcaagtcgatttcaagaaggctaaagagaaagtgatgtataagaagaaggagggcgtgcctgagggtttgtacatgtag

SEQ ID NO: 4850 - protein, 446 aa, Physcomitrella patens subsp. patens
MGQGQSGGLPKQGPGGDRTKGDGGKKEKKYEPAAPPSRVGRKQRKQKGSEAAARLPVVTPATKCKLRLLKLERVKDYLLMEEEFVTNQERLKPQEDKNEEDRSKVDDLRGSPMSVGNLEEIIDENHAIVSSSVGPEYYVNILSFVDKDQLEPGCAILMHNKVLSVVGLLQDDVDPMVSVMKVEKAPLESYADIGGLDPQIQEIKEAVELPLTHPELYEDIGIKPPKGVILYGEPGTGKTLLAKAVANSTSATFLRVVGSELIQKYLGDGPKLVRELFRVADELSPTIVFIDEIDAVGTKRYDAHSGGEREIQRTMLELLNQLDGFDARGDVKVILATNRIESLDPALLRPGRIDRKIEFPLPDIKTKRRIFQIHTSRMTMADDVNLEEFVMTKDEFSGADIKAICTEAGLLALRERRMKVTQVDFKKAKEKVMYKKKEGVPEGLYM

SEQ ID NO: 4851 - DNA, 1239 bp, Physcomitrella patens subsp. patens
  CDS (1)..(1239)
atggaggtcaccgctgtgacagagaaaggcatagcccctgtggtgacagcgaaatcgttccttcccgagcctgtcgtagcggaggtcgaagaggaggatctgtatactcggcagaagctcctgcagcggcagctggagtttttggacattcaggaggagtatatcaaggatgagcagaagaatttgaagcgtgagctgcttagggcgcaggaagaggtgaagcgtattcagtccgtgccgcttgtgattgggcagtttattgagatggtggatcaggacaacgggattgtcgggtcgaccactggctcgaacttttatgtgaggattttgagtacgatcaatcgggagcttttgaagccgtcgtcgtcggttgcgcttcataggcactcgaatgcgttggttgatgtgttgccccctgaagctgattccagtatctctctattgacacaatccgagaagcccgatgtatcgtataacgatattggtggatgcgatattcagaaacaagaaatcagggaagctgtggagcttccacttacacatcacgagttatataagcagattggtattgacccacctcgaggcgtcttgctctatggacctcctggaacgggaaagaccatgcttgccaaggctgtcgctcaccataccactgcagctttcattcgtgttgttggttctgagtttgtacaaaagtatcttggggagggtccccgtatggtgcgtgatgtatttcaactggcaaaggaaaatgccccagctattatatttattgatgaaattgatgcaatcgcaacagcccgtttcgacgctcaaactggagcagacagggaggtacagcgtatattaatggaacttttgaatcagatggatgggtttgatcagactgtcaatgtcaaggtgatcatggctaccaatcgagcagatactcttgaccccgctttattgcgacccggacgtcttgatcgcaaaattgaatttccactgcctgacaggaggcaaaagcgtttagtcttccaggtatgtactgcaaagatgaatctaagcgaggaggttgatttagaagactatgtttctaggcctgataaaataagtgctgctgagatttctgctatctgtcaggaggctggtatgcatgcagtaaggaagaatcgctacgtgattttgcccaaggattttgagaaaggctacagatctaacgttaaaaagtctgacacagactttgagttctacagatag

SEQ ID NO: 4852 - protein, 412 aa, Physcomitrella patens subsp. patens
MEVTAVTEKGIAPVVTAKSFLPEPVVAEVEEEDLYTRQKLLQRQLEFLDIQEEYIKDEQKNLKRELLRAQEEVKRIQSVPLVIGQFIEMVDQDNGIVGSTTGSNFYVRILSTINRELLKPSSSVALHRHSNALVDVLPPEADSSISLLTQSEKPDVSYNDIGGCDIQKQEIREAVELPLTHHELYKQIGIDPPRGVLLYGPPGTGKTMLAKAVAHHTTAAFIRVVGSEFVQKYLGEGPRMVRDVFQLAKENAPAIIFIDEIDAIATARFDAQTGADREVQRILMELLNQMDGFDQTVNVKVIMATNRADTLDPALLRPGRLDRKIEFPLPDRRQKRLVFQVCTAKMNLSEEVDLEDYVSRPDKISAAEISAICQEAGMHAVRKNRYVILPKDFEKGYRSNVKKSDTDFEFYR

SEQ ID NO: 4853 - DNA, 1236 bp, Physcomitrella patens subsp. patens
  CDS (1)..(1236)
atggacgagctggcagggatgagcccggaagatattcaacgcagaagtcgtctgctcgaaaacgagatccgtgtcttgaaggacgaaacgcacagactttcactggaacacgatgctacgaaagaaaaaatcaaggagaatcaagagaagatcaagctgaataagcagctgccttaccttgtcggaaacgtagtggagatcttggatgtcaatccagaagatgaagccgaagaggatggagctaatgttgacttggattctcagaggaagggcaagtgtgttgtcttgaagacatccacacgccaaacgatcttcttgcctgtagttggtctagtggatcctgacagcttgaaacccggtgacttggttggagtaaacaaggacagttatctaattctggatacactgccttcggagtatgattcgcgtgtaaaagctatggaggttgatgagaaacctacagaggtgtactcggatattggtggtctggataaacagattcaagagttgatggaagcaattgttcttcctatgactcacaaagaacggtttgaaagcttaggtgtccgacctcccaaaggagtgttgttatatggcccacccggtactggcaagaccctcatggctcgtgcgtgtgcagctcaaacaaatgctactttcttgaagcttgctggacctcagcttgttcagatgttcattggagatggtgcaaaacttgtgagggacgcgtttcagttggcgaaagaaaaggctccttgtatcattttcattgatgaggtggatgctattggtaccaagcgtttcgacagtgaagtaagtggtgatcgtgaagtacagagaactatgttggagttgcttaatcagttggacggttttagcagtgacgagcgcataaaggtaatagcagctacaaacagagcagatattttggaccctgctttgatgcgttctggacgtttggataggaagattgagtttcctcatccaacggaggaggcacgagctcgtattttgcagattcattcaaggaaaatgaatgtacggggtgatgtcaactttgaggagttggcccgttccacggacgactttaacggagcccaattaaaggctgtatgcattgaggctggaatgttggcacttcgtcgtgatgccactgaagtaactcatgaggatttcaacgagggtatcactcaagtacaagctaaaaagaaagccagtctcaattactacgcataa

SEQ ID NO: 4854 - protein, 411 aa, Physcomitrella patens subsp. patens
MDELAGMSPEDIQRRSRLLENEIRVLKDETHRLSLEHDATKEKIKENQEKIKLNKQLPYLVGNVVEILDVNPEDEAEEDGANVDLDSQRKGKCVVLKTSTRQTIFLPVVGLVDPDSLKPGDLVGVNKDSYLILDTLPSEYDSRVKAMEVDEKPTEVYSDIGGLDKQIQELMEAIVLPMTHKERFESLGVRPPKGVLLYGPPGTGKTLMARACAAQTNATFLKLAGPQLVQMFIGDGAKLVRDAFQLAKEKAPCIIFIDEVDAIGTKRFDSEVSGDREVQRTMLELLNQLDGFSSDERIKVIAATNRADILDPALMRSGRLDRKIEFPHPTEEARARILQIHSRKMNVRGDVNFEELARSTDDFNGAQLKAVCIEAGMLALRRDATEVTHEDFNEGITQVQAKKKASLNYYA

SEQ ID NO: 4855 - DNA, 1251 bp, Physcomitrella patens subsp. patens
  CDS (1)..(1251)
atggcgacggctatggaggtcaccgctgtgacggagaagggtatcgctcccgttgtggcggtcaagtcgtttctgccggagcctgttgtagcggagctcgacgaggaggatttgtatacgaggcagaagctcttgcagcggcagttggagtttgtggatattcaggaggagtatatcaaggacgagcagaagaatttgaagcgggagttacttagggcacaagaagaggtgaagcggatccaatccgtgccgcttgtgattgggcagtttattgagatggtggaccaaaacaatggaattgttgggtcgacgactgggtcgaattattacgtgagaatcctgagtacgatcaatcgggagcttttgaagccatcatcttcagttgcgcttcataggcactccaatgcgctagtcgatgtgctgcctcctgaagccgattctagcatttcgttgttgacacaatcggagaagcctgatgtgtcgtataacgatattggtgggtgtgacattcagaagcaagagattagggaagcagtagagcttccacttactcaccacgagttatataagcagattggtattgacccaccccgaggcgtgttgctgtatgggcctcctggaacgggaaagaccatgcttgccaaggcagtcgctcatcacactaccgccgctttcatccgtgttgttggttctgagtttgtacaaaagtatctcggagagggtccccgtatggtgcgtgatgtgttccgactggcgaaggagaacgccccagccattatctttattgatgaaattgatgcaattgcaacagctcgtttcgacgctcaaactggggcagacagagaggttcagcgtatccttatggaacttctgaatcagatggatggttttgatcaaacagtcaatgttaaagtgatcatggctaccaaccgggcagatactctagaccccgctttgttgcgacctggacgtcttgatcgaaagattgaatttccactgcctgacaggagacaaaagcgtatggtcttccaggtatgtacagcaaagatgaacttaagtgaggaagttgatctagaagattatgtttctaggcctgacaagataagtgctgccgagatttctgccatctgtcaggaggctggtatgcatgcagtcagaaagaatcgttatgtgattttgcccaaggattttgagaagggctacagatccaacgtcaaaaagtcggacacagactttgagttctacagatag

SEQ ID NO: 4856 - protein, 416 aa, Physcomitrella patens subsp. patens
MATAMEVTAVTEKGIAPVVAVKSFLPEPVVAELDEEDLYTRQKLLQRQLEFVDIQEEYIKDEQKNLKRELLRAQEEVKRIQSVPLVIGQFIEMVDQNNGIVGSTTGSNYYVRILSTINRELLKPSSSVALHRHSNALVDVLPPEADSSISLLTQSEKPDVSYNDIGGCDIQKQEIREAVELPLTHHELYKQIGIDPPRGVLLYGPPGTGKTMLAKAVAHHTTAAFIRVVGSEFVQKYLGEGPRMVRDVFRLAKENAPAIIFIDEIDAIATARFDAQTGADREVQRILMELLNQMDGFDQTVNVKVIMATNRADTLDPALLRPGRLDRKIEFPLPDRRQKRMVFQVCTAKMNLSEEVDLEDYVSRPDKISAAEISAICQEAGMHAVRKNRYVILPKDFEKGYRSNVKKSDTDFEFYR

SEQ ID NO: 4857 - DNA, 1233 bp, Physcomitrella patens subsp. patens
  CDS (1)..(1233)
atggggcgggccgaagaggtacctaacaagtcggccaggtcgggagaggggttgcgacattactatctctcgcacatacacgacctgctccttcaattgcgagtgaagacgcacaatctgcaccgacttgaggctcaacgcaacgatctcaattctaaagtgcggatgttgagggaagagctgcaactgttgcaagagcccgggtcgtatgttggagaggttgtcaaggttatgggaaaaaccaaagttctcgtgaaggtgcatccagagggcaagtacgtggtagatcttgacaagagcatcgatatcaataaaattactcctaccactagagtcgctcttcggaatgacagttatgttttacatttaattcttcctagcaaggtggatccgttggtgaatcttatgaaagttgaaaaggttcctgactccacgtacgatatgattggaggccttgatcagcaaattaaggagatcaaagaggtcatagagcttcccatcaaacacccagagcttttcgagagtctgggcattgctcaaccaaagggggttttgttgtacggccctcctggaactggaaagacgcttcttgcccgggctgtagctcatcacacagactgtacgttcatccgagtttcaggatctgagcttgtgcagaagtacattggtgaaggttcacgtatggtacgggagctgtttgtaatggctagggaacatgcaccatcaatcatcttcatggatgaaattgatagtattggatcagctcgtgtggagtctgggaatggcaatggagatagtgaagttcagcggacaatgttggagttgttgaatcagcttgatgggtttgaagcgtcgaacaagattaaggttttgatggcaaccaatcgaattgatatcttggatcaagcccttttgcgtcctggacgaattgaccggaagatcgagttccccaatccaactgaagagtctcgattggacatccttaaaattcattcaaggaagatgaacttaatgcgaggtattgatttgaagaagattgctgaaaagatgggaggcgcatctggagctgagcttaaggcaattactggccctgctgtgtgcacagaagcaggcatgtttgctctacgtgaacggcgtgtacatgtaacacaagaggattttgaaatgtctgtggcgaaggtgatgaagaaggatactgataagaacatgtcccttaagaagctatggaagtga

SEQ ID NO: 4858 - protein, 410 aa, Physcomitrella patens subsp. patens
MGRAEEVPNKSARSGEGLRHYYLSHIHDLLLQLRVKTHNLHRLEAQRNDLNSKVRMLREELQLLQEPGSYVGEVVKVMGKTKVLVKVHPEGKYVVDLDKSIDINKITPTTRVALRNDSYVLHLILPSKVDPLVNLMKVEKVPDSTYDMIGGLDQQIKEIKEVIELPIKHPELFESLGIAQPKGVLLYGPPGTGKTLLARAVAHHTDCTFIRVSGSELVQKYIGEGSRMVRELFVMAREHAPSIIFMDEIDSIGSARVESGNGNGDSEVQRTMLELLNQLDGFEASNKIKVLMATNRIDILDQALLRPGRIDRKIEFPNPTEESRLDILKIHSRKMNLMRGIDLKKIAEKMGGASGAELKAITGPAVCTEAGMFALRERRVHVTQEDFEMSVAKVMKKDTDKNMSLKKLWK

SEQ ID NO: 4859 - DNA, 1269 bp, Physcomitrella patens subsp. patens
  CDS (1)..(1269)
atgaacgaggaggacatcttcggagacgatgcctccgacgagctagcgaggttgacaccggaagatattcagcgaagaggccgattactggagaatgagacccgcatcttgaaggacgagacacagaggttgactctcgagcacgatgctatgaaggaaaaaattaatgagaatcaggagaagatcaaactcaataaacagctgccttacctagttggaaacattgtggagatattggacgtcaatccagaagatgaagctgaagaggatggtgctaatgttgatttggactctcaaaggagaggaaagtgtgtcgtcttgaagacatccacacgtcaaacgatcttcttgcctgtagttggtctagtcgatccagatagtttgaagcccggtgatttggttggagtaaacaaggacagctacctgattctggatacactgccttcggaatatgactcacgtgtaaaagctatggaggtcgacgagaagcctgcagaggtgtattcagatattggtggtctcgataagcagattcaagagttgatggaagccatcgtactacctatgacccacaaagaacggttcgatagcttaggtgtccgaccacccaaaggagtgttattatatggcccaccaggtactggcaagaccctcatggctcgtgcatgcgcagctcaaacaaatgctacttatttaaagcttgctggacctcagctcgtccagatgtttattggagatggtgcaaaacttgtgagggacgcgttccagctagcaaaggaaaaagctccctgtatcatcttcattgatgaagtagatgcaattggtactaagcgttttgacagtgaagtaagtggagatcgtgaagtgcagagaactatgctggagttgcttaatcagctggatggattcagcagtgatgagcgcattaaagttatagcagccacgaatagagcagatattttagatcctgcactgatgcggtcaggacgtatagatagaaaaattgagttccctcatccaaccgaggaggcacgggcacgtatcttgcagattcattcgaggaaaatgaatttaaggcctgatgtcaactttgaggagttggctcgctcaacagatgactttaacggagctcaattgaaggctgtgtgtattgaggccggaatgttggcgcttcgccgtgatgccacggaaataactcacgaagacttcaacgagggtattactcaagtacaagcgaaaaaaaaagccagtcttaactactacgcttaa

SEQ ID NO: 4860 - protein, 422 aa, Physcomitrella patens subsp. patens
MNEEDIFGDDASDELARLTPEDIQRRGRLLENETRILKDETQRLTLEHDAMKEKINENQEKIKLNKQLPYLVGNIVEILDVNPEDEAEEDGANVDLDSQRRGKCVVLKTSTRQTIFLPVVGLVDPDSLKPGDLVGVNKDSYLILDTLPSEYDSRVKAMEVDEKPAEVYSDIGGLDKQIQELMEAIVLPMTHKERFDSLGVRPPKGVLLYGPPGTGKTLMARACAAQTNATYLKLAGPQLVQMFIGDGAKLVRDAFQLAKEKAPCIIFIDEVDAIGTKRFDSEVSGDREVQRTMLELLNQLDGFSSDERIKVIAATNRADILDPALMRSGRIDRKIEFPHPTEEARARILQIHSRKMNLRPDVNFEELARSTDDFNGAQLKAVCIEAGMLALRRDATEITHEDFNEGITQVQAKKKASLNYYA

SEQ ID NO: 4861 - DNA, 1317 bp, Anopheles gambiae str. PEST
  CDS (1)..(1317)
atgggacaaaaccagtcagcgggcagcggcggggacaaggataaggataaggataagaagaaaaagtacgagccaccgatcccgacgcgggttggcaaaaagaagcgcaaggcaaagggacccgatgcggccctcaagctgccccaggtcaccccacacacgcgctgccggctgaagctgctcaagctggagcgcatcaaggactatctgctgatggaggaggagttcatccgcaaccaggaaagactgaagccgcaggaggaaaagatcgaggaagagcgctccaaggtggacgacctgcgggggtcgcccatgtcggtcggcacgctggaggagatcatcgacgataaccacgcaatcgtgtcgacgtcggtgggcagcgagcactacgtcagcatcctgtcgttcgtcgacaaggaccagctggaaccgggctgctcggtgctgctgaaccacaaggtgcacgcggtggtcggagtgctgggcgacgacaccgacccgatggtgacggtgatgaagctggagaaagcaccgcaggaaacgtacgccgacatcggcgggctggacacgcagatccaggagatcaaggaatcggtcgagctgcccctcacgcaccccgagtactacgaggagatgggcatcaaaccgccgaagggtgtgatcctgtacggaccgccgggcacgggcaaaacgctgctcgcgaaggcggtggcaaaccagacgtccgccaccttcctgcgagtcgttgggtcggagctgattcagaagtatctcggcgacggtcccaagctggtgcgcgagctgttccgtgtggccgaggagcacgccccgtcgatcgtgttcatcgacgaaatcgatgccgtcggaacgaagcggtacgattccaactcgggcggtgagcgcgaaattcagcgcaccatgctggagttgctcaaccagctggacgggtttgactcgcgcggcgatgtgaaagtaatcatggccacgaatcgtattgaaacgctcgacccggcactgatccgtccggggcgtattgatcgaaagattgagttcccgctgccggacgagaagaccaagcgacgtatcttcaacatccacactgcccgtatgacgctggcggaggacgtgaatctgtcggagttgatcatggcgaaggacgatctgtcgggcgcggacatcaaggccatctgcacggaggcgggcttgatggcgctgcgggagcgccgaatgaaggtgaccaacgaggactttaagaagtctaaggagagtgtgctctaccggaaaaaggagggaacgcccgagggtttgtacatgtaa

SEQ ID NO: 4862 - protein, 438 aa, Anopheles gambiae str. PEST
MGQNQSAGSGGDKDKDKDKKKKYEPPIPTRVGKKKRKAKGPDAALKLPQVTPHTRCRLKLLKLERIKDYLLMEEEFIRNQERLKPQEEKIEEERSKVDDLRGSPMSVGTLEEIIDDNHAIVSTSVGSEHYVSILSFVDKDQLEPGCSVLLNHKVHAVVGVLGDDTDPMVTVMKLEKAPQETYADIGGLDTQIQEIKESVELPLTHPEYYEEMGIKPPKGVILYGPPGTGKTLLAKAVANQTSATFLRVVGSELIQKYLGDGPKLVRELFRVAEEHAPSIVFIDEIDAVGTKRYDSNSGGEREIQRTMLELLNQLDGFDSRGDVKVIMATNRIETLDPALIRPGRIDRKIEFPLPDEKTKRRIFNIHTARMTLAEDVNLSELIMAKDDLSGADIKAICTEAGLMALRERRMKVTNEDFKKSKESVLYRKKEGTPEGLYM

SEQ ID NO: 4863 - DNA, 1380 bp, Magnaporthe grisea 70-15
  CDS (1)..(1380)
atgggtcaaaaccagtccggcatgggcggtggccaagatggcaaagacgacaaggacaagaagaaggataagcccaagtacgaaccccctccacgaccgacgacccgagtcggccgcaagaagagaagaggaggcggcaccagcgccgctgccaagctccccgccatttacccaacgagtcgatgcaagttgagattgctacgaatgcagcgcacacacgatcacttgttgttagaagaggagtttgtcgaaaaccaagaacgcctacgccgggtcaaggccgccaaggacagcaatgctcctgcatctgaccttgacgctggtgatcgcatggccgacgagcgtggccgtgtcgacgacatgcggggcagcccaatgggagttggtaccctcgaggagatgatcgacgacgaccatgccatcgtttcaagcactacgggcccagagtactatgtcagcatcatgagctttgtcgacaaggaccttctggagcccggcgccagcgtactcttgcaccacaagagcgtcagcattgttggtgtcttgaccgatgatgctgaccccttggtcagtgtgatgaagttggacaaggcgcctaccgagtcttatgccgacattggtggtttggagcaacagatccaggaagtccgggagtcagtcgagctgcctctgctacatccggagctctacgaggagatgggtatcaagccacccaagggtgtcattctttacggagctcctggtacaggcaaaacacttttggcaaaggcggtggcgaaccagacttcagctacgttcttgcgcattgttggtagtgagctgatccagaaatatcttggtgatggacctcgattggtgcggcaattgttccaggttgctgctgaaaacgccccctccattgtgttcatcgacgaaattgatgctattggcaccaagagatacgactcgacatctggaggcgagcgtgaggtccaacgtactatgttggagctgctcaaccagcttgatggtttcgacgaccgtggtgacgtaaaggtcatcatggccaccaacaagattgagacgctcgatccggccttgatcaggcccggtcgtatcgacagaaagatcttgttcgagaatcctgaccagaacaccaagcgcaagatcttcacccttcacacctccaagatgtcgctgaacgaggatgtcgatcttgaggagttcattgcgcagaaggatgacctgtctggtgccgacatcaaggccatttgctctgaggctggtttgatggcgctgcgggagaggagaatgcgcgtccagatggccgacttccgcgccgccagggagagggttctgcgcaccaagcaagagggtgagcccgagggactttacctgtaa

SEQ ID NO: 4864 - protein, 459 aa, Magnaporthe grisea 70-15
MGQNQSGMGGGQDGKDDKDKKKDKPKYEPPPRPTTRVGRKKRRGGGTSAAAKLPAIYPTSRCKLRLLRMQRTHDHLLLEEEFVENQERLRRVKAAKDSNAPASDLDAGDRMADERGRVDDMRGSPMGVGTLEEMIDDDHAIVSSTTGPEYYVSIMSFVDKDLLEPGASVLLHHKSVSIVGVLTDDADPLVSVMKLDKAPTESYADIGGLEQQIQEVRESVELPLLHPELYEEMGIKPPKGVILYGAPGTGKTLLAKAVANQTSATFLRIVGSELIQKYLGDGPRLVRQLFQVAAENAPSIVFIDEIDAIGTKRYDSTSGGEREVQRTMLELLNQLDGFDDRGDVKVIMATNKIETLDPALIRPGRIDRKILFENPDQNTKRKIFTLHTSKMSLNEDVDLEEFIAQKDDLSGADIKAICSEAGLMALRERRMRVQMADFRAARERVLRTKQEGEPEGLYL

SEQ ID NO: 4865 - DNA, 1266 bp, Magnaporthe grisea 70-15
  CDS (1)..(1266)
atgggcgacgttctcgtggaaaactcttccaactacactcccccacacaaaaaagcggccccgtccacgattcctagtatcgagaactttgaagggttgccgactgaaggcggcgatgattacgctactctgaagaagctccagaggcagcttgaatacatccagcttcaggaggaatacatcaaggatgagcagaggagtttaaagcgagagcttgtgcgtgcgcaagaggagatcaagaggattcagagcgttccactggtcatcggccagtttatggaggcgattgatcaaaacaccggcattgtgcagtcaagcacaggctccaactatgtcgtccggattctctccaccctcgaccgtgagctgctcaagccatcgtcatcagtagcactccaccgccactcgaatgccctcgtcgacatcttgcctccagaggccgactcttcgattgccatgcttggcgccgacgaaaagcccgatgtgacgtatgccgacgtgggaggcctcgacatgcagaagcaggagattcgcgaggctgtcgagctccccctcacacactttgatctgtacaagcagatcggtatcgacccgccgcgcggtgtgctgctgtacggaccccccggtaccggaaagacgatgctggtcaaggcggttgccaatagcaccacggccaacttcatccgcgtcgtcggttctgagtttgtccaaaagtacttgggagagggtccccgcatggttcgtgacgttttccgtatggctcgtgaaaacgcccccgccattatcttcatcgacgaaatcgacgccatcgcaaccaagcgtttcgacgcccaaacaggtgccgatcgtgaggttcagcgtattctgctcgagcttctgaaccagatggacggtttcgaccagactgccaacgtcaaggtcattatggcaaccaacagggccgacactctcgatcctgcccttctccgtcccggtcgattggaccgtaagattgagttcccctctctccgcgaccgccgtgagagacgtctcatcttcggcactatcgccagcaagatgagcctcgcgcccgaggttgaccttgacagtctcattgttcgcaacgacccgctgtccggtgccgtcatcgccgccatcatgcaagaagctggtctgcgcgccgtgcggaagaaccgctacaacatcattcagagtgatcttgaggatgcctattccagccaggtcaagggtaccagtgaggacaacaagtttgatttctacaaataa

SEQ ID NO: 4866 - protein, 421 aa, Magnaporthe grisea 70-15
MGDVLVENSSNYTPPHKKAAPSTIPSIENFEGLPTEGGDDYATLKKLQRQLEYIQLQEEYIKDEQRSLKRELVRAQEEIKRIQSVPLVIGQFMEAIDQNTGIVQSSTGSNYVVRILSTLDRELLKPSSSVALHRHSNALVDILPPEADSSIAMLGADEKPDVTYADVGGLDMQKQEIREAVELPLTHFDLYKQIGIDPPRGVLLYGPPGTGKTMLVKAVANSTTANFIRVVGSEFVQKYLGEGPRMVRDVFRMARENAPAIIFIDEIDAIATKRFDAQTGADREVQRILLELLNQMDGFDQTANVKVIMATNRADTLDPALLRPGRLDRKIEFPSLRDRRERRLIFGTIASKMSLAPEVDLDSLIVRNDPLSGAVIAAIMQEAGLRAVRKNRYNIIQSDLEDAYSSQVKGTSEDNKFDFYK

SEQ ID NO: 4867 - DNA, 1176 bp, Magnaporthe grisea 70-15
  CDS (1)..(1176)
atgtcaaccgaccaagagcgccaacatgcgcttgactcctacaagcagaagctgatcgagtcgcgagagtgggagtccaaactgaaaaacctgcggatagagatcaagggcttgcagaaggactttgaccagactgaggagaacatcaaggcgttgcagagcgtggggcagattatcggcgaagtcctgaagcaacttgatgatgaaagatttattgtcaaagcatcctctggtcccagatatgttgtcggttgcaggtcaaaggtcgacaaggacaagctcaagcaagggacgcgagttgcgcttgacatgacgacgctcaccataatgcgaatgctcccgcgcgaggtcgacccactcgtctacaatatgtcactcgaggatccaggccaagtcagctttgcgggtattggtggtctcaacgatcagatcagggagttgagagaggttattgagcttccattgaagaacccagagctattcttgagggtcggcatcaagccgccaaagggtgtgcttctctacggacccccgggaacgggcaagacgctactggcgagggctgtcgcgtcaagccttgagacgaatttcttgaaggttgtctcgtctgccatcgtcgacaaatacatcggagagtcagcgcgtcttattcgcgagatgttcgggtacgccaaggagcacgagccctgcattatcttcatggatgagattgatgccattggaggcaggcgtttctccgagggcaccagtgccgaccgagagattcaaagaacgctaatggaactgttgaaccaactggatggtttcgactacctcggcaagaccaagattattatggcaaccaaccgtcccgacacactggatccggctctgctccgtgcaggccgtctggaccgcaagatcgagattgcgttgcccaatgagattggccgattggagattcttaagattcatgcatcaagcgtggtaatggagggagatattgactttgagagcgtggtaaagatgagcgacgggctaaacggtgccgatttgaggaacgtggtgactgaagctggcctctttgctatcaaggactaccgtgatgctgtgaaccaggacgacttcaacaaggcggtgcgaaaggtggccgagtcgaagaaactggagggtaaactggagtaccaaaagctctaa

SEQ ID NO: 4868 - protein, 391 aa, Magnaporthe grisea 70-15
MSTDQERQHALDSYKQKLIESREWESKLKNLRIEIKGLQKDFDQTEENIKALQSVGQIIGEVLKQLDDERFIVKASSGPRYVVGCRSKVDKDKLKQGTRVALDMTTLTIMRMLPREVDPLVYNMSLEDPGQVSFAGIGGLNDQIRELREVIELPLKNPELFLRVGIKPPKGVLLYGPPGTGKTLLARAVASSLETNFLKVVSSAIVDKYIGESARLIREMFGYAKEHEPCIIFMDEIDAIGGRRFSEGTSADREIQRTLMELLNQLDGFDYLGKTKIIMATNRPDTLDPALLRAGRLDRKIEIALPNEIGRLEILKIHASSVVMEGDIDFESVVKMSDGLNGADLRNVVTEAGLFAIKDYRDAVNQDDFNKAVRKVAESKKLEGKLEYQKL

SEQ ID NO: 4869 - DNA, 1203 bp, Gibberella zeae PH-1
  CDS (1)..(1203)
atgtcagccgaagaagagcgccaggccgcccttaactcgtaccgtgccaagctcatcgagtcgcgagaatgggaggcaaagctaaagaatttgcgtcttgaaatcaaggacatgcaaaaggagttcgacaagacagaggacaacatcaaggcgctacaaagtgtgggacaaattatcggcgaggtgctgaaacagctcgatgatgaacgatttattgtcaaggcctcctccggacctcgatacgtcgtcggatgcagatcaaaggtggacaaggtcaagctgaagcaaggcacccgtgtggcactcgatatgacaacacttaccattatgcgaatgctgcctcgcgaagttgatcctttggtgtacaacatgtccctggaagacccgggccaagtgagctttgctggcattggtggattgaacgatcaaattcgagagttgcgggaggtcatcgagcttccccttaagaaccccgagctcttcctacgagttggaatcaagccaccaaagggtgttttgttgtatggtcctcccggaaccggcaaaaccctgctggcacgagctgtcgccagtagtctggagaccaactttttgaaggtggtatcgtccgctattgtcgacaagtacatcggtgaatcggcgcgactcattcgcgaaatgtttggatatgccaaggagcacgagccctgcatcatcttcatggatgaaatcgatgccatcggtggacgacgtttctcagagggtaccagtgcggatcgagaaattcagagaacacttatggaattgctaaaccagctggacggtttcgactacttgggcaagaccaagatcatcatggccaccaaccgacctgatacgttggaccctgcgctgcttcgagccggccgactcgaccgaaagattgagatcccccttcccaatgaggttggacgtcttgagattctgaagattcactcacaaagcgttgtgatcgatggtgatctggactttgagagcgtggtgaagatgagcgatggactcaacggtgctgatttgcgaaatgttgttactgaagccggtctatttgccattaaggactacagagagtcaatcaaccaggatgatttcaacaaggctgttcgcaaggtagccgaatccaagaagctggaaggcaagcttgagtaccagaagctaatcgacgagcgggccacgattggacaataa

SEQ ID NO: 4870 - protein, 400 aa, Gibberella zeae PH-1
MSAEEERQAALNSYRAKLIESREWEAKLKNLRLEIKDMQKEFDKTEDNIKALQSVGQIIGEVLKQLDDERFIVKASSGPRYVVGCRSKVDKVKLKQGTRVALDMTTLTIMRMLPREVDPLVYNMSLEDPGQVSFAGIGGLNDQIRELREVIELPLKNPELFLRVGIKPPKGVLLYGPPGTGKTLLARAVASSLETNFLKVVSSAIVDKYIGESARLIREMFGYAKEHEPCIIFMDEIDAIGGRRFSEGTSADREIQRTLMELLNQLDGFDYLGKTKIIMATNRPDTLDPALLRAGRLDRKIEIPLPNEVGRLEILKIHSQSVVIDGDLDFESVVKMSDGLNGADLRNVVTEAGLFAIKDYRESINQDDFNKAVRKVAESKKLEGKLEYQKLIDERATIGQ

SEQ ID NO: 4871 - DNA, 1266 bp, Gibberella zeae PH-1
  CDS (1)..(1266)
atgggtgacgtcgctgtcgaaaacccagcaaaccaagtggcgcctcacaagagggccgcgcactcagccattcccaccattgacaacttcgagggtgtgtctaccgatgggggagacgattacgcgaacctgaagaagcttcagaggcaactcgagtacattcagttgcaagaagagtacatcaaagatgagcaaaggagtctcaagcgtgagctggtgcgagctcaagaagagatcaagcgaatccaaagtgtcccactagtgatcgggcagtttatggaggccattgatcaaaataccggtatagttcagtccagcactggcagtaactatgtagtccgaatcctttccaccctagaccgtgagaagctcaaggcttcatcctcggtcgccctccaccgacattccaacgccctcgtcgacatcctccctcccgaggccgattcctccattgccatgcttggcacagacgagaagcccgatgtgacatacgccgatgtcggtggtctggacatgcagaaacaggagatccgtgaagctgttgaattgcccttgacacacttcgacctttacaagcagatcggtatcgaccctcctcgtggtgttcttctgtacggtcctcccggtaccggcaagactatgctagtcaaggctgtcgccaactcgaccactgccaacttcatccgagttgttggttctgagttcgtccagaaatacctgggtgagggcccccgaatggtccgagatgttttccgtatggctcgcgaaaactcccccgccatcatcttcatcgacgagatcgacgccatcgccaccaaacgattcgatgctcaaactggtgccgacagagaagtccagcgtattctgcttgagctactcaaccagatggatggtttcgaccagactgctaacgtcaaggtcatcatggccaccaaccgagctgatactctggaccctgccctcctccgacccggacgtctcgatcgaaagatcgaattcccttcgctacgagaccgacgtgagcgccgtctcatcttctccaccattgccagcaagatgagtctggctcccgaggttgacctcgactctttgatcgtccgaaacgatcctctgtccggtgcggttatcgctgctattatgcaggaggcaggtctacgtgccgtccgtaaaaaccgatacaacatcattcagaccgatctcgaggacgcctactcaagccaggtcaagggaacgggcgaagagaacaagttcgacttctacaaataa

SEQ ID NO: 4872 - protein, 421 aa, Gibberella zeae PH-1
MGDVAVENPANQVAPHKRAAHSAIPTIDNFEGVSTDGGDDYANLKKLQRQLEYIQLQEEYIKDEQRSLKRELVRAQEEIKRIQSVPLVIGQFMEAIDQNTGIVQSSTGSNYVVRILSTLDREKLKASSSVALHRHSNALVDILPPEADSSIAMLGTDEKPDVTYADVGGLDMQKQEIREAVELPLTHFDLYKQIGIDPPRGVLLYGPPGTGKTMLVKAVANSTTANFIRVVGSEFVQKYLGEGPRMVRDVFRMARENSPAIIFIDEIDAIATKRFDAQTGADREVQRILLELLNQMDGFDQTANVKVIMATNRADTLDPALLRPGRLDRKIEFPSLRDRRERRLIFSTIASKMSLAPEVDLDSLIVRNDPLSGAVIAAIMQEAGLRAVRKNRYNIIQTDLEDAYSSQVKGTGEENKFDFYK

SEQ ID NO: 4873 - DNA, 1248 bp, Apis mellifera
  CDS (1)..(1248)
atggatgatatgggtattattctacccgataaggatgttggagaaatggaatgcaaacctgtaattggacactatacaggtgctggtgatgaattggatgttgaagatctttataccaagtataaaaaattacaaagaatgttagaatttcttgaagttcaagaagaatatatcaaagatgaacaacgtaatctgaaaaaagaatatttacatgctcaagaagaagtaaaacgcatacaaagtgtacctttagttattggacaattcttagaagctgtagaccaaaatactggtattgtaggttctactacaggttcaaattattatgtacggattttatctacaattgacagagaattattaaaaccatctgctagtgtagctctacataaacatagtaatgctttagtagatgttttaccaccagaagctgattcaagtatttcaatgttacaagcagatgaaaaaccagatattcaatatagcgatattggtggtatggatatgcaaaaacaagagattagagaagcagtagaactacctttaactcattttgagttgtataagcaaattggaattgatccaccaaggggtgtgttaatgtatggtccccctggatgtggtaaaaccatgcttgcaaaagctgtagctagacatactactgctgcatttattcgtgtagtaggatcagaatttgtacagaaatatttaggtgaagggccaagaatggtgagagatgtcttccgtttagctaaagaaaattcaccagctataatttttgttgatgaaatcgatgctatagctacaaaaagatttgacgctcagactggtgctgatcgtgaagtgcaacgtattcttttggaattgcttaatcaaatggatggttttgatcaaactactaatgttaaagttataatggcaacgaatagagctgatacattagatcctgcattattacgtcctggcagattagatagaaaaattgaatttcctttgcctgatcgccgtcaaaaacgtctaattttttcaacaattactgcaaaaatgaatttaagtgaagaggtagatcttgaagattatgttgcgcgaccagatagaatttctggcgctgatattaatgcaatttgccaagaagcaggaatgcatgcggttcgtgagaatcgatacatagtcttagcaaaagattttgaaaagggttataagaataatattaaaaaggatgaatctgaacatgaattctacaagtaa

SEQ ID NO: 4874 - protein, 415 aa, Apis mellifera
MDDMGIILPDKDVGEMECKPVIGHYTGAGDELDVEDLYTKYKKLQRMLEFLEVQEEYIKDEQRNLKKEYLHAQEEVKRIQSVPLVIGQFLEAVDQNTGIVGSTTGSNYYVRILSTIDRELLKPSASVALHKHSNALVDVLPPEADSSISMLQADEKPDIQYSDIGGMDMQKQEIREAVELPLTHFELYKQIGIDPPRGVLMYGPPGCGKTMLAKAVARHTTAAFIRVVGSEFVQKYLGEGPRMVRDVFRLAKENSPAIIFVDEIDAIATKRFDAQTGADREVQRILLELLNQMDGFDQTTNVKVIMATNRADTLDPALLRPGRLDRKIEFPLPDRRQKRLIFSTITAKMNLSEEVDLEDYVARPDRISGADINAICQEAGMHAVRENRYIVLAKDFEKGYKNNIKKDESEHEFYK

SEQ ID NO: 4875 - DNA, 1203 bp, Candida glabrata CBS 138
  CDS (1)..(1203)
atgattagcaagggtatggttcatgagagcggtatcaagccgtactttgagcataagatacaggagacggagctgaagatccgggggaagacagaaaacctgcggagactggaagcccagaggaatgcgcttaacgacgaggtgcgtttcatcaaggatgaattgcgtctgctgcaggagccgggctcgtacgttggtgaggtcataaaagttgtctctgacaagaaggtgctggtgaaggtgcagcctgagggtaaatatatagtcgatgtggcgaaggatattaatgtcaaggacctgaaggcctctcagcgtgtgtgtttgcgtagtgattcctatatgctgcacaaggtgctggtcaacaaggcggacccactagtctcgctgatgatggtagagaaagtgccagactcaacatatgatatggtcggtggtcttacgaagcaaatcaaggagatcaaggaagtcattgagcttccagttaagcatcctgagctgtttgagagtttgggtattgcacagcctaagggtgtcatcctatatggtccgccaggtactggtaagactttgttggcaagagcagtcgcccaccacacagactgtaagtttatcagagtaagtggtgcagaattagtgcagaagtatatcggtgagggttcccgtatggtccgtgaactgtttgtgatggccagagaacatgcaccatccatcatcttcatggatgaaatcgactccataggttccagtcgtgttgaaggtggtggttccggtggtggtgactcagaagtgcaaagaacgatgttagagctactgaatcaactagatggttttgagacttccaagaatattaaaatcatcatggctacaaacagactggatatccttgatccagctttgctgagacccggtagaatagatagaaaaattgagtttccaccaccaaccgtagccgcaagagcagagattctacgtattcactccagaaaaatgaatctgacccgtggtattaacctcaggaagattgcagaaaagatgaatggctgctctggtgcagatgtgaaaggtgtatgtacagaagcaggtatgtatgctttgagagagagaaggatccatgttactcaggaagattttgagcttgccgtcggtaaagtcatgaacaagaaccaagagactgccatttctgaggccaagctgttcaagtga

SEQ ID NO: 4876 - protein, 400 aa, Candida glabrata CBS 138
MISKGMVHESGIKPYFEHKIQETELKIRGKTENLRRLEAQRNALNDEVRFIKDELRLLQEPGSYVGEVIKVVSDKKVLVKVQPEGKYIVDVAKDINVKDLKASQRVCLRSDSYMLHKVLVNKADPLVSLMMVEKVPDSTYDMVGGLTKQIKEIKEVIELPVKHPELFESLGIAQPKGVILYGPPGTGKTLLARAVAHHTDCKFIRVSGAELVQKYIGEGSRMVRELFVMAREHAPSIIFMDEIDSIGSSRVEGGGSGGGDSEVQRTMLELLNQLDGFETSKNIKIIMATNRLDILDPALLRPGRIDRKIEFPPPTVAARAEILRIHSRKMNLTRGINLRKIAEKMNGCSGADVKGVCTEAGMYALRERRIHVTQEDFELAVGKVMNKNQETAISEAKLFK

SEQ ID NO: 4877 - DNA, 1311 bp, Candida glabrata CBS 138
  CDS (1)..(1311)
atgagtgaagagcaagatccgctgttggcggctttgaacgagagcaataacaatgggggtagtggagacaacgccgctgtatctggggaggcttctgccgagccattggaggcggcacctgagccagagcccgtggatcccgagaaagaagcgtatgagaaggcattgaggcatttcaagaagaagttgatggaacacaggaggtatgatgaccagttgaagcagcgtcgccagactatacgggatttggagaagatatacgataagactgagaacgatatcaaagcgttgcagagtatcggtcaattgattggtgaagtgatgaaggagttgtcggaagagaaatatattgtgaaagcgtcatcaggtcctcgttatatcgtaggtgtcagaaactcggttgatagatcgaaactgaaaaaaggtgtaagagtgacattagatattaccactttaaccattatgcgaatcttaccccgtgaaactgacccattggtttacaacatgaccagtttcgagcagggtgagatatctttcgagggtatcggtggtttgaccgatcaaattagagaactaagagaagtcattgagctgccattgaagaacccggaaatttttcaaagagttggtataaaacctccaaagggtgtcttgttatatggaccacctggtacgggtaagaccttgctcgccaaagctgtcgccgctacaattggtgcaaatttcattttttcaccagcttctggtattgtggataagtatattggtgaatctgcccgtattattagagaaatgtttgcatatgccaaagagcacgagccttgtatcatatttatggatgaagttgatgctatcggtggtcgtagattcagtgaaggtacttcggcagacagagaaattcaaagaacattgatggaattgctgacacagatggatggtttcgataatttgggacagacaaagattattatggccacaaacagacccgatacgttagatccagccttgttaagaccaggtagactcgatagaaaaattgaaatccccttgccaaatgaggccggaagactggaaatattcaagattcatacgtcaaaggtgaagaagagtggtgaattcgatttcgatgcagccgttaaaatgagtgatggtttcaatggtgctgatattcgtaactgtgccacagaagctggtttctttgccatcagagatgaccgtgatcatattattccagaagatttaatgaaggcggtgagaaaggtcgcagaagtcaagaaactggaaggtactctcgagtatcaaaaattatga

SEQ ID NO: 4878 - protein, 436 aa, Candida glabrata CBS 138
MSEEQDPLLAALNESNNNGGSGDNAAVSGEASAEPLEAAPEPEPVDPEKEAYEKALRHFKKKLMEHRRYDDQLKQRRQTIRDLEKIYDKTENDIKALQSIGQLIGEVMKELSEEKYIVKASSGPRYIVGVRNSVDRSKLKKGVRVTLDITTLTIMRILPRETDPLVYNMTSFEQGEISFEGIGGLTDQIRELREVIELPLKNPEIFQRVGIKPPKGVLLYGPPGTGKTLLAKAVAATIGANFIFSPASGIVDKYIGESARIIREMFAYAKEHEPCIIFMDEVDAIGGRRFSEGTSADREIQRTLMELLTQMDGFDNLGQTKIIMATNRPDTLDPALLRPGRLDRKIEIPLPNEAGRLEIFKIHTSKVKKSGEFDFDAAVKMSDGFNGADIRNCATEAGFFAIRDDRDHIIPEDLMKAVRKVAEVKKLEGTLEYQKL

SEQ ID NO: 4879 - DNA, 1215 bp, Kluyveromyces lactis NRRL Y-1140
  CDS (1)..(1215)
atgagtgctgtacaaatttcgagtattcctttgacgagccatgactctggtatcaagcctttctttgaccaaaaaatccaggaaagtgagcttaggatcagagaaaagacatcgaatttgcgtagactagaggctcaaagaaatgcgttgaatgataaggtcagatttataaaggatgaattgaggctcttgcaggaatctggatcatacgtgggagaagtgttgaaagttatcagtgagaaaaaagttttggtgaaagttcagcctgaaggaaaatatattgttgatgttgctaaggatatcaacgtcaaggacttgaaagtatcacagcgtgtatgcttgaagagtgactcgtaccaattacataaggtgttggagaacaaggtagatccgttagtgtctctaatgatggtcgaaaaagtacctgattctacatacgatatggtgggtgggttaacgaagcagattaaagaaatcaaggaagtcattgaattaccagtgaaacacccagaactattcgaaagtcttggtatcgctcaacctaaaggtgttattctatacggtccgccaggtactggtaagactttactagcgagagccgtagcacatcacacagactgtaaatttatcagagtaagtggtgccgaattggtgcaaaaatatatcggtgaaggttcccgtatggtccgtgagttattcgtgatggctagagaacatgcgccttctatcattttcatggacgaaatcgattctatcggttccagtcgtgttgaaggatctggcggtggtgattccgaagtgcaaagaaccatgttggaattgttgaatcaattggacgggtttgaaacttcgaaaaacattaaaatcatcatggctacaaacagattggatatattggaccctgcattgctaagaccaggtagaattgatagaaaaatcgaattcccaccaccaaccgtagcggctagaacagagattctaagaatccactcaagaaagatgaacttgacccgtggtattaacctaaggaaagtcgccgaaaagatgaacggatgctctggagctgacgttaaaggtgtttgtaccgaggctggtatgtacgcactaagggaacgtagaattcacgtaacccaagaagattttgaactagccgtggccaaggtcatgaacaagaacgacgaaactgctatctctgtagcaaaattgttcaagtaa

SEQ ID NO: 4880 - protein, 404 aa, Kluyveromyces lactis NRRL Y-1140
MSAVQISSIPLTSHDSGIKPFFDQKIQESELRIREKTSNLRRLEAQRNALNDKVRFIKDELRLLQESGSYVGEVLKVISEKKVLVKVQPEGKYIVDVAKDINVKDLKVSQRVCLKSDSYQLHKVLENKVDPLVSLMMVEKVPDSTYDMVGGLTKQIKEIKEVIELPVKHPELFESLGIAQPKGVILYGPPGTGKTLLARAVAHHTDCKFIRVSGAELVQKYIGEGSRMVRELFVMAREHAPSIIFMDEIDSIGSSRVEGSGGGDSEVQRTMLELLNQLDGFETSKNIKIIMATNRLDILDPALLRPGRIDRKIEFPPPTVAARTEILRIHSRKMNLTRGINLRKVAEKMNGCSGADVKGVCTEAGMYALRERRIHVTQEDFELAVAKVMNKNDETAISVAKLFK

SEQ ID NO: 4881 - DNA, 1305 bp, Kluyveromyces lactis NRRL Y-1140
  CDS (1)..(1305)
atgtctcaagaacaggatcctttactagcagcaatggaagaaaacgatggtgatgacactaacggagctggtaccaactctaattcgggagaaaataacgctgccgcacctgaaacggtggagcctgtggatccagaacaggctgcaaaggaaaaagcgatgttacattttaagaaaagacttatggaacacagacgatacgacgatatgttgaagcaacgcagagaaaccatacgggtactagaagcagaatatgagagaacagaacaggatatcaaggcgttacagtcgattggccaactcattggggaagttatgaaggaactttccgaggaaaaatacattgtaaaagcgtcatcaggtcctcgttatattgtgggtgtgaggaactccgttgatcgttccaagctaaagaagggtgtcagagtcacacttgatattactacattaactattatgagaattttacctagagaaactgacccattagtttataatatgaccacttttgaacaaggtgaaatctcttttgatggtatcggtggtcttacggaacagatcagagaattgagagaagtcattgagcttccactaaagaacccagaaattttcgagagagtgggaatcaaaccacctaagggtgtgttactatatggtcctcctggtactggtaagactttattggctaaggcagttgctgcaactatcggtgccaactttatcttctccccagcatccggtattgtagataaatacatcggtgaatcagcacgtatcattagagaaatgtttgcatacgccaaagaacatgaaccttgtatcatctttatggacgaaatagatgctatcggtggacgtagatttagcgaaggtacctcagcagatcgtgaaattcaacgtacattgatggaactattaactcagatggatggtttcgacaacttaggacaaacgaaagttattatggctacgaatagacctgacactttagatcctgctttactaagacctggtagattggacagaaaaatcgaaatcagtttaccaaatgaggcaggaagattagaaatcttcaagattcatacatccaatgtaaaaaaagctggagaatttgactttgaagctgcagtcaagatgagtgatggatttaacggtgcggatatccgtaactgtataactgaagcagggttcttcgctatcagggacgaccgcgattatataaaccaggaagatctaatgaaagccgtgagaaaggttgccgaagtcaagaagctcgaaggcaagcttgaatatcaaaagttgtaa

SEQ ID NO: 4882 - protein, 434 aa, Kluyveromyces lactis NRRL Y-1140
MSQEQDPLLAAMEENDGDDTNGAGTNSNSGENNAAAPETVEPVDPEQAAKEKAMLHFKKRLMEHRRYDDMLKQRRETIRVLEAEYERTEQDIKALQSIGQLIGEVMKELSEEKYIVKASSGPRYIVGVRNSVDRSKLKKGVRVTLDITTLTIMRILPRETDPLVYNMTTFEQGEISFDGIGGLTEQIRELREVIELPLKNPEIFERVGIKPPKGVLLYGPPGTGKTLLAKAVAATIGANFIFSPASGIVDKYIGESARIIREMFAYAKEHEPCIIFMDEIDAIGGRRFSEGTSADREIQRTLMELLTQMDGFDNLGQTKVIMATNRPDTLDPALLRPGRLDRKIEISLPNEAGRLEIFKIHTSNVKKAGEFDFEAAVKMSDGFNGADIRNCITEAGFFAIRDDRDYINQEDLMKAVRKVAEVKKLEGKLEYQKL

SEQ ID NO: 4883 - DNA, 1299 bp, Kluyveromyces lactis NRRL Y-1140
  CDS (1)..(1299)
atgtctacgttagaagaattgaataaccaaagtcagccagatgatgatgatatcgatcaagaatttttcaatctatcagcttccgaactaactactcgtgcgaagttgctagataacgaaattaggatattcagatccgaactacaacgtttgtctcatgaaaacagtcagatgctagagaagattaaggataatcaagaaaagatcaagaataacaaacaattaccgtatttagtggcgaatgttgttgaaattatggatatggatgaattacaggattccaacgagattgacactcaaggcggtaatgtcaatttagataatgccgctaagggtaaagctgctgtaatcaagacttcttccagacaaacggtgttcctacctatggtaggattagtggatccagtaaagcttaaaccaaatgatttagttggtgtaaataaagattcatatttgattttggatacattaccatcggagtttgattctcgtgtcaaagctatggaagttgatgaaaaaccaacagaaacatattcggatgtgggtggattagataaacaaatagaggaattagtggaggctattgttctaccaatgaagcaaggtgaaaaattcaaagatatgggtattaaggctccaaagggtgctttgatgtacggccctccaggtacaggtaagacccttcttgctagggcctgtgccgctcaaacaaatgccactttcttaaagctagctgcacctcagcttgttcaaatgtacattggtgaaggtgcaaagttggtacgtgacgcatttgcattagctaaggaaaaggcacctactatcattttcatcgatgaattagatgccattggtacaaaacgtttcgattccgaaaaatctggtgatagagaagtacaaagaacaatgttagagttgctaaatcaattggatggatttggctctgatgatcgggttaaggtgttggctgctaccaatcgtgttgatgttctagatccggccttattaagatctggtagacttgatagaaaaatagaattcccactccctacagaagatgcaagagctcaaattctacagattcattccagaaaaatgacaactgatgattctatcaattggcaagaactcgctagatctacagatgaattcaatggtgctcaattgaaagccgttagtgtcgaagctggtatgatcgcattaagaaacgctcaatcaacaatcaagcacgaagatttcgttgaggctatcggtgaagtacaggcaagaaagtctaaatccgtttccttttatgcatga

SEQ ID NO: 4884 - protein, 432 aa, Kluyveromyces lactis NRRL Y-1140
MSTLEELNNQSQPDDDDIDQEFFNLSASELTTRAKLLDNEIRIFRSELQRLSHENSQMLEKIKDNQEKIKNNKQLPYLVANVVEIMDMDELQDSNEIDTQGGNVNLDNAAKGKAAVIKTSSRQTVFLPMVGLVDPVKLKPNDLVGVNKDSYLILDTLPSEFDSRVKAMEVDEKPTETYSDVGGLDKQIEELVEAIVLPMKQGEKFKDMGIKAPKGALMYGPPGTGKTLLARACAAQTNATFLKLAAPQLVQMYIGEGAKLVRDAFALAKEKAPTIIFIDELDAIGTKRFDSEKSGDREVQRTMLELLNQLDGFGSDDRVKVLAATNRVDVLDPALLRSGRLDRKIEFPLPTEDARAQILQIHSRKMTTDDSINWQELARSTDEFNGAQLKAVSVEAGMIALRNAQSTIKHEDFVEAIGEVQARKSKSVSFYA

SEQ ID NO: 4885 - DNA, 1206 bp, Debaryomyces hansenii CBS767
  CDS (1)..(1206)
atgacagtagcaatgggtaagacatacgttcacgaaggaggtataaagccatacttcgaacagcagatccaagatgccgaaattaaaatccaaaccaccactcagaacttgagacggttggaagcacaacgtaacaagttgaataataaagttagacaattaaaagatgaattaagattattacaagaaccaggatcatacgtcggagaagtcgttaaggtgatgggattaaagaaagttttggtcaaaattcaccccgaaggtaaatacattgtgaacatttccaaagacatcgacatcaagaaattgacgccttcgttacgagtatgtttgaaggccgattcgtacgatttacacaagatcttacccaacaaggttgatccgttggtgtcgttgatgatggtggaaaaagttcccgactccacatacgacatggttggtggtttagataaacagatcaaggaaatcaaagaagtcatcgagttgccagtcaaacaccccgaattattcgaaagtttggggatcgcccagcctaagggtgttatattatatggcccaccgggtaccggtaagaccttattggccagatcagtcgcccaccacacagaatgtaagttcattagggtttctggttcagaattggtccaaaaatacatcggtgaagggtcacgtatggttcgtgaattattcatcatggccagagaacatgcaccatccattatcttcatggatgaaatcgattccatcgggtcttctcgtgtcgaaggttcatccgggggtgattccgaagtccaaagaaccatgttggaattattgaaccaattggacgggttcgaaaactcaaaggacatcaagatcatcatggctaccaatagattggatattttggaccctgcccttttaagacccggtagaatcgacagaaaaatcgaattcccggcccctaccatcaccgccagaactgacattttaaagattcactccagatccatgaacttgacaagaggtataaatttaagaaagatcgctgaaaaaatgaatggctgctccggtgctgacgttaaaggtgtctgtactgaggctggtatgtatgcattgagagaaagaagaattcacataacccaagaagatttcgaattggccgttgccaaggttatgtccaagaatgatgaaggtgctgtttctttagctaaattatttaaatag

SEQ ID NO: 4886 - protein, 401 aa, Debaryomyces hansenii CBS767
MTVAMGKTYVHEGGIKPYFEQQIQDAEIKIQTTTQNLRRLEAQRNKLNNKVRQLKDELRLLQEPGSYVGEVVKVMGLKKVLVKIHPEGKYIVNISKDIDIKKLTPSLRVCLKADSYDLHKILPNKVDPLVSLMMVEKVPDSTYDMVGGLDKQIKEIKEVIELPVKHPELFESLGIAQPKGVILYGPPGTGKTLLARSVAHHTECKFIRVSGSELVQKYIGEGSRMVRELFIMAREHAPSIIFMDEIDSIGSSRVEGSSGGDSEVQRTMLELLNQLDGFENSKDIKIIMATNRLDILDPALLRPGRIDRKIEFPAPTITARTDILKIHSRSMNLTRGINLRKIAEKMNGCSGADVKGVCTEAGMYALRERRIHITQEDFELAVAKVMSKNDEGAVSLAKLFK

SEQ ID NO: 4887 - DNA, 1248 bp, Debaryomyces hansenii CBS767
  CDS (1)..(1248)
atgagtgccgaagaaaatgatccacttttgaccgcattgaatgctgatggacaacaaaacgatacaacggcggaatcggccgatcccgagagagaaagggcattgtccaagttcaaggataagttgattgagcataggaagtgggatgctaggttaaaggagttaaggttgagcatacgagacttggattcagattatgataagacagagaacgatataaaagcgttgcaatcggtcgggcaaatcattggggaagtgttaaagcaattagacgacgagaggtttattgtcaaggcatcgagcggacctcgttatattgttggatgtcgtaacactatcaagaaggagagcttgaaaaacggggtgagagtgtcgttggacatgactacgttgacgattatgagaatcttgcctagagaagtcgatcctttggtctataatatgacaaccttcgaaccgggtgaaatttcgttcaatggaattggtggtttaaccgaccagatcagagagttgcgtgaggttattgaattgccattgaagaatccagagttgttcacaagagtgggtattaaatcgccaaagggtgtattattatatggacctccaggtacgggtaaaacattgttggcaaaggcagttgctgctacaattggtgctaactttatattctcgcctgcatcagcaattgtcgataagtatattggtgaatctgcgagattgattagagaaatgtttgcatacgctaaggagcacgaaccttgtattattttcatggatgaagttgatgccattggtggtcgtagattcagtgagggtacctctgctgatcgtgaaattcaaagaaccttgatggaattattaaatcaaatggatggatttgacacgcttggtcaaacaaaggttattatggccactaatagaccagatacattagatcctgcattgttgagagctggaagacttgacagaaaaattgaaatcggcttgcctaatgaagccggtagattggaaattttcaagattcatactactaaagttgctaagcaaggtgagtttgattttgaagctgtggtcaaaatgagtgatggatttaatggtgcagatattagaaatgtcattactgaagctggtttcttcgctatcagagaggaaagagattatattcttcaaaacgacttaatgaaggcggctagaaaggttgcagacgtgaagaaattagaaggtaaaatagattacgaaaagttatag

SEQ ID NO: 4888 - protein, 415 aa, Debaryomyces hansenii CBS767
MSAEENDPLLTALNADGQQNDTTAESADPERERALSKFKDKLIEHRKWDARLKELRLSIRDLDSDYDKTENDIKALQSVGQIIGEVLKQLDDERFIVKASSGPRYIVGCRNTIKKESLKNGVRVSLDMTTLTIMRILPREVDPLVYNMTTFEPGEISFNGIGGLTDQIRELREVIELPLKNPELFTRVGIKSPKGVLLYGPPGTGKTLLAKAVAATIGANFIFSPASAIVDKYIGESARLIREMFAYAKEHEPCIIFMDEVDAIGGRRFSEGTSADREIQRTLMELLNQMDGFDTLGQTKVIMATNRPDTLDPALLRAGRLDRKIEIGLPNEAGRLEIFKIHTTKVAKQGEFDFEAVVKMSDGFNGADIRNVITEAGFFAIREERDYILQNDLMKAARKVADVKKLEGKIDYEKL

SEQ ID NO: 4889 - DNA, 1284 bp, Debaryomyces hansenii CBS767
  CDS (1)..(1284)
atgtctacattagaagaattagaaaaccaacaagatgacagtatagatcaagaaattttgcaatcttcgacgtcagatattatgaacagaaccaggttattggataatgatatcaaggtgatgagatcggagtcacaaagattgacacatgaaaagacagttatgttggagagaattaaggacaaccaggaaaaaatcaataataataagcagttaccatatttggtcgggaatgttgttgaattattagatttgagtgccgaaaaggaggcaagtgaacaaggagccaatgtggatttggatgccactagatcaggaaaatcggctgtgattaagacatcgaccagacaaacgattttcttgccattgattgggttggttgatccggccaatttgaagccaaatgatcttattggggtgaataaggattcatacttgattttggacacattaccatccgaatatgattcaagggtgaaagctatggaagttgacgaaaagccaactgaagattattctgatattggtggattggacaaacaaattgaggagttgattgaagcagtggtgttacctatgaaacaggcagacaaattcaaaaacttgggaattaaacctccaaaaggtgctttgatgtacgggccaccaggtaccgggaaaacattattagcaagagcctgtgcagcccaatctggagcaaccttcttgaagttagctgctcctcaattggttcaaatgtttattggggacggtgccaaattggttcgtgatgcattcgccttagctaaggaaaaagcaccaacaattatattcattgatgaattggatgcaattggtactaagagattcgattccgataagagtggtgacagagaagtacaaagaactatgttggaacttttaaatcaattagatggttttggttctgacgacagagttaaggtcttggccgccactaacagagtcgatacattagatcctgcattgttgagatcgggtagattggatagaaagatagaattcccattaccatcagaagaagccagagaatccgtattgaagattcacgccagaaaattaaactgtgacaattcttcggtcaactggagagaattggccagatctacagatgagttcaatggtgctcaattgaaagccgtcaccgtggaagcaggtatgattgccttgagaaacggtaaatcaattataaagcatgaagacttcgtcgaagccataggtgaagtccaagccagaaaatcgaaatctgtcaacttctatgcttag

SEQ ID NO: 4890 - protein, 427 aa, Debaryomyces hansenii CBS767
MSTLEELENQQDDSIDQEILQSSTSDIMNRTRLLDNDIKVMRSESQRLTHEKTVMLERIKDNQEKINNNKQLPYLVGNVVELLDLSAEKEASEQGANVDLDATRSGKSAVIKTSTRQTIFLPLIGLVDPANLKPNDLIGVNKDSYLILDTLPSEYDSRVKAMEVDEKPTEDYSDIGGLDKQIEELIEAVVLPMKQADKFKNLGIKPPKGALMYGPPGTGKTLLARACAAQSGATFLKLAAPQLVQMFIGDGAKLVRDAFALAKEKAPTIIFIDELDAIGTKRFDSDKSGDREVQRTMLELLNQLDGFGSDDRVKVLAATNRVDTLDPALLRSGRLDRKIEFPLPSEEARESVLKIHARKLNCDNSSVNWRELARSTDEFNGAQLKAVTVEAGMIALRNGKSIIKHEDFVEAIGEVQARKSKSVNFYA

SEQ ID NO: 4891 - DNA, 1311 bp, Yarrowia lipolytica CLIB122
  CDS (1)..(1311)
atgccaccaaaatctgattgggaaaagtacaaggcccccatcgacgaggatgccgcgcaggagaagatcattcctctgtccgagggcgacatccaggtactcaagacgtacggaactgctccctatggtactgccctcaagaacatcgagaaggacatcaaggacatgcaagcacgaatccaggagaaggtcggcatcaaggagtccgacacaggtctggccccgcaccacctgtgggacacacaaatggacaagcagcgaatgagcgaggagaatcctctccaggtggctcgatgcaccaagattatcgagactgctgaagaccccggaaagagcaagtacgtcatcaacgtcaagcagatcgccaagtttgtcgtgtcgctgggcgagcgagtgtcgcccacagatatcgaggaggggatgcgagtgggagtcgaccggtccaagtaccagattcagctgcctctgccaccccgaatcgacccttccgtcaccatgatgacggtcgaggagaagcccgatgtcacctactcggacgtgggaggctctaaggagcagctggagaagctgcgagaggttgtcgagctgcctctgctgtctcccgaacgattcgtcaacctcggaatcgaccctcccaagggtattcttctatacggaccccccggaaccggtaagactctgtgcgcacgagccgtggctaaccgaacagacgccacttttatccgtgtcattggctccgagctagtgcagaagtacgttggtgagggtgcccggatggtccgagagctgttcgagatggctcgaaccaagaaggcttgcatcattttcttcgacgaggtcgacgccattggaggagcccgattcgatgacggagccggaggagacaatgaggtgcagagaaccatgctagagctcatcactcagctcgacggtttcgatcctcgaggaaatatcaaggtcatgtttgccaccaatagacccaacactctagatcccgcactcctgcgtcccggacgaattgaccgaaaggtcgagttctcactgccagatctcgagggccgagctaacattttccgaatccactcaaagagcatgtctgtcgacagagatatccgatgggagctcatttcgcgtctgtgtcccaactccactggtgctgagctgcgatccgtgtgcactgaggccggcatgtttgccattcgagcccgccgaaaggtcgccactgagaaggacttcctggctgccgtcgagaaggtcattaagggtaacctcaagtttagcagtacttctcagtacatgcagtacaactag

SEQ ID NO: 4892 - protein, 436 aa, Yarrowia lipolytica CLIB122
MPPKSDWEKYKAPIDEDAAQEKIIPLSEGDIQVLKTYGTAPYGTALKNIEKDIKDMQARIQEKVGIKESDTGLAPHHLWDTQMDKQRMSEENPLQVARCTKIIETAEDPGKSKYVINVKQIAKFVVSLGERVSPTDIEEGMRVGVDRSKYQIQLPLPPRIDPSVTMMTVEEKPDVTYSDVGGSKEQLEKLREVVELPLLSPERFVNLGIDPPKGILLYGPPGTGKTLCARAVANRTDATFIRVIGSELVQKYVGEGARMVRELFEMARTKKACIIFFDEVDAIGGARFDDGAGGDNEVQRTMLELITQLDGFDPRGNIKVMFATNRPNTLDPALLRPGRIDRKVEFSLPDLEGRANIFRIHSKSMSVDRDIRWELISRLCPNSTGAELRSVCTEAGMFAIRARRKVATEKDFLAAVEKVIKGNLKFSSTSQYMQYN

SEQ ID NO: 4893 - DNA, 1221 bp, Yarrowia lipolytica CLIB122
  CDS (1)..(1221)
atgacgacagttgcaagcaaccaggtgggtccctcttcctcgtcaggcattgcgccgttctttgcgcaacagattgaggactttgagctgaaaatcaacaagaagctgcaaaacttgcgacggttggaagcccagcgaaacgccctcaacaccaaggtgcgtctgctcaaggacgagctccacgtgctgcaggagtcgggctcgtacgtcggcgaggtgatcaagatcatgggcaagcagaaggtgctggtcaaggtccaccccgagggcaagtacgtggtcgatattgctcccgacctcgacattaagaagatcacgccctcgttgcgggtctgtctgcgatcggactcgtacactctgcaccagattctgcccaacaaggtcgatcctctggtgtcgctgatgatggtggaaaaggtgcctgacagtacctacgacatggtgggaggtctggaccagcagatcaaggagatcaaggaggtgatcgagctgcccgtcaagcatcccgagctgtttgaaagtctgggtatcgcgcagcccaagggagtcattctttacggaccccccggtaccggaaagacccttcttgcacgagctgtggcgcatcacaccgagtgtaagttcattcgagtgtctggttccgagctggtgcaaaagtacattggagagggttctcgaatggttcgagagctctttatcatggcccgagagcatgccccaagtatcatcttcatggacgaaattgattccattggttctgctcgaaccgagtctggaggaggcggcggcggtggcgactctgaggttcagcgaaccatgctggagcttctcaaccagctggacggtttcgagtcgtccaagaacatcaagatcatcatggccactaaccgtcttgacattctggaccctgctcttctgcgtcccggtcgaatcgaccgaaagatcgagttccccccgcccaccgtggaggctcgagccgacattctgcgaatccactcacgacgaatgaacctaacccgaggaatcgatctcaaaaagattgccgagaagatgaatggctgttcgggagccgaagtcaagggagtgtgcacagaggccggaatgtacgctctgagagagcgacgaatccacgtgacccaggaggactttgagctggctgtggccaaggtcatgagcagaaacgatgcttccgaggtttctgttgccaagctgttcaagtaa

SEQ ID NO: 4894 - protein, 406 aa, Yarrowia lipolytica CLIB122
MTTVASNQVGPSSSSGIAPFFAQQIEDFELKINKKLQNLRRLEAQRNALNTKVRLLKDELHVLQESGSYVGEVIKIMGKQKVLVKVHPEGKYVVDIAPDLDIKKITPSLRVCLRSDSYTLHQILPNKVDPLVSLMMVEKVPDSTYDMVGGLDQQIKEIKEVIELPVKHPELFESLGIAQPKGVILYGPPGTGKTLLARAVAHHTECKFIRVSGSELVQKYIGEGSRMVRELFIMAREHAPSIIFMDEIDSIGSARTESGGGGGGGDSEVQRTMLELLNQLDGFESSKNIKIIMATNRLDILDPALLRPGRIDRKIEFPPPTVEARADILRIHSRRMNLTRGIDLKKIAEKMNGCSGAEVKGVCTEAGMYALRERRIHVTQEDFELAVAKVMSRNDASEVSVAKLFK

SEQ ID NO: 4895 - DNA, 1233 bp, Yarrowia lipolytica CLIB122
  CDS (1)..(1233)
atggaaaacgacccgctgctcgcagctctcaaccaggaggcgcccgaggtggctgccacacccacagatcccgagcgggaaaaggcgatcgagtcgttcaagagaaaactcaaggagcatcgagagtacgaggtcaagctcaaggacttgcgactgggcatcagagacctcgagcgcaaattcgacaagaccgaggacgacatcaaggcgctacagtcggtaggccagctgattggcgaggttcttaagcagctggatgaggagcggttcatcgtcaaagcctccaacggcccccgatacattgtgggctgtcggtccagcatcaagaaggagaagctgctgcagggtgtgcgtgtgtctctggatatgaccactttgactatcatgcgaattcttccccgagaggtcgatcctcttgtctacaacatgaccacgtttgagcctggagagctgaccttctccggtatcggtggcctcaacgagcagatccgtgaactcagagaggtcattgagctgcctctgaagaaccccgagctgtttttgcgagtcggaatcaagcctcccaagggtgtgcttctgtacggccctcccggaacaggaaagaccctgctggccaaggccgtggccgccactattggcgcaaacttcatcttctcgcccgcctcagctatcgtcgacaagtacattggagagtctgcccgtctgattcgagaaatgttcggatacgccaaggaacacgagccctgtatcatcttcatggacgaggtggacgccattggaggacgtcgattttccgagggaacctcctccgaccgagaaatccagcgaacgctcatggagctgctgaaccagatggacggtttcgactatctcggaaagaccaaggtcatcatggccaccaaccggcccgatactctggaccccgccctgctgcgagcaggccgtctggaccgaaagatcgagatcccactgcccaacgaggccggccgtctggaggtgtttaagatccacgctgctggcgttcagaagcagggcgaaatcgattacgaggccctggtcaagatgagcgacggtttcaacggagcagatatccgaaacgtggtcaccgaggctggcttctttgccatccgagacgatcgggactacattgttcagaacgatctgctcaaggcctgcagaaaggtgtccgagaacaagaagctggagggtaagctcgagtacgagaagttgtag

SEQ ID NO: 4896 - protein, 410 aa, Yarrowia lipolytica CLIB122
MENDPLLAALNQEAPEVAATPTDPEREKAIESFKRKLKEHREYEVKLKDLRLGIRDLERKFDKTEDDIKALQSVGQLIGEVLKQLDEERFIVKASNGPRYIVGCRSSIKKEKLLQGVRVSLDMTTLTIMRILPREVDPLVYNMTTFEPGELTFSGIGGLNEQIRELREVIELPLKNPELFLRVGIKPPKGVLLYGPPGTGKTLLAKAVAATIGANFIFSPASAIVDKYIGESARLIREMFGYAKEHEPCIIFMDEVDAIGGRRFSEGTSSDREIQRTLMELLNQMDGFDYLGKTKVIMATNRPDTLDPALLRAGRLDRKIEIPLPNEAGRLEVFKIHAAGVQKQGEIDYEALVKMSDGFNGADIRNVVTEAGFFAIRDDRDYIVQNDLLKACRKVSENKKLEGKLEYEKL

SEQ ID NO: 4897 - DNA, 1311 bp, Yarrowia lipolytica CLIB122
  CDS (1)..(1311)
atgggtaaccgaccatcactccccggagacaagaagaaggacgacaagaagaacgagaagcccaagtatgagcctcccgtgaacacacgatcgcatcgaaagaagaagaagggccccgaaaacgccaacaaactgcccggcgtgtaccccacgacacgatgcaagctcaagctgctcaagatggagcgaatcaaggatcatctgctgctggaggaagagtttgtgcagaatcaggagcgtctcaacccgctggacgacaaggttgccgaggagcgatcaaaggttgacactctgagaggttctcccatgggcgtgggcactctggaggagatcatcgacgacgatcatgccattgtctcgtccacttctggccccgagtactacgtttcgatcatgtcttttgttgataaggatcttctagaacccggctgttctgttttgctgcaccacaagactgtgtctgtcgttggagtgctgcaagacgatgccgaccccatggtctcggtaatgaagttggacaaggcccccacagagtcgtatgccgatattggaggtctggagtcgcagattcaggaaattaaggagtccgtggagctgccactcacacatccagagctctatgaagagatgggtatcaaaccccccaagggagtcattctttacggcgctcccggaaccggaaagacactgctggccaaggccgtcgccaaccagacttctgctacatttttgcgaatcgttggatccgagctgatccaaaagtacttgggagacggtccccgactgtgtcgacagattttccagattgccgcagaacacgcaccgtccattgttttcatcgatgagattgacgctattggaaccaaacgatacgagtcgacgtctggcggagagcgagaggtgcagcggaccatgctggagcttctgaaccagctggatggattcgacgaccgaggagacgtcaaggtaattatggctacaaacaagattgagtcgctggaccctgcactgattcgacctggtcgaatcgaccgaaagattctgtttgagaatcccgactccaccaccaagcgaaagattatgggcatccacacctccaagatgaacctcaacgacgatgttgatctcgaggagtttgtgtcttccaaggatgaactttctggagccgacatcaaggccatgtgcaccgaggcaggtctgcttgctctgcgagagagacgaatgcgggtcactgctgaggatttccgaaccgctaaagagcgggtcatgaagaacaaggtggaggagaaccttgagggtctctacctgtaa

SEQ ID NO: 4898 - protein, 436 aa, Yarrowia lipolytica CLIB122
MGNRPSLPGDKKKDDKKNEKPKYEPPVNTRSHRKKKKGPENANKLPGVYPTTRCKLKLLKMERIKDHLLLEEEFVQNQERLNPLDDKVAEERSKVDTLRGSPMGVGTLEEIIDDDHAIVSSTSGPEYYVSIMSFVDKDLLEPGCSVLLHHKTVSVVGVLQDDADPMVSVMKLDKAPTESYADIGGLESQIQEIKESVELPLTHPELYEEMGIKPPKGVILYGAPGTGKTLLAKAVANQTSATFLRIVGSELIQKYLGDGPRLCRQIFQIAAEHAPSIVFIDEIDAIGTKRYESTSGGEREVQRTMLELLNQLDGFDDRGDVKVIMATNKIESLDPALIRPGRIDRKILFENPDSTTKRKIMGIHTSKMNLNDDVDLEEFVSSKDELSGADIKAMCTEAGLLALRERRMRVTAEDFRTAKERVMKNKVEENLEGLYL

SEQ ID NO: 4899 - DNA, 1591 bp, Apis mellifera
  CDS (76)..(1293)
attacagtacagtaggtatcaatgacaagcaattcttctagtaacatcatatataaataaatagtgagtgcaataatgacgctcacaaacaaaatggaaatagatgaaaaaactatgaaaggagaaggttttaaaccatattatattactaaaatcgaagaacttcaattaattgtagctgaaaaaagtcaaaatttgaggaggttacaagcacaacgtaatgagcttaatgcaaaagtacgtatgttgcgtgaagaattgcaacttcttcaagaacaaggatcatatgttggagaagttgttaaaccaatggataaaaaaaaagttttagtcaaagtacatcctgaaggaaaatttgtagtagatatagataaaaatattgatattaatgatgtgacaccaaattcacgagttgcattacgtaatgaaagttatactttgcataaaattttaccaaataaagttgatccacttgtttctcttatgatggttgaaaaagtaccagattctacatatgaaatggttggtggtttagacaaacaaatcaaagaaattaaagaagttattgaattacctgttaaacatcctgaattatttgatgctcttggaattgcccaacctaaaggtgtacttttatatggaccaccaggtacaggtaaaacattattagcaagagcagttgctcatcatactgaatgtacatttattcgtgtatcgggttctgaattggttcaaaaattcattggagaaggttcacgaatggttcgtgaattatttgtaatggcaagagaacatgcaccatctataatattcatggatgaaatagattcaattggaagttctcgcattgaatctggttcaggaggagatagtgaagttcaacgaacaatgctcgagttacttaatcaattagatggttttgaagcaacaaaaaatataaaagttattatggctacaaatagaattgatatattagatccagcgttattaagaccaggacgtatagatcgtaaaatcgaattccctcctccaaacgaagaagcacgactcgatattttaaaaattcattcaagaaaaatgaacttaacacgtggtataaatttaagaaaaattgctgaactcatgcctggtgcatcgggtgcagaagtgaagggtgtatgtacagaagctggtatgtatgctcttagagaacgtcgtgtacatgttacccaagaagactttgaaatggctgtagcaaaagtcatgcaaaaagattcagaaaaaaatatgtcaatcaagaaattatggaagtaattgatttcatcctgcagttctcattctatactcttttgcatcttttgcaaaatcatttgtaaatttcatacaatttcgatttaaatgtatacaaaataaaagttacagttacaagaaaaatatattaaatagaaaaattgatattttttgtggttcatttttttattaaatgtaattattaaataattatatattatattaatatcatattaattaatattatatatttatatatagaagatttttttttgcatttagaagtaggttgatgttttttcctaaaaataaatgtattttc

SEQ ID NO: 4900 - protein, 405 aa, Apis mellifera
MTLTNKMEIDEKTMKGEGFKPYYITKIEELQLIVAEKSQNLRRLQAQRNELNAKVRMLREELQLLQEQGSYVGEVVKPMDKKKVLVKVHPEGKFVVDIDKNIDINDVTPNSRVALRNESYTLHKILPNKVDPLVSLMMVEKVPDSTYEMVGGLDKQIKEIKEVIELPVKHPELFDALGIAQPKGVLLYGPPGTGKTLLARAVAHHTECTFIRVSGSELVQKFIGEGSRMVRELFVMAREHAPSIIFMDEIDSIGSSRIESGSGGDSEVQRTMLELLNQLDGFEATKNIKVIMATNRIDILDPALLRPGRIDRKIEFPPPNEEARLDILKIHSRKMNLTRGINLRKIAELMPGASGAEVKGVCTEAGMYALRERRVHVTQEDFEMAVAKVMQKDSEKNMSIKKLWK

SEQ ID NO: 4901 - DNA, 1323 bp, Apis mellifera
  CDS (1)..(1323)
atgggacaaaatcagtctggtactggtggtacaggaagtgataaaaaggatgataaggataaaaaaaagaaatatgaaccacctattccaacaagagtgggtaaaaagaaaagacgtacaaaaggaccagatgctgctttaaaattaccacaagttacaccacatacacgttgcagattaaaacttttaaagttagaacgtataaaagattatttattaatggaagaggaatttattagaaatcaagaaagattaaagccacaagaagaaaaaaatgaagaagaaagatctaaagttgatgatttacgtggaactcctatgtctgtcgggacattagaagaaataattgatgataatcatgcaatagtatctacatctgttggctctgaacattatgtatcaattttatcatttgtagataaggatcagttagaacctggatgttcagttttattaaatcataaagttcatgctgttgttggagttttaggagatgatacagatcctatggttacagtaatgaagttggagaaagctccacaagaaacttatgcagatattggtggacttgatacacaaattcaagaaattaaggaatctgtagaattacctttaacacatccagaatattatgaagaaatgggtattaaacctccaaaaggagttatactttatggtcctccaggaactggaaaaacattgttggcaaaagctgttgctaatcaaacttcagcaacttttttaagagtcgttggttccgaacttatacaaaaatatttaggagatggtcctaaacttgttagagagctatttagagttgcagaagaacatgctccttcaattgtatttatagatgaaatagatgctgtaggtaccaaacgatacgatagcaatagtggaggtgaacgtgaaattcaaagaactatgttagaacttctcaatcaacttgatggttttgatagtcgaggagatgttaaagtggtaatggctacaaatagaattgaaactttagatccagcattaatcagaccaggtcgaattgatagaaaaatagaatttccattgccggatgaaaaaacaaaacggagaatattcagcattcatactagtagaatgactttagcacctgatgtaaatttagcagaattaattatggctaaagatgatctttcaggtgcagatataaaggctatatgtactgaagctggtttaatggcattacgtgaacgtcgtatgaaagttactagcgatgattttaaaaaatctaaagaaagcgttttgtatcggaaaaaggaaggatctcccgaaggattatatttataa

SEQ ID NO: 4902 - protein, 440 aa, Apis mellifera
MGQNQSGTGGTGSDKKDDKDKKKKYEPPIPTRVGKKKRRTKGPDAALKLPQVTPHTRCRLKLLKLERIKDYLLMEEEFIRNQERLKPQEEKNEEERSKVDDLRGTPMSVGTLEEIIDDNHAIVSTSVGSEHYVSILSFVDKDQLEPGCSVLLNHKVHAVVGVLGDDTDPMVTVMKLEKAPQETYADIGGLDTQIQEIKESVELPLTHPEYYEEMGIKPPKGVILYGPPGTGKTLLAKAVANQTSATFLRVVGSELIQKYLGDGPKLVRELFRVAEEHAPSIVFIDEIDAVGTKRYDSNSGGEREIQRTMLELLNQLDGFDSRGDVKVVMATNRIETLDPALIRPGRIDRKIEFPLPDEKTKRRIFSIHTSRMTLAPDVNLAELIMAKDDLSGADIKAICTEAGLMALRERRMKVTSDDFKKSKESVLYRKKEGSPEGLYL

SEQ ID NO: 4903 - DNA, 1182 bp, Apis mellifera
  CDS (1)..(1182)
atggcaaccaccgtggattcggttagggaaaaagcccttcaagattatagaaaaaagcttatagaacataaagaagtagaatcacgtttaaaggaaatgagagaacatcttaaagacttaacaaaacaatatgataaatctgagagtgatttaaaagctttacaaagtgttggacagattgttggagaagtattaaaacaacttactgaagaaaaatttatagtaaaagcaacaaatggtccacgttatgttgttggatgtcgacgtcaacttgacaaaaataaattgaaatctgggacaagagtagctcttgatatgactactcttactataatgcgttatttacctcgtgaggttgatccattggtttataacatgtcacatgaagatcctggtgatgttacatatagtgcaattggtggtctaagtgaacaaatacgagagctaagagaagttatagaattaccattattaaatcctgaattatttcaaagagttggtataactcctcccaaaggatgtctcttatatggaccaccaggaactggaaaaacattattagccagagcagttgctagtcaattagatgcaaattttttaaaagttgtatcaagtgctattgttgataaatatattggtgaatcagcaagattgattagagaaatgtttaattatgcacgagatcatcaaccgtgtatcatatttatggatgaaattgatgcaattggtgggcgtagattttcagaaggtacaagtgctgatcgtgaaattcaaagaactttaatggaattattaaatcaaatggatggttttgattctttaggccaagttaaaatgataatggctacaaatagaccagatactttggatccagctttattaaggccaggtagattagatagaaaaattgaaatcccattacctaatgaacaagcacgtctagaaattttaaaaattcatgctggtcctatatctaagcatggagaaattgattatgaagcagtagtcaaactttcggatggatttaatggtgctgatttaagaaatgtttgcactgaagcaggattatttgcaataagattagaaagagaatatgtaatacaagaagattttatgaaggcagtaaggaaagtttcggataataaaaaacttgaatccaaattagattacaaacccgtataa

SEQ ID NO: 4904 - protein, 393 aa, Apis mellifera
MATTVDSVREKALQDYRKKLIEHKEVESRLKEMREHLKDLTKQYDKSESDLKALQSVGQIVGEVLKQLTEEKFIVKATNGPRYVVGCRRQLDKNKLKSGTRVALDMTTLTIMRYLPREVDPLVYNMSHEDPGDVTYSAIGGLSEQIRELREVIELPLLNPELFQRVGITPPKGCLLYGPPGTGKTLLARAVASQLDANFLKVVSSAIVDKYIGESARLIREMFNYARDHQPCIIFMDEIDAIGGRRFSEGTSADREIQRTLMELLNQMDGFDSLGQVKMIMATNRPDTLDPALLRPGRLDRKIEIPLPNEQARLEILKIHAGPISKHGEIDYEAVVKLSDGFNGADLRNVCTEAGLFAIRLEREYVIQEDFMKAVRKVSDNKKLESKLDYKPV

SEQ ID NO: 4905 - DNA, 1206 bp, Candida albicans SC5314
  CDS (1)..(1206): transl_table=12
atgactacttcaattgataaatcttatgttcatgaaggtggtataagaccatattttgaacaacaaatacaagatacggaaataagaatacagcaaaccacacagaacttgcgtcgtttggaagcccaacgtaacaaattgaataacaaagtcagacaattaaaggatgaattaaaattattacaagaacctggatcatatgtaggtgaagttgttaaagttatgggcttgaaaaaagttttagtgaaaatccatcctgaaggtaaattcattgtcaatgttaccaaagatatcgatgtcaagaaattgactccatcaataagagtgtgtttgaaaccagattctcacgatttgtacaaaatattacccaccaaagttgatcctttggtttcattgatgatggttgaaaaagtcccagactcaacatacgatatggttggtgggttagataaacaaattaaagaaatcaaagaagttattgaattacctgtcaaacatccagaattgtttgaaagtttgggtatagctcaaccaaaaggtgttatattgtatggaccaccaggtacaggtaagaccttattggcaagagcagttgctcaccataccgaatgtaaattcattcgtgtttctggttcagaattagtgcaaaagtatattggggaagggtctcgtatggttagggagttgttcgtgatggcaagagaacatgcaccatcaatcatttttatggatgaaattgattctattgggtcgtcgcgtgttgaaggttcatcaggaggtgattccgaagtgcaaagaacaatgttggaattgttaaatcaattggatgggtttgaaagttcaaaagatatcaaaatcattatggccactaatcgtttagatattttggatccagctttattgagaccaggtagaattgatagaaaaattgaattcccagcaccaaccgttgctgctagaacagatattttaaagattcattcaagatccatgaatttgacaagaggtattaatttgcgtaaaattgctgagaaaatgaatggatgcagtggtgctgatgtgaaaggagtttgtaccgaagctggtatgtatgcattgagagaaagaagaattcatgtaactcaagaagatttcgaattggcagttgcaaaagtcatgtctaagaatgacgatggtgctgtctccttacagaaattattcaaataa

SEQ ID NO: 4906 - protein, 401 aa, Candida albicans SC5314
MTTSIDKSYVHEGGIRPYFEQQIQDTEIRIQQTTQNLRRLEAQRNKLNNKVRQLKDELKLLQEPGSYVGEVVKVMGLKKVLVKIHPEGKFIVNVTKDIDVKKLTPSIRVCLKPDSHDLYKILPTKVDPLVSLMMVEKVPDSTYDMVGGLDKQIKEIKEVIELPVKHPELFESLGIAQPKGVILYGPPGTGKTLLARAVAHHTECKFIRVSGSELVQKYIGEGSRMVRELFVMAREHAPSIIFMDEIDSIGSSRVEGSSGGDSEVQRTMLELLNQLDGFESSKDIKIIMATNRLDILDPALLRPGRIDRKIEFPAPTVAARTDILKIHSRSMNLTRGINLRKIAEKMNGCSGADVKGVCTEAGMYALRERRIHVTQEDFELAVAKVMSKNDDGAVSLQKLFK

SEQ ID NO: 4907 - DNA, 1206 bp, Candida albicans SC5314
  CDS (1)..(1206): transl_table=12
atgactacttcaattgataaatcttatgttcatgaaggtggtataagaccatattttgaacaacaaatacaagatacggaaataagaatacagcaaaccacacagaacttgcgtcgtttggaagcccaacgtaacaaattgaataacaaagtcagacaattaaaggatgaattaaaattattacaagaacctggatcatatgtaggtgaagttgttaaagttatgggcttgaaaaaagttttagtgaaaatccatcctgaaggtaaattcattgtcaatgttaccaaagatatcgatgtcaagaaattgactccatcaataagagtgtgtttgaaagcagattctcacgatttgtacaaaatattacccaacaaagttgatcctttggtttcattgatgatggttgaaaaagtcccagactcaacatacgatatggttggtgggttagataaacaaattaaagaaatcaaagaagttattgaattacctgtcaaacatccagaattgtttgaaagtttgggtatagctcaaccaaaaggtgttatattgtatggaccaccgggtacaggtaagaccttattggcaagagcagttgctcaccataccgaatgtaaattcattcgtgtttctggttcagaattagtgcaaaagtatattggggaagggtctcgtatggttagggagttgttcgtgatggcaagagaacatgcaccatcaatcattttcatggatgaaattgattctatcgggtcttcgcgtgttgaaggttcatcaggaggtgattccgaagtgcaaagaacaatgttggaattgttaaatcaattggatgggtttgaaagttcaaaagatatcaaaatcattatggccactaatcgtttagatattttggatccagcattattgagaccaggtagaattgatagaaaaattgaattcccagcaccaaccgttgctgctagaacagatattttaaagattcattcaagatccatgaatttgacaagaggtattaatttgcgtaaaattgctgagaaaatgaatggatgcagtggtgctgatgtgaaaggggtttgtaccgaagctggtatgtatgcattgagagaaagaagaattcatgtaacacaagaagatttcgaattggcagttgcaaaagtcatgtctaagaatgacgatggtgctgtctccttacagaaattattcaaataa

SEQ ID NO: 4908 - protein, 401 aa, Candida albicans SC5314
MTTSIDKSYVHEGGIRPYFEQQIQDTEIRIQQTTQNLRRLEAQRNKLNNKVRQLKDELKLLQEPGSYVGEVVKVMGLKKVLVKIHPEGKFIVNVTKDIDVKKLTPSIRVCLKADSHDLYKILPNKVDPLVSLMMVEKVPDSTYDMVGGLDKQIKEIKEVIELPVKHPELFESLGIAQPKGVILYGPPGTGKTLLARAVAHHTECKFIRVSGSELVQKYIGEGSRMVRELFVMAREHAPSIIFMDEIDSIGSSRVEGSSGGDSEVQRTMLELLNQLDGFESSKDIKIIMATNRLDILDPALLRPGRIDRKIEFPAPTVAARTDILKIHSRSMNLTRGINLRKIAEKMNGCSGADVKGVCTEAGMYALRERRIHVTQEDFELAVAKVMSKNDDGAVSLQKLFK

SEQ ID NO: 4909 - DNA, 1236 bp, Candida albicans SC5314
  CDS (1)..(1236): transl_table=12
atggaagacccagttctgttagacaacgtaaacagtgtgttatcaaaattgaataacgtttcagctacaaactccaatgaaactgatgtgtatcttaaattgaaaaaattggagaaggagttagatttactattactacaagaagagtacattaaggatgaacaacgtcatttaaagcgtgaattggtgagggcacaagaagaagtcaagagaataaagtctgtgccattagtcattggacaattcttggaaccaatagatgaaaacactggtatagtttcatccaccactggttcaaactatgtcgttaggattttatctacattagatcgtgagttgttaaaggcatcctcttcggttgcattacatcgtcactcaaatgcattggttgacatattgccaccagaagctgactcttctatatcaattgttggagaagaccaaaagccagatgtcacttatgccgatgttggtggtctagatatgcaaaagcaagaaatcaaggaagccgtcgagttgccattgactcaaggtgatttgtattctcaaattggtattgatccacctagaggggtgttgttgtatggtccaccaggtactgggaaaaccatgttagtcaaagctgtggcaaattcaaccacggcttctttcatcagaattaatgggtcagaatttgtacaaaaatacttaggagagggtccaagaatggtgagagatgttttcagattggccagagagaattcaccagcaatcatttttattgatgaaatagatgcaattgctaccaagagatttgatgctcaaactggtgctgatcgtgaagttcaaagaattttgttggagttattgaatcaaatggatgggtttgatcagacatccactgtcaaagttataatggctactaacagagcagatactttagatcctgcattgttgagaccaggtagattagatagaaagattgagtttccttcattgaaagatagaagagaaagaagattgattttttcgacaattgcatcgaagatgtcattagcacctgaagctgatttggactctttaattatcagaaacgatccattgtctggtgcagttattgctgcaattatgcaagaagccgggttaagagctgtgagaaaaaacagatatatgattttgcaaagtgatttggaggaagcttacacttcacaagtaaagacagggacagaacatgataaatttgatttctataagtaa

SEQ ID NO: 4910 - protein, 411 aa, Candida albicans SC5314
MEDPVSLDNVNSVLSKLNNVSATNSNETDVYLKLKKLEKELDLLLLQEEYIKDEQRHLKRELVRAQEEVKRIKSVPLVIGQFLEPIDENTGIVSSTTGSNYVVRILSTLDRELLKASSSVALHRHSNALVDILPPEADSSISIVGEDQKPDVTYADVGGLDMQKQEIKEAVELPLTQGDLYSQIGIDPPRGVLLYGPPGTGKTMLVKAVANSTTASFIRINGSEFVQKYLGEGPRMVRDVFRLARENSPAIIFIDEIDAIATKRFDAQTGADREVQRILLELLNQMDGFDQTSTVKVIMATNRADTLDPALLRPGRLDRKIEFPSLKDRRERRLIFSTIASKMSLAPEADLDSLIIRNDPLSGAVIAAIMQEAGLRAVRKNRYMILQSDLEEAYTSQVKTGTEHDKFDFYK

SEQ ID NO: 4911 - DNA, 1365 bp, Candida albicans SC5314
  CDS (1)..(1365): transl_table=12
atgggagaaaaaaaaaatgctagggaaagactcgacctctcccaattacagaatactacaactgtatcaacaatggttaccttagaagatttagaaaacaatcagcaacaagaagaaaatgttatagatcaagaaattttgaattcgtctacttctgatataatcaatagaaccaaattgttggataatgacattaaagttatgagatctgaatcacagaggttgaaccatgaaaagaccgtgatgttggaaagaataaaagacaatcaagaaaagataaacaacaataagcaattaccttacttggtgggaaatgttgtggagttattaaatttggatgctgacaaagaggccagtgagcaaggagccaacattgatatcgacgcagctagagctggtaaatcagcggtaatcaagacatcaactagacagactatatttctaccaatgatagggttagttgacccaagcaagttaaaaccaaatgatttaattggcgtgaacaaggactcttatcttgtgttggatactttgccttcggaatatgattcgagagtgaaagcgatggaagtggatgaaaaaccaactgaagactattctgatattggtggattggacaaacaaattgaggaattgattgaagccgtggtgttgcctatgaaacaagcagacaagttcaaaaacttgggtatcaaacctccaaaaggtgctttaatgtatggtccacctggtacaggtaaaactttattagccagagcttgtgctgcccaatctggtgccacgtttttgaaattggctgctcctcaattggtgcaaatgtttattggggatggtgcaaagttagttcgtgacgcatttgctttggctaaggaaaaggctccaacaattatatttattgatgagttggatgctattggtaccaaaagattcgactccgacaaaagtggtgatagggaggtgcaaagaaccatgttggaattgttgaatcaattggatgggtttgggtctgacgacagagtcaaggttttagctgctactaatagagtcgatacattagaccctgcattgttgagatcaggtagattggataggaaaatcgagttcccattgccatcagaggaagccagagaatctgtgttgaaaatccatgcaagaaaattacactgtgacaataactcggttaactggagagaattggccagatctactgacgagttcaatggtgcccaattgaaggctgttacagtagaggcaggtatgattgctttgagaaatggtaaatctataatcaaacatgaagactttgtggaagctattagcgaagtgcaagccagaaagtccaagtcagtcaatttctacgcataa

SEQ ID NO: 4912 - protein, 454 aa, Candida albicans SC5314
MGEKKNARERLDLSQLQNTTTVSTMVTLEDLENNQQQEENVIDQEILNSSTSDIINRTKLLDNDIKVMRSESQRLNHEKTVMLERIKDNQEKINNNKQLPYLVGNVVELLNLDADKEASEQGANIDIDAARAGKSAVIKTSTRQTIFLPMIGLVDPSKLKPNDLIGVNKDSYLVLDTLPSEYDSRVKAMEVDEKPTEDYSDIGGLDKQIEELIEAVVLPMKQADKFKNLGIKPPKGALMYGPPGTGKTLLARACAAQSGATFLKLAAPQLVQMFIGDGAKLVRDAFALAKEKAPTIIFIDELDAIGTKRFDSDKSGDREVQRTMLELLNQLDGFGSDDRVKVLAATNRVDTLDPALLRSGRLDRKIEFPLPSEEARESVLKIHARKLHCDNNSVNWRELARSTDEFNGAQLKAVTVEAGMIALRNGKSIIKHEDFVEAISEVQARKSKSVNFYA

SEQ ID NO: 4913 - DNA, 1335 bp, Candida albicans SC5314
  CDS (1)..(1335): transl_table=12
atgccaccaaaggaagattgggataaatatataccaccttcagaagaagagacctctgaaaagataacaccattgaccgagggtgacattcaggtattgaaaacttatggaactgcaccatatgcagactctttgaaggagattgaaaaagatttgaagacaatagaagaaagaatcaagactaatcaagggataaaagagagtgatactgggttagctccacctcacctttgggatgttcttggtgacaaacaacgtatgcaagaagagcagagtttacaagttgccagatgtactaaaataattgaggcttctcaaccacaacagccaacaggattacagaatgccgataccaaatcaaaatatgtgattaatattaagcagattgccaagtttgttgtaggattaggtgaaagactttctcctaccgatatcgaagaaggaatgagagttggtgttgatagacacaagtatgaaattcaattaccgttgccacctagaattgatccatcagtgaccatgatgacagtggaggagaaaccagatgttacatacagcgatgttggtgggtgtaaagaacaaattgaaaaattgagagaagttgttgaattgccattgttgagtccagaaagatttgtcaaattgggtattgatccacccaaaggtatattgttgtatggtcctccaggtactgggaaaacattgtgtgcaagagcagttgctaacagaacagacgccacatttattcgagtcattgggtcggaattagtacaaaagtatgttggtgaaggggccaggatggtgcgtgaattgttcgagatggcaagaaccaagaaagcatgtattatattctttgatgaagttgatgccattggaggcgccagatttgatgatggtgctggtggtgataacgaagtgcaaagaaccatgttggagttgattacacaattggatgggtttgacccaagaggtaatatcaaggtgatgtttgccaccaatagaccaaatactttggatcctgcattattaagaccaggtagaattgatcgtaaggttgaattttctttaccggatttggaaggaagagccaacattttccgtattcattcaaagaccatgagtgttgagaaagatatcagatgggaattaatatccagattgtgtccaaatgccacaggtgcagaattgagatcggtgtgtactgaagcaggtatgtttgccatcagggccagaaggaaggttgccaatgaaaaagattttttgaaagcagtcgacaaggttattaaaggtaatttgaaattcagttcaacaagtcaatatatgcaatataattaa

SEQ ID NO: 4914 - protein, 444 aa, Candida albicans SC5314
MPPKEDWDKYIPPSEEETSEKITPLTEGDIQVLKTYGTAPYADSLKEIEKDLKTIEERIKTNQGIKESDTGLAPPHLWDVLGDKQRMQEEQSLQVARCTKIIEASQPQQPTGLQNADTKSKYVINIKQIAKFVVGLGERLSPTDIEEGMRVGVDRHKYEIQLPLPPRIDPSVTMMTVEEKPDVTYSDVGGCKEQIEKLREVVELPLLSPERFVKLGIDPPKGILLYGPPGTGKTLCARAVANRTDATFIRVIGSELVQKYVGEGARMVRELFEMARTKKACIIFFDEVDAIGGARFDDGAGGDNEVQRTMLELITQLDGFDPRGNIKVMFATNRPNTLDPALLRPGRIDRKVEFSLPDLEGRANIFRIHSKTMSVEKDIRWELISRLCPNATGAELRSVCTEAGMFAIRARRKVANEKDFLKAVDKVIKGNLKFSSTSQYMQYN

SEQ ID NO: 4915 - DNA, 1287 bp, Candida albicans SC5314
  CDS (1)..(1287): transl_table=12
atgagtgccgatgaaaatgatccattgttacaggcattaaatgctgataccaataacaaccaagattccaacaacgcaaatgctggatctacaacaaccagtgcaccagccgagccaattgatccagaaagagaaagagctttatcgaaattcaaggataaattattagagcacagaaagtgggatgccagattgaaagatcttagattaagtatacgagatttggacaaggattatgagaaaactgaaaatgatataaaagctttgcaatctgtgggccagatcattggtgaagtattgaaacaattggacgatgaaagatatattgtaaagacttcttcagggccaagatatattgttggatgtagaaacaccatcaaaaaggaaaatttgaagaatggtgttcgtgtttcattggacatgaccaccttgacaataatgagaattttgccaagagaagttgatccattggtttataatatgactacatttgaaccaggtgaaatttcatttaatggtattggtggtttaactgaacagatcagagaattgcgtgaggtcattgagttaccattaaagaatccagaattattcacaagagttggtattaaaccgcctaagggggtgttgttatatggtccaccagggactggtaagaccttgttagcaaaagcagttgctgccacaattggtgcaaatttcatattttctccagcatcagctatagtcgataagtatattggggaatctgccagattaattagagaaatgtttgcatatgccaaagagcacgaaccttgtattatatttatggatgaagttgatgccattgggggtagaagattcagtgaaggtacttctgcagaccgtgagattcaaagaacattaatggaattgttgaatcaaatggatggatttgatacattgggacagacaaagattataatggcaactaacagacccgatactttagatccagcattgttgagagctggtagattggatagaaaaattgaaattggtttacctaatgaagctggaagattggaaatcttcaaaatccatacatcaaaagttgctaaacaaggtgagtttgattttgaagctgccgttaaaatgagtgatggttttaatggagcagatataagaaatgtagttaccgaggctggtttttttgcaattagagatgatagagattacatattacaaaatgacttgatgaaagcggttagaaaagttgctgacgtcaaaaaattggagggtaaattggattacgaaaaattgtaa

SEQ ID NO: 4916 - protein, 428 aa, Candida albicans SC5314
MSADENDPLLQALNADTNNNQDSNNANAGSTTTSAPAEPIDPERERALSKFKDKLLEHRKWDARLKDLRLSIRDLDKDYEKTENDIKALQSVGQIIGEVLKQLDDERYIVKTSSGPRYIVGCRNTIKKENLKNGVRVSLDMTTLTIMRILPREVDPLVYNMTTFEPGEISFNGIGGLTEQIRELREVIELPLKNPELFTRVGIKPPKGVLLYGPPGTGKTLLAKAVAATIGANFIFSPASAIVDKYIGESARLIREMFAYAKEHEPCIIFMDEVDAIGGRRFSEGTSADREIQRTLMELLNQMDGFDTLGQTKIIMATNRPDTLDPALLRAGRLDRKIEIGLPNEAGRLEIFKIHTSKVAKQGEFDFEAAVKMSDGFNGADIRNVVTEAGFFAIRDDRDYILQNDLMKAVRKVADVKKLEGKLDYEKL

SEQ ID NO: 4917 - DNA, 1398 bp, Candida albicans SC5314
  CDS (1)..(1398): transl_table=12
atgggtcaaggtccttcaggaataccaggtggcgataatctcaacaaaaagaaagatgataagaaaaaggaaaaaccaaagtacgaaccaccagtggaatcaaagtttggtaaaaagaaaagaaggggccccgatacagcagttaaattacctagcgtgtaccccaacaccagatgtaaattgaaattattaaaattagaaagaatcaaggatcatttgttattggaagaagagtttgttaccaaccaagaagcattccaacctacagaagcaagacaagccgaagaaagagaaaaagttgacgaattgagaggatatccgatggcaattgggacattagaagaaataatcgacgatgatcatgcaattgtgtccagcactgctagttcagagtactatgtgtcaatcatgtcgtttgtagacaaggggttattggaaccaggatgttcagttcttttacatcacaaaacagtagcagtggtaggtgtgttacaagatgatgctgatcctatggtttcggtaatgaaactcgacaaatcccctacagaatcatatgccgacattggggggttggaatcacaaattcaagaaatcaaagaatcagtcgaattgccattgacacatcctgaattgtacgaagaaatgggaatcaagcctccaaaaggtgtgatattatatggggctcccggtaccggtaaaactttgttggccaaagcagttgccaatcaaacaagtgccactttcttgagaattgtcggatcggagttgatccagaaatatctaggtgatggtccaaggttgtgtcgtcaaattttccaaattgctgctgatcacgcaccttcaattgttttcattgatgaaatcgatgccattggtacaaagagatacgagtctacatctggtggtgaacgtgaaatccaaagaaccatgttggagttattgaatcagttagatgggttcgatgatagaggtgacatcaaagttattatggctacaaataagatagagtcacttgatcctgcattaatcagacctggaagaatcgatagaaagattttgtttgaaaaccctgacgccaataccaagaaaaagatcttgactattcacacgtcaaagatgagtttggcagatgacgttaacttggatgaaatagtcactggtaaggatgatttgtcgggtgctgatatcaaagctatatgtacagaagcagggttattagcattaagagaaagacgtatgcaagtcaaagctgaagatttcaaatctgcaaaggaaagagtcttgaaaaataaggttgaagaaaacctcgaaggtttgaatttgcaagtgcatagaaatacaattattgtacaacagatttttttttttgtaagtttttttttcctctccatcacttag

SEQ ID NO: 4918 - protein, 465 aa, Candida albicans SC5314
MGQGPSGIPGGDNLNKKKDDKKKEKPKYEPPVESKFGKKKRRGPDTAVKLPSVYPNTRCKLKLLKLERIKDHLLLEEEFVTNQEAFQPTEARQAEEREKVDELRGYPMAIGTLEEIIDDDHAIVSSTASSEYYVSIMSFVDKGLLEPGCSVLLHHKTVAVVGVLQDDADPMVSVMKLDKSPTESYADIGGLESQIQEIKESVELPLTHPELYEEMGIKPPKGVILYGAPGTGKTLLAKAVANQTSATFLRIVGSELIQKYLGDGPRLCRQIFQIAADHAPSIVFIDEIDAIGTKRYESTSGGEREIQRTMLELLNQLDGFDDRGDIKVIMATNKIESLDPALIRPGRIDRKILFENPDANTKKKILTIHTSKMSLADDVNLDEIVTGKDDLSGADIKAICTEAGLLALRERRMQVKAEDFKSAKERVLKNKVEENLEGLNLQVHRNTIIVQQIFFFVSFFFLSIT

SEQ ID NO: 4919 - DNA, 1155 bp, Ustilago maydis 521
  CDS (1)..(1155)
atggcggcggaagaggacacatatcttcgcttcaaaaagttgcaacaacacctcgagtttctcaacaccatggaggagtacgttaaagatgaacagagaaacttgaaacgcgagctggtgagagcgcaagaggaggtgaagcgcatccagtcggttcccctcgtcatcggccagttcctcgagccgatcgaccagcacacgggtattgttggttccaccacaggctctaactatgtcgtacgcatcctttctacaatcgatcgcgagctgctcaaggccagctcaagtgtagcgctgcaccgtcactcgaacgcgttggtggatgtgctgccaccagaggccgactcgtcgatcgccatgctcggacaggacgaaaagccaacagagacctaccaggatattggtggcatggacatccagaagcaggagatccgagaagcagtcgagctgccattggtacaatttgacctttaccgccagatcggtatcgatccacctcgcggcgtgttgctctatggtccaccaggaacaggaaagacgatgctagtcaaggcggtggccaacgccaccactgcgagcttcattcgcgtcgtaggttcggaatttgtgcagaaatacctgggcgaaggcccaaggatggtacgtgacgtcttccgacttgcacgcgaaaacgcgcccgccatcatctttatcgacgaaatcgacgctatcgccaccaaacgtttcgatgcgcagacgggtgcggatcgcgaagtgcagcgtatcctgctcgagctgctcaaccagatggacggtttcgatcaaggcagtaacgtcaaggtcatcatggccactaaccgagccgacacgctcgacccagcattactgcgtcccggtcgtctggaccgaaagatcgaattccccacaccatcacgtcgtgagaagcgtctcatcttccagaccatctgcggtaagatgaacctcagcccagaggtggatctggaggactatgttggacgacctgacaagctttccagtgccgaaattgccagcatctgccaagctgccggtttgcaggcgaggatttcgaggaggcctggaagcagattgtcaagaagccggacgattccaagatggagttctaccagtatcgaaaagtggctcagaggcctgtga

SEQ ID NO: 4920 - protein, 384 aa, Ustilago maydis 521
MAAEEDTYLRFKKLQQHLEFLNTMEEYVKDEQRNLKRELVRAQEEVKRIQSVPLVIGQFLEPIDQHTGIVGSTTGSNYVVRILSTIDRELLKASSSVALHRHSNALVDVLPPEADSSIAMLGQDEKPTETYQDIGGMDIQKQEIREAVELPLVQFDLYRQIGIDPPRGVLLYGPPGTGKTMLVKAVANATTASFIRVVGSEFVQKYLGEGPRMVRDVFRLARENAPAIIFIDEIDAIATKRFDAQTGADREVQRILLELLNQMDGFDQGSNVKVIMATNRADTLDPALLRPGRLDRKIEFPTPSRREKRLIFQTICGKMNLSPEVDLEDYVGRPDKLSSAEIASICQAAGLQARISRRPGSRLSRSRTIPRWSSTSIEKWLRGL

SEQ ID NO: 4921 - DNA, 1275 bp, Ustilago maydis 521
  CDS (1)..(1275)
atgtctgctgcagtgacaacacatgcagccgaatcggccaccggacatgcgcacacagtgtcccttgccaacattggtggcgccgcagcctcgacaaacgccctcggcattcagtcgttctaccaatccaagattcgttcctacgaaatcctcatcaaccaaaagacacagaacctccgtcgtctcgaagcacaacgaaatgcgctcaatgctcgtgtacgtctcctccgcgaggagctccagcttctccaagagccaggttcctatgtcggcgaggtggtcaaagtgatgggcaagaagaaggtgcttgttaaggtgcagcccgagggtaagtacgttgttgatattgcctcggacatcgacatctccgctctcacacccacactacgtgtggccctccgttccgactcatacacactccataaagtccttcccaacaagattgaccctctcgtctcactcatgatggtcgaaaaggtgccggactcgacgtatgagatggttggtggtctcgaccgccagatcaaggagatcaaggaagtcatcgagctgcctgtcaagcatcctgagcttttcgaatcgctcggtatcgctcagcccaagggtgtgcttctatacggtcctcccggaaccggaaagacgctgctcgcacgagctgtcgcgcaccacaccgactgtcgctttatccgtgtttctggttcagagctggtacaaaagtacatcggcgaaggttcgcgcatggttcgagagctcttcgtcatggctcgagagcacgcgccatccatcatcttcatggatgaaatcgacagtatcggatcgtcacgaggagagagcggctcgggcggtggagactctgaggtacagcgaaccatgcttgagctcctcaaccagcttgatggtttcgaaggcaccaagaacatcaaggtcattatggccaccaatcgaatcgatattctcgactcggccctcctgcgtcctggccgcattgaccgcaagatcgagttcccacccccgggtcctgaagcccgcgtttcgatcttgcgcatccacagccgcaaaatgtcgttacaacgaggcatcaatctgcgcgcgcttgccgaaaagatgggtcaatgctctggtgccgaagttcgaggtatctgcaccgaagctggcatgtacgcgttgcgcgagcgtcgacaacacgtctcgcacgaagactttgagcttgctattgccaaggttctccgcgcacaggcctcatctgagacttcggttaacaaactcttcacttga

SEQ ID NO: 4922 - protein, 424 aa, Ustilago maydis 521
MSAAVTTHAAESATGHAHTVSLANIGGAAASTNALGIQSFYQSKIRSYEILINQKTQNLRRLEAQRNALNARVRLLREELQLLQEPGSYVGEVVKVMGKKKVLVKVQPEGKYVVDIASDIDISALTPTLRVALRSDSYTLHKVLPNKIDPLVSLMMVEKVPDSTYEMVGGLDRQIKEIKEVIELPVKHPELFESLGIAQPKGVLLYGPPGTGKTLLARAVAHHTDCRFIRVSGSELVQKYIGEGSRMVRELFVMAREHAPSIIFMDEIDSIGSSRGESGSGGGDSEVQRTMLELLNQLDGFEGTKNIKVIMATNRIDILDSALLRPGRIDRKIEFPPPGPEARVSILRIHSRKMSLQRGINLRALAEKMGQCSGAEVRGICTEAGMYALRERRQHVSHEDFELAIAKVLRAQASSETSVNKLFT

SEQ ID NO: 4923 - DNA, 1317 bp, Ustilago maydis 521
  CDS (1)..(1317)
atgggtcaagctcctagcggtggagcgcccggtcgcggaggcaaagacaacaaaaaggatcaacagaagaagtgggaacctcctcttccaacacgtgtcggcaagaagaagaagcgcggtcctgactcgtcgtccaagctccccacggtctaccccaacacacgatgccgattgaagctgctcaagctcgaacgaatcaaggatcatctcttgctcgaggaggaattcgtgcagaaccaggagcgactcaaaccgcaggaggacaaggacgcagaggagcgtacaagggtcgatgacctcagaggtagccctatggctgtaggaacgctcgaggaaattatcgacgacgagcatgccattgtcagcagcgcaacgggtccagagtactatgtcagcatcatgagctttgtcgacaaagacctgctcgaaccgggctgcagcgtactgcttcaccacaaggctatggcgatcgttggtgttctttcggacgatgccgatcccatggttagtgtcatgaagctcgacaaggcgccttccgagagctacgccgacattggaggtctcgaaacccaaattcaggagatcaaggaagccgtcgaactaccgctcacccacccagaactttacgaagagatgggcatcaggccgccgaaaggtgtcatcctctacggtgttcctggcacgggcaagacgctgctcgccaaggcggttgccaaccagacctcggccaccttcctgcgcgtggtcggctccgagctcattcaaaaatacctgggtgatggtcccaaacttgtacgtgagctgttccgcgttgccgacgagcatgctcccagcattgttttcatcgatgagattgacgctgtaggcaccaaacgatacgactcaaattcaggaggagagagagagatccagcgtacactcttggaactactcaaccagctcgacggtttcgacacgagacacgacgtcaaggtgatcatggccaccaaccgaatcgagtcgctcgaccctgcgctcatccgaccgggccgaattgaccgaaagatcgagtttcctctgcctgaccaaaagaccaagatgcacatcttcaagcttcacacatcgcgtatgaacctcgactcggacgtggacctggaagagtttgtcgccatgaaagacgacctctcgggtgccgatatcaagtcgctcgttaccgaggcaggtttgttggcgttgcgagagaggcggatgcgtgtgaccaagaaggactttaccacggcgcgtgagcgtgttatcgaccgaaagaatgagggcactcccgagggtctttatctttaa

SEQ ID NO: 4924 - protein, 438 aa, Ustilago maydis 521
MGQAPSGGAPGRGGKDNKKDQQKKWEPPLPTRVGKKKKRGPDSSSKLPTVYPNTRCRLKLLKLERIKDHLLLEEEFVQNQERLKPQEDKDAEERTRVDDLRGSPMAVGTLEEIIDDEHAIVSSATGPEYYVSIMSFVDKDLLEPGCSVLLHHKAMAIVGVLSDDADPMVSVMKLDKAPSESYADIGGLETQIQEIKEAVELPLTHPELYEEMGIRPPKGVILYGVPGTGKTLLAKAVANQTSATFLRVVGSELIQKYLGDGPKLVRELFRVADEHAPSIVFIDEIDAVGTKRYDSNSGGEREIQRTLLELLNQLDGFDTRHDVKVIMATNRIESLDPALIRPGRIDRKIEFPLPDQKTKMHIFKLHTSRMNLDSDVDLEEFVAMKDDLSGADIKSLVTEAGLLALRERRMRVTKKDFTTARERVIDRKNEGTPEGLYL

SEQ ID NO: 4925 - DNA, 1395 bp, Cryptococcus neoformans var. neoformans B-3501A
  CDS (1)..(1395)
atgtctgccccagcccaagaccctcctcctcctaaccctccggccggagacagcagcaagccacaagaatcatcagacgtccctcagcaaacaacccaggagattgaaagcgcagagcagcaacagcagcaggaagtcgagcagcccaaggaggatacgtttgaagatgtcccggaacatgtcgtgaagtctgatgcgcaagagatcaagatgcagacacgtatgatcgataacgaaatcaagatgatgcgacaggaaaacctccggctgtcacacgagagggagcagatggttgagaagattgcggataatacgacaaagatcaagcagaacaaggttctgccttaccttgtctccaaggtcgtcgagattcttgatgtggactctgaagagcaagaaggtgctactcataatgaacaaaacgctaaaaagtcaaaatgtgctgttatcaaaacatcaacgcgtcagacagtatttttgcccattatcgggttggttccgcacaatcagcttgcgcctggagacttgattggtgtcaacaaggattcttatctggttctggacaaacttccagatgagtacgacgcgagggtaaaggcgatggaagtggatgaaagaccgactgagacatacacggatattggtggtttagacaaacagattgaagaattagtagaggccatcgtcttgcccatgcaacaagcagacaagttcaagactcttggtatcacccctccaaaaggatgccttatgtacggtccgcctggtaccggtaaaaccctgctcgcccgagcctgtgccgctcagaccaacgcttgctacctcaaactcgccggtcccgctctagtccagatgtacctcggtgacggtgccaaactcgtccgcgacgctttcgaacttgccaagcaaaaagcgcctgctatcatttttatcgacgagttggatgcgattggaacaaagaggtttgacagcgataaaagtggtgacagggaagtgcagaggacaatgttggagttgttgaaccaactggatggtttttcgagtgatagtcgaatcaaggtcattgccgctacaaaccgaattgatatccttgaccctgcccttctccgatcaggccgtttagataggaagattgaattccctctgccaaatgagtctgctcgagagcatattttgcaaattcactctcgaaagcttaatcaccacggcgtcaactttgaggaattggctagatcaacagaggatatgaacggtgcgcaattgaaggctgtttgtgttgaagcgggcatgttggctcttcgacaaaacgctacacaactgacacacgagcatttccatgggggtattttggaagttcaagcacgcaaagccaaggaacaccactactttgcataa

SEQ ID NO: 4926 - protein, 464 aa, Cryptococcus neoformans var. neoformans B-3501A
MSAPAQDPPPPNPPAGDSSKPQESSDVPQQTTQEIESAEQQQQQEVEQPKEDTFEDVPEHVVKSDAQEIKMQTRMIDNEIKMMRQENLRLSHEREQMVEKIADNTTKIKQNKVLPYLVSKVVEILDVDSEEQEGATHNEQNAKKSKCAVIKTSTRQTVFLPIIGLVPHNQLAPGDLIGVNKDSYLVLDKLPDEYDARVKAMEVDERPTETYTDIGGLDKQIEELVEAIVLPMQQADKFKTLGITPPKGCLMYGPPGTGKTLLARACAAQTNACYLKLAGPALVQMYLGDGAKLVRDAFELAKQKAPAIIFIDELDAIGTKRFDSDKSGDREVQRTMLELLNQLDGFSSDSRIKVIAATNRIDILDPALLRSGRLDRKIEFPLPNESAREHILQIHSRKLNHHGVNFEELARSTEDMNGAQLKAVCVEAGMLALRQNATQLTHEHFHGGILEVQARKAKEHHYFA

SEQ ID NO: 4927 - DNA, 1224 bp, Cryptococcus neoformans var. neoformans B-3501A
  CDS (1)..(1224)
atggcagtggcgactcagaagatgcccaaagctccaacatctgcccctggaggtagcatcaagacctactatcagaacaagatcgaagctgccgagcttgacatcacccgtaaaacacaaaatcttcgccgtttggaagctcagcgtaatgcccttaacgctcgagtgagactacttcgagaagaattgcaggttttgcaagagcccggaagttatgtcggtgaggtcatcaaggtgatgggtaagaagaaggttttggtcaaggtgcagcctgagggcaagtacgtggttgatttctcccccgatatccctatctctgcccttacccccaacatccgagtttcccttcgagccgattcttacctcctccattccatccttcccaacaagatcgaccccctcgtctctctcatgatggtcgaaaaggttcctgacagtacatatgagatggttggtggtttggacaagcaaatcaaggagattaaggaagttatcgagttgcctgttaagcaccccgaactatttgagagtttaggtatcgctcagcccaaaggtgtcttgctctacggtccaccgggaacgggtaagacccttctcgctcgagcggtcgctcatcacaccgactgccgattcatccgagtatctggttcggaacttgtacaaaagtacatcggtgaaggttcccgaatggtgcgagagctgttcgtgatggctcgagaacatgcgccgagtatcattttcatggatgaaatcgactctattggaggttcgcgaggagaaggagctggtaagagtggagactcggaagtgcagaggacaatgatggaattgttgaaccagttggatggatttgaggccacgaagaacatcaaggttatcatggccactaaccgtatagacattctcgattccgctctcctgcgtccgggacgtatcgatcgtaaaatcgagttccctcctcccaaccccgaggctcgaatcaccattctcaagattcactctagaaagatgtctctccagcgtggtatcaacttcaggtcattggcagaaaagatgggcaactgttcaggtgctgaagttaggggtatctgtaccgaagcgggaatgtacgcactgcgagagagaagacaatatgtcggtcaggaagactttgagatggcgatagcaaaggttttgaagaagaatgccgacaacaacatgagcgtgaacaagctcttcagttag

SEQ ID NO: 4928 - protein, 407 aa, Cryptococcus neoformans var. neoformans B-3501A
MAVATQKMPKAPTSAPGGSIKTYYQNKIEAAELDITRKTQNLRRLEAQRNALNARVRLLREELQVLQEPGSYVGEVIKVMGKKKVLVKVQPEGKYVVDFSPDIPISALTPNIRVSLRADSYLLHSILPNKIDPLVSLMMVEKVPDSTYEMVGGLDKQIKEIKEVIELPVKHPELFESLGIAQPKGVLLYGPPGTGKTLLARAVAHHTDCRFIRVSGSELVQKYIGEGSRMVRELFVMAREHAPSIIFMDEIDSIGGSRGEGAGKSGDSEVQRTMMELLNQLDGFEATKNIKVIMATNRIDILDSALLRPGRIDRKIEFPPPNPEARITILKIHSRKMSLQRGINFRSLAEKMGNCSGAEVRGICTEAGMYALRERRQYVGQEDFEMAIAKVLKKNADNNMSVNKLFS

SEQ ID NO: 4929 - DNA, 1218 bp, Cryptococcus neoformans var. neoformans B-3501A
  CDS (1)..(1218)
atgtcagccgaagcatcaacttctcagcaagtagtcgctcctcagggaatggccccggaaaagtaccaggcgatcaacgcttaccgtgataaagtcaaggagcacagtcgattatctgagcagctcaagaatgtccgtttaaacatccggactcttggaaacgactatgacaagacggaagacgacatcaaggcgcttcaaagtgtgggtcaaatcatcggtgaagtattgaaacagcttgacgatgaacgattcatcgtcaaggcatcttctgggccccgatacgtcgtctcctaccgacccactttacccgtccacaagctcaaacccaccacccgagtctccctcgacatgacaaccctaaccataatgcgtatcctcccccgtgaagtcgaccctatggtttacaacatgtctcttgaagatcccggatcggcttcttttgccggcatcggtggtttgggcgaacaagtgagagagttgagagaggttatcgagttgcctctgatgaatcccgaattgttcgagcgagtgggtatcaacccgcccaagggtgtgttgctctacggtcctcctggtacaggaaagacactcctcgcaagagctgtagctgctactctgaataccaactttttaaaagttgtctcttcagccattgtcgacaagtacattggtgaatcagcacgtcttatccgagaaatgtttgcctatgccagagaacacgagccatgtgtcatttttatggacgaaatcgatgctatcggagggaggaggttctcacaaggaacaagtgcggatcgagagatccaacgtacccttatggaacttctcaaccaaatggacggttttgaatctcttggtcgcaccaaaatcattatggccaccaatcgtcccgacacgctcgaccccgccctcctccgtcccggccgtctcgatcgaaagattgagattccccttcctaacgagcaaggtcggttggagattttgaaaattcatgcgaaaaaggtgaacaagagtggggatattgattatgaggcaattgtgaaattgagtgatgggtttaatggtgctgatttgaggaatgtttgtaccgaagccggcatgtttgctatccgagatgatagggatgctgtggtccaagaagactttatgaaggctgtcaggaaactaaacgaggcaaagaaacacgagactactatggattatactgccatataa

SEQ ID NO: 4930 - protein, 405 aa, Cryptococcus neoformans var. neoformans B-3501A
MSAEASTSQQVVAPQGMAPEKYQAINAYRDKVKEHSRLSEQLKNVRLNIRTLGNDYDKTEDDIKALQSVGQIIGEVLKQLDDERFIVKASSGPRYVVSYRPTLPVHKLKPTTRVSLDMTTLTIMRILPREVDPMVYNMSLEDPGSASFAGIGGLGEQVRELREVIELPLMNPELFERVGINPPKGVLLYGPPGTGKTLLARAVAATLNTNFLKVVSSAIVDKYIGESARLIREMFAYAREHEPCVIFMDEIDAIGGRRFSQGTSADREIQRTLMELLNQMDGFESLGRTKIIMATNRPDTLDPALLRPGRLDRKIEIPLPNEQGRLEILKIHAKKVNKSGDIDYEAIVKLSDGFNGADLRNVCTEAGMFAIRDDRDAVVQEDFMKAVRKLNEAKKHETTMDYTAI

SEQ ID NO: 4931 - DNA, 1245 bp, Cryptococcus neoformans var. neoformans B-3501A
  CDS (1)..(1245)
atggaagagatcggcattgacctcaaaatggaggatccctccctcccagctcaaatctcggagaagcaaaatctcctcaactctctgcctagtggcagtgaagaactctacagtacttggaagaggcttgaagcccatcgagagtttttacagctccaagaggagtacattcgtgacgagacccagaacctgagaagagaacttttgagggcacaggaagaagtcaagcgaattcaatctgttccattggtcattggccaattcctcgagcccgttgatgaacgacgagccattgttggaagtacaactggctccaattatgttgtccgaatcctttccactctggatcgtgaacttctcaaaccatcttcttctgtggctcttcaccgccactcaaatgctctggtagatattctcccaccagaagcagattcatctattgcgatgttgggagcggatgaaaagccggacgtgaagtactcggacattggtggcctggattcacaaaagcaggaaatcagggaggcggtcgagttgccacttgtacaacaagacctgtacaggaagatcggaatagatccacctagaggcgtgctgctctatggtcctccaggtactggtaagactatgcttgttaaggctgttgccaacgcaaccaaggccgcattcatccgtgtagttggctccgaatttgtgcagaagtatctgggtgaaggtcctcgtatggtccgagacgtttttcgattggcccgagaaaactccccatgcatcatctttatcgatgaagttgacgccattgccacaaagcgtttcgatgctcaaaccggttcggatcgtgaagtgcagcgtatcttgatcgagctacttacccaaatggacgggttcgatcaacaaaccaacgtcaaggtcattatggccaccaaccgagcggatactcttgaccctgcgttgcttcgtcctggtcgtttggacaggaagattgagatgcccaatccctctagacgtgagaggcgcttgattttccagaccgtcacttctaaaatgaatctgggtcccgacgtcgaccttgaggattacgtgtcccgaccggacctgctcagttctgctcaaattgcctccatctgtcaagccgccggtctccaagctgtgcgaaagaaccgatatgtcattttgcccattgattttgaggaagcctggaagtctgtcgtcaagcgtaacgacgagactcacgagttttatcggtaa

SEQ ID NO: 4932 - protein, 414 aa, Cryptococcus neoformans var. neoformans B-3501A
MEEIGIDLKMEDPSLPAQISEKQNLLNSLPSGSEELYSTWKRLEAHREFLQLQEEYIRDETQNLRRELLRAQEEVKRIQSVPLVIGQFLEPVDERRAIVGSTTGSNYVVRILSTLDRELLKPSSSVALHRHSNALVDILPPEADSSIAMLGADEKPDVKYSDIGGLDSQKQEIREAVELPLVQQDLYRKIGIDPPRGVLLYGPPGTGKTMLVKAVANATKAAFIRVVGSEFVQKYLGEGPRMVRDVFRLARENSPCIIFIDEVDAIATKRFDAQTGSDREVQRILIELLTQMDGFDQQTNVKVIMATNRADTLDPALLRPGRLDRKIEMPNPSRRERRLIFQTVTSKMNLGPDVDLEDYVSRPDLLSSAQIASICQAAGLQAVRKNRYVILPIDFEEAWKSVVKRNDETHEFYR

SEQ ID NO: 4933 - DNA, 1362 bp, Encephalitozoon cuniculi GB-M1
  CDS (1)..(1362)
atggctcccatctgcaaacttcagtgggagatggcggcctgcacaggcgacgagtcatcagggtgttcgactctgacatctatatccatgattgcattctccggggcctgtgatccttctgctcttataaaatcgatttgtttgttgaatgaaaatccagtgatcactttaatcccttgtaggatggcggaagggttttgcaaaaacttctacagcaacaagctggatcatctggaggtgcagatagcaaagaagaccaagatacttcgtgtattggaacaaaagcgtgctgagttgaatagaagggttagatttcttagagaagagatatccatcgttcaggagcccagctccaatgttggagtggttgtggaaaaaatgggaaagatgcaggttctggtgaaaacaaatcctgatggtaagtatctagtgaaggtggagcctggagtaaactatgatgaactcaaggctggcgtaagggttgctctgcgtagcgactcatatgatgtccacaggatacttcccacaaaggtggatccgcttgtgtcacttatgatggttgaaaaggttcccgactcgacgtatcaaatgataggaggccttgacgaacagatcaaagagattagggaggtcatcgagcttccaatcaagcatccagagttattcgagaatcttgggatagcgcagccaaagggagtacttttatatgggcctcccggaactggcaagactttactggcaagagccgtggctcatcatacacaatgcaagttcataagggtctctggatctgagctggttcaaaagtacattggagaggggtctaggctggtgagggagctttttatcatggctagagagcatgcaccgtctattatattcatggatgagatcgactccatcgggtccacaaggggagactccaacaaagggagtgacagtgaggtccaacgaaccatgcttgagctactcaatcaactcgacggattcgagtcgcacaacaacatcaaggttatcatggctaccaatagaatcgacattctcgatcctgccctgttgaggactggtagaattgataggaagattgagttccccccgccaaacgaatctgcaagacttgagatcctgaaaatccactcgagaaagatgaatcttaccaagggaattgatcttgagaccatagcaagcaagatggttggatgttctggggcagaagttaaggccgtatgtacagaggctggaatgtatgctttgagggagagaagagttcatgtgacgcaggaagactttgaaatggcagtccataaggtattgaagaagactggggatctgaactctgacctcagaaagcttctaaaataa

SEQ ID NO: 4934 - protein, 453 aa, Encephalitozoon cuniculi GB-M1
MAPICKLQWEMAACTGDESSGCSTLTSISMIAFSGACDPSALIKSICLLNENPVITLIPCRMAEGFCKNFYSNKLDHLEVQIAKKTKILRVLEQKRAELNRRVRFLREEISIVQEPSSNVGVVVEKMGKMQVLVKTNPDGKYLVKVEPGVNYDELKAGVRVALRSDSYDVHRILPTKVDPLVSLMMVEKVPDSTYQMIGGLDEQIKEIREVIELPIKHPELFENLGIAQPKGVLLYGPPGTGKTLLARAVAHHTQCKFIRVSGSELVQKYIGEGSRLVRELFIMAREHAPSIIFMDEIDSIGSTRGDSNKGSDSEVQRTMLELLNQLDGFESHNNIKVIMATNRIDILDPALLRTGRIDRKIEFPPPNESARLEILKIHSRKMNLTKGIDLETIASKMVGCSGAEVKAVCTEAGMYALRERRVHVTQEDFEMAVHKVLKKTGDLNSDLRKLLK

SEQ ID NO: 4935 - DNA, 1179 bp, Tribolium castaneum
  CDS (1)..(1179)
atgacacaaactgagcccgaacgcgagaaaagcctccaggaataccggaaaaaacttgtggaacacaaagaagtcgagtctcgcttgaaagagatgcgagaacagttaaaagacctaacaaaacaatacgacaagtcagagaatgaccttaaggcgctgcaaagcatgggccaaattgttggcgaggttttgaaacagctaactgaggagaaatttattgttaaggcaacgaatggcccccgttacgtggtgggctgtcgccggcaacttgataagaccaagttgaaagcagggactcgtgttgctctcgacatgaccacgttgacaataatgcgttatttgccccgagaagtcgacccccttgtttacaacatgagtcatgaggaccccggcgatgtcacatactcggcaattggtggtttgtccgagcaaattcgcgagctccgtgaagtcatagagttgcccctcatgaaccccgaactgttcatgagggtgggcataacccccccgaaaggttgtctcctgtacggccccccaggcactggcaaaaccctcctagcccgggctgtggcctcacagctggacgcaaatttcctcaaagttgtctcaagtgctatcgttgataaatacattggagagtcggctcgactcattcgagaaatgtttaattatgcgaaagatcatcagccttgcattattttcatggatgagatcgatgctattgggggtcggaggttttccgaggggacgtcagctgatcgggaaattcagcggactttgatggagttgttgaatcagatggatgggtttgattctcttggtcaagttaaaatgattatggccacgaataggcccgatactttggatcctgctttgttgcgtccaggtcgtctggatcgtaaaattgaaatcccgcttcctaatgaacaagcccgacttgaaattttgaaaatccatgctgggcctatagcgaaacatggggaaattgattatgaagcgattgttaagctgtctgacacgttcaatggcgctgacttaagaaacgtatgcactgaggctggtttgtttgccattcgatctgaacgggaatacgtaatccaagaagactttatgaaggctgtcaggaaggtcgccgacaacaaaaaattagagagtaaacttgattataaaccagtttaa

SEQ ID NO: 4936 - protein, 392 aa, Tribolium castaneum
MTQTEPEREKSLQEYRKKLVEHKEVESRLKEMREQLKDLTKQYDKSENDLKALQSMGQIVGEVLKQLTEEKFIVKATNGPRYVVGCRRQLDKTKLKAGTRVALDMTTLTIMRYLPREVDPLVYNMSHEDPGDVTYSAIGGLSEQIRELREVIELPLMNPELFMRVGITPPKGCLLYGPPGTGKTLLARAVASQLDANFLKVVSSAIVDKYIGESARLIREMFNYAKDHQPCIIFMDEIDAIGGRRFSEGTSADREIQRTLMELLNQMDGFDSLGQVKMIMATNRPDTLDPALLRPGRLDRKIEIPLPNEQARLEILKIHAGPIAKHGEIDYEAIVKLSDTFNGADLRNVCTEAGLFAIRSEREYVIQEDFMKAVRKVADNKKLESKLDYKPV

SEQ ID NO: 4937 - DNA, 1215 bp, Tribolium castaneum
  CDS (1)..(1215)
atgaccgtcataaataagatggaagtggacggggggcccaagggagagggcttccggtcgtattacataacgaaaatcgaggaattgcaactgattgtggccgaaaaaagccagaatttgaggcgtctccaagcgcaaagaaacgagctcaatgctaaagtgaggatgttacgagaggaactaatgctgctccaagaacagggaagttacgtgggcgaggttgttaaacccatggataagaaaaaagtcctagttaaagtacaccctgaaggtaaatttgtggttgatattgacaaaaacatcgacattaacgacgtgactcccaattgtcgcgtcgccctacgtaatgagagctacaccctgcacaaaattttgcccaacaaggtcgaccctctggtatccctaatgatggtggaaaaagtccccgactcgacgtacgaaatggtcggcggtttggacaaacagatcaaagagatcaaagaagtgattgaactcccagtgaaacacccggaattgttcgacgctttggggatcgctcagcccaagggagtgctcctgtacggccctccgggcaccggaaagacgctcctggcccgagctgtggcccaccacaccgaatgcacctttatccgggtttctggctcggaattggtccagaaattcatcggggaagggtcgcgaatggtgcgcgaattgttcgtaatggcccgagaacacgccccttcgatcatctttatggacgagattgattcaatcgggtcgtcgaggattgaatcgggctcagggggcgattctgaagtccaacgaacaatgttggaattgttgaatcaattggacgggtttgaagcaacgaaaaatatcaaagttattatggcgaccaatcgaattgatattttggatccggcactcttaaggccggggcgtattgatcggaaaattgagtttccgccaccgaatgaagaggcgcggcttgatattttgaaaatacattcgagaaaaatgaatctaacacgtgggattaatctgaggaaaatcgcagagctgatgccgggcgccagtggggccgaagtcaagggtgtctgcactgaggccgggatgtacgccttaagagagcgccgcgtccacgtgactcaggaggacttcgaaatggccgtagccaaagtgatgcaaaaggattcagaaaagaacatgtcgattaaaaaattgtggaaataa

SEQ ID NO: 4938 - protein, 404 aa, Tribolium castaneum
MTVINKMEVDGGPKGEGFRSYYITKIEELQLIVAEKSQNLRRLQAQRNELNAKVRMLREELMLLQEQGSYVGEVVKPMDKKKVLVKVHPEGKFVVDIDKNIDINDVTPNCRVALRNESYTLHKILPNKVDPLVSLMMVEKVPDSTYEMVGGLDKQIKEIKEVIELPVKHPELFDALGIAQPKGVLLYGPPGTGKTLLARAVAHHTECTFIRVSGSELVQKFIGEGSRMVRELFVMAREHAPSIIFMDEIDSIGSSRIESGSGGDSEVQRTMLELLNQLDGFEATKNIKVIMATNRIDILDPALLRPGRIDRKIEFPPPNEEARLDILKIHSRKMNLTRGINLRKIAELMPGASGAEVKGVCTEAGMYALRERRVHVTQEDFEMAVAKVMQKDSEKNMSIKKLWK

SEQ ID NO: 4939 - DNA, 1296 bp, Methanosarcina barkeri str. Fusaro
  CDS (1)..(1296): transl_table=11
atgacggaaagtaccaaaagtaaggatgaaagcatgcgcagtcaccttggtaagcccggacctgtgtatgacggaatcgagcctggagagctgggggaagtaactgaaagcgtccaggaccgaatgaggcaacttgaaagccgaaacagttatctggaagagcagtgcagccagattgaatccgaaaaacgttatctagaaaaccaaaagataaagtacgaacgagagatacgaaagctgcagtctgaactcgatcggatgaagacctctccgctcattattggtacggtcattgatgtaattaagaatgatagaataattgtccgaagcagtaacggacctcagtttctggttaatgtctcacaatatattgatgagaaaaaactgcttccaggagcaaaggttgccctgaaccagcatacgcttgctattgccgaggttattccttctacggaagaaccttttgttgctgcaatggaagtcctcgaaagcgtagaagtggactatgaccagatcggcggtctcgatgagcaaatacaggaacttcaggaagctgtcgaacttcctctcattgagccggaacgctttgctcggataggtatcgatcctcctaagggagttcttctttatggacttccgggaacaggtaaaacactgcttgcaaaagccgtggctcacagaaccaatgcaacttttatcagagttgtaggctctgagctcgtgcaaaagtacattggggacggttccaaactcgtaagagaaatcttcgaaatggcccggaaaaaggccccgagtattattttcattgatgagctggactcaattgctgcaaggcgtttgaatgaaactactggagcagaccgtgaggttcagaggacgcttatgcagctgctggcagagatggatggctttgacaaaagaaaaaatatcaggattattgcagcaacaaaccgtcctgatgtccttgacccggcaattctcaggccaggtcgatttgacaggcttgtccatgtccctatgcccggagtagaggccagaggaaagattctcaaaatccactgtgggaaaatgactcttgcaggagatattgattttaagaggcttgcaaaagctaccgaaggaatgagtggagcagacctgaaggcaatcgccaccgaagcaggtatgtttgcggtcaggaaaaacaaagaactgattgaaatggaagatttcctcgaagcagtggataaagtctctatggctgcagatacgcagaaaatgatgcctacaagtctccctgaaactatgttcgtgtaa

SEQ ID NO: 4940 - protein, 431 aa, Methanosarcina barkeri str. Fusaro
MTESTKSKDESMRSHLGKPGPVYDGIEPGELGEVTESVQDRMRQLESRNSYLEEQCSQIESEKRYLENQKIKYEREIRKLQSELDRMKTSPLIIGTVIDVIKNDRIIVRSSNGPQFLVNVSQYIDEKKLLPGAKVALNQHTLAIAEVIPSTEEPFVAAMEVLESVEVDYDQIGGLDEQIQELQEAVELPLIEPERFARIGIDPPKGVLLYGLPGTGKTLLAKAVAHRTNATFIRVVGSELVQKYIGDGSKLVREIFEMARKKAPSIIFIDELDSIAARRLNETTGADREVQRTLMQLLAEMDGFDKRKNIRIIAATNRPDVLDPAILRPGRFDRLVHVPMPGVEARGKILKIHCGKMTLAGDIDFKRLAKATEGMSGADLKAIATEAGMFAVRKNKELIEMEDFLEAVDKVSMAADTQKMMPTSLPETMFV

SEQ ID NO: 4941 - DNA, 1281 bp, Methanococcoides burtonii DSM 6242
  CDS (1)..(1281): transl_table=11
atgacagaaacgatcgatgatgagccaagaagcaataattatagcttcagtggcattggtaatggggaacttgtttcaaaaagcgatgaggatttttcaaaatatctgctggataggatgaaacagcttgaatcgcgaaacaatctcctgaaagagcaatatgaccagatggaatcagataagcgttatattgaatcacaaaagcttaagtatgaacgagagacgcaccggcttcagtcggaaattgagaggttaaagtcccctcctcttgtagttgcaagcgtggtggatatttttgatgacgataaagctctgatcaggagcagtacaggtcctcagttccttgtgaatgtttcccaggacttcgaggatgatgatctgctagtcccgggggcaagggtggggcttaatcagcagactctggcagtggtcgatattatccccgaatcagatgaaccgctcattacggctatggaggttatcgattcacaggaagttgactattcgcaggtaggtggtctggaccaacagatacgggagataagcgaatctgtagaattgccgatcacaaaaccggaagcttttaagcgcattggtataacccctcctaaaggagtcctgcttttcggaccgcctggtacaggaaaaacattgcttgccaaagcggtggctcacagaacgaatgctacttttattagggtggtcggttctgaacttgtgcagaagtatattggcgatggcgcaaagcttgttcgtgatatcttcgagatggcaaggaagaaagcacctgcaatcatctttatcgatgaactggatgcgattgcagcgacacgtctgggggatacgaacggtgcggacagggaggttcaaaggacccttatgcaacttcttgctgagatggatggctttgacaacagaggtgatgtacgcataattgctgctaccaacagacctgacgttctcgatccggcaattgtaaggccgggcaggtttgaccgtatcatcgagataccattacctgatcaggatggtcgtgaaacgatcttccttattcatatggatatgctaaacattggtagcgatgtagatgtcaaaaagctggcctctcttacagaaggggcaagtggtgctgatatcggggcaatagtcatggaagctggtatgcttgctgtacgcaatgatagtgatcacattggcatgtctgacctgcttgatgcggttacaaaggtcatggtccccaaagagaacaatctcgatcattcggagaacatgttctggtga

SEQ ID NO: 4942 - protein, 426 aa, Methanococcoides burtonii DSM 6242
MTETIDDEPRSNNYSFSGIGNGELVSKSDEDFSKYLLDRMKQLESRNNLLKEQYDQMESDKRYIESQKLKYERETHRLQSEIERLKSPPLVVASVVDIFDDDKALIRSSTGPQFLVNVSQDFEDDDLLVPGARVGLNQQTLAVVDIIPESDEPLITAMEVIDSQEVDYSQVGGLDQQIREISESVELPITKPEAFKRIGITPPKGVLLFGPPGTGKTLLAKAVAHRTNATFIRVVGSELVQKYIGDGAKLVRDIFEMARKKAPAIIFIDELDAIAATRLGDTNGADREVQRTLMQLLAEMDGFDNRGDVRIIAATNRPDVLDPAIVRPGRFDRIIEIPLPDQDGRETIFLIHMDMLNIGSDVDVKKLASLTEGASGADIGAIVMEAGMLAVRNDSDHIGMSDLLDAVTKVMVPKENNLDHSENMFW

SEQ ID NO: 4943 - DNA, 1248 bp, Methanococcoides burtonii DSM 6242
  CDS (1)..(1248): transl_table=11
atgtccgacgtaagtgcaggatcaacaacagaaaagaagttctctgatatggattccaatggcgaggaacacaatactgatgaaatacaggaagtggacatccagaaagtgatcagtgagaacgaccttctgaaggtccagaacgaaacaatgaaagcaaaacttcttgaaaccagcatgatggtgaacaagtacctgtcagagatggaccagcttaaggaccagcttgatcacttgacgacaccaccactgttcattgccagtgtcatggaagtagaggatgacatggcactcctgcgccagcatggtaataatcaggaagttatgacgaggataccacctgaaatggaaggaaccatcggaccaggcatgcgcgtaagcatcaatgctgcattcgccataatcgcgattatcagtagagcagccgatgttcgggcacagatgatggaacttatcgattcacccggaatagattatgatatgataggtggccttgatgatgtgctcaaagaggtcattgaatcagttgaactaccacttacagagccggaactgtttgagaacataggcattgaaccaccaagtggcgttcttatgtatggcagtcccggaacaggaaagacacttattgcaaaagcagttgcctcaagagcacatgcaacattcattcgcatgtcaggctcagatcttgtacagaagttcattggagaaggtgcaaggctcgttaaagatgtattccagcttgccagagaaaagtccccatctatcctgttcattgatgagatcgatgcagttggtggaatgagaacacacgatggaacgaccggttctgcagaagttaaccgtacgatgcttcaacttttggctgagatggatggttttgaccccagtggaaatgtgaagataatagctgcgaccaacaggatagacctgcttgacccagcacttttgcgcccaggaaggtttgaccgtataatcgagatacccatacctgatgaaaaggcaagagaagaaattttgaagatccatacacggaagatgaatcttgaaaaggatatcgaccttgccaagatcgcaaatatgaccgatggccttagtggtgcagaccttaatgtaatagttaaagaggcaggcatgttcgtcctcagaagaagaggagacatgatcaaaatgcaagatttcctcgaggcgttcgaaaaagtggtttccgaagaagaggtcaacacaccggccggaatgttcgcataa

SEQ ID NO: 4944 - protein, 415 aa, Methanococcoides burtonii DSM 6242
MSDVSAGSTTEKKFSDMDSNGEEHNTDEIQEVDIQKVISENDLLKVQNETMKAKLLETSMMVNKYLSEMDQLKDQLDHLTTPPLFIASVMEVEDDMALLRQHGNNQEVMTRIPPEMEGTIGPGMRVSINAAFAIIAIISRAADVRAQMMELIDSPGIDYDMIGGLDDVLKEVIESVELPLTEPELFENIGIEPPSGVLMYGSPGTGKTLIAKAVASRAHATFIRMSGSDLVQKFIGEGARLVKDVFQLAREKSPSILFIDEIDAVGGMRTHDGTTGSAEVNRTMLQLLAEMDGFDPSGNVKIIAATNRIDLLDPALLRPGRFDRIIEIPIPDEKAREEILKIHTRKMNLEKDIDLAKIANMTDGLSGADLNVIVKEAGMFVLRRRGDMIKMQDFLEAFEKVVSEEEVNTPAGMFA

SEQ ID NO: 4945 - DNA, 1281 bp, Lactuca sativa
  CDS (1)..(1281)
atgccgactgacattgaagacgagatcaaggacgagaagaatccccgccctctcgatgaagacgatatagctctcctcaagacttatggattgggaccttattccaacagcatcaagaaagctgaaaaggatgtaaaggaaatggccaaaaggatcaatgatttatgtggtatcaaggagtctgacactggtttagccacacctagccaatgggatcttgtttctgataaacaaatgatgcaagaggagcaaccacttcaggtggctagatgcacaaagataatcaatccaaacacagaagatgcaaaatacgttataaatgtcaagcaaatcgccaagtttgttgtcgggttaggtgacaaagtttcacccactgatattgaagaaggcatgcgtgttggcgttgatcgcaataaatatcagattcagattccattacctcccaagattgatccaagtgtgaccatgatgacagtggaagaaaagccagatgtcacatataacgatgttggtggatgcaaagaacaaattgaaaagatgagagaggtggttgagctaccaatgctccaccctgagaaatttgtccagcttggaatcgaccccccaaaaggtgtcctctgttatggtccacctggcactggtaaaacccttttagcaagagcagttgccaatcgaactgatgcgtgtttcatacgtgtcattggaagtgaacttgttcaaaagtatgttggtgaaggggcccgcatggttcgtgagctctttcaaatggcacgttcaaagaaagcatgcattgttttctttgatgaagttgatgcaattggtggggcccggtttgatgatggtgctggtggtgataatgaggttcaaagaaccatgcttgaaattgtcaaccaacttgatgggttcgatgcacgtggtaacatcaaagttctaatggccacaaatagaccagatacattggaccctgcattgttaagacctggaagattggataggaaagtggaatttggacttccggatatggaaagtaggactcagatattcaagattcatacacggacaatgaactgtgaaagagatgttcggtttgaacttttggctcgcctttgtccgaattctactggtgcggatatcaggagtgtgtgtacagaggctggaatgtatgcgattagagcaaggaggaagacggtgacagagaaggattttcttgatgcagtgaataaggtgattaaagggtatcagaagtttagtgctactcctaaatacatggtttataattga

SEQ ID NO: 4946 - protein, 426 aa, Lactuca sativa
MPTDIEDEIKDEKNPRPLDEDDIALLKTYGLGPYSNSIKKAEKDVKEMAKRINDLCGIKESDTGLATPSQWDLVSDKQMMQEEQPLQVARCTKIINPNTEDAKYVINVKQIAKFVVGLGDKVSPTDIEEGMRVGVDRNKYQIQIPLPPKIDPSVTMMTVEEKPDVTYNDVGGCKEQIEKMREVVELPMLHPEKFVQLGIDPPKGVLCYGPPGTGKTLLARAVANRTDACFIRVIGSELVQKYVGEGARMVRELFQMARSKKACIVFFDEVDAIGGARFDDGAGGDNEVQRTMLEIVNQLDGFDARGNIKVLMATNRPDTLDPALLRPGRLDRKVEFGLPDMESRTQIFKIHTRTMNCERDVRFELLARLCPNSTGADIRSVCTEAGMYAIRARRKTVTEKDFLDAVNKVIKGYQKFSATPKYMVYN

SEQ ID NO: 4947 - DNA, 1281 bp, Lactuca sativa
  CDS (1)..(1281)
atgccgactgacatagaagatgagatcaaggacgagaagaaccctcgacctcttgatgaagacgacatcgctctgctcaaaacttatggactcgggccttattccaatagcatcaagaaagcagagaaggatgtgaaagaaatgtccaaaaggatcaatgatctatgtggtattaaggagtctgacactggtttagctgcacctagccaatgggatcttgtttctgataaacaaatgatgcaagaggaacaacctcttcaggtagcaagatgcacaaagattatcaaccccaacactgaagatgccaaatacgttatcaatgtcaaacaaatcgcaaagtttgttgttggattgggagacaaagtttcacccactgatattgaagaaggcatgcgtgttggtgttgacagaaacaaataccagattcagattcctttacctcccaagattgaccccagtgtaacaatgatgacagtggaagaaaagccagatgtcacatacaatgatgttggtggatgtaaagaacaaattgagaaaatgagagaggttgttgagttacccatgctccaccccgagaaatttgtaaaacttggaattgaccctccaaaaggtgtcctctgctatggcccacctggaactgggaaaacacttttagcaagagcagttgctaatagaactgatgcgtgttttattcgtgtaattggaagtgaacttgttcaaaagtatgttggtgaaggtgctcgcatggttcgcgaattattccagatggcaagatccaaaaaggcttgcattgttttctttgatgaagtggatgcaattggtggtgctagatttgatgatggggcaggtggggacaatgaggttcaaagaaccatgcttgaaattgtgaatcagctcgatggatttgatgctcgtggtaacattaaagttctcatggctacaaatagacctgacacattggaccctgcgcttttgcgacctgggagactggataggaaagtggagtttgggcttccggatatggaaagtaggacacagattttcaagattcatacacggactatgaactgtgaaagggatgttcggtttgagcttttggctcgtctttgcccgaattctacgggtgctgatataaggagtgtgtgtactgaggctggaatgtatgcaattagagcaagaaggaagacagtgactgagaaggattttcttgatgcggttaataaagtgattaaggggtatcagaagtttagtgccacacccaagtacatggtgtacaactaa

SEQ ID NO: 4948 - protein, 426 aa, Lactuca sativa
MPTDIEDEIKDEKNPRPLDEDDIALLKTYGLGPYSNSIKKAEKDVKEMSKRINDLCGIKESDTGLAAPSQWDLVSDKQMMQEEQPLQVARCTKIINPNTEDAKYVINVKQIAKFVVGLGDKVSPTDIEEGMRVGVDRNKYQIQIPLPPKIDPSVTMMTVEEKPDVTYNDVGGCKEQIEKMREVVELPMLHPEKFVKLGIDPPKGVLCYGPPGTGKTLLARAVANRTDACFIRVIGSELVQKYVGEGARMVRELFQMARSKKACIVFFDEVDAIGGARFDDGAGGDNEVQRTMLEIVNQLDGFDARGNIKVLMATNRPDTLDPALLRPGRLDRKVEFGLPDMESRTQIFKIHTRTMNCERDVRFELLARLCPNSTGADIRSVCTEAGMYAIRARRKTVTEKDFLDAVNKVIKGYQKFSATPKYMVYN

SEQ ID NO: 4949 - DNA, 1341 bp, Oryza sativa subsp
  CDS (1)..(1341)
atggcgacggcggacgtctcgcggccctcctcctccgcgctgacggcggcggctgcgggggcagacggccacggggcgaaggggagcgccttccgcggcgacgggctgcggccgtactaccagtcgcgcatccacgacctggagctccagatccgccaagggacggacaacctcagccgcctcgaggcccagcggaacgtcctcaattcccaagttataacgctgggggaagagttgaaggtgctccatgaaccgggctcatatgttggtgaggttgtcaaggttatgggcaagtccaaggttctagtgaagtgctgtgttttagtatttgtgcacatgagtgttgctttggagataatcggggaagataatattttgttggtgcacccagaaggaaaatatgttgttgatgtcgataaaagtattgatattacaaagctctcgccttcaacaagagttgctcttcgaaatgacagctatatgcttcatcttatcctgcccagcaaagtcgatccattggttaatcttatgaaggttgagaaggttcctgattctacttatgatatgattggcggccttgatcagcagattaaggagatcaaagaggttattgagcttcccattaagcatcctgagctgtttgaaagtcttggaattgcccagccaaagggtgtccttctttacgggcctccgggtacaggaaaaacgctactagctcgggcagttgctcatcacaccgactgtacctttattagggtgtcaggttccgagttggttcagaagtatattggagagggttccagaatggttcgtgaactatttgtgatggccagagagcatgcaccatccataatctttatggatgaaatagactccattggatctgctagaatgcagtcaggatctgggggtggtgatagtgaggttcaacgcactatgcttgagcttctgaatcaacttgatggctttgaagcatcaaacaaaattaaggttcttatggcgacaaataggatggatattttggatcaagctctcctgaggcctggtcgcattgataggaagattgaatttccaaatccgaatgaagattcccgctttgatatcttgaagattcattcaagaaaaatgaacttgatgcgtggcattgatctgaaaaagattgcagagaagatgaatggggcatctggagcagagcttaaggcggtctgcacggaagcaggaatgtttgcccttcgcgagagaagggttcatgtcaaccaggaggatttcttgatggcggtggcgaaggtgatgaagaaggataccgaaaagaacatgtccctgcgcaagctctggaagtga

SEQ ID NO: 4950 - protein, 446 aa, Oryza sativa subsp
MATADVSRPSSSALTAAAAGADGHGAKGSAFRGDGLRPYYQSRIHDLELQIRQGTDNLSRLEAQRNVLNSQVITLGEELKVLHEPGSYVGEVVKVMGKSKVLVKCCVLVFVHMSVALEIIGEDNILLVHPEGKYVVDVDKSIDITKLSPSTRVALRNDSYMLHLILPSKVDPLVNLMKVEKVPDSTYDMIGGLDQQIKEIKEVIELPIKHPELFESLGIAQPKGVLLYGPPGTGKTLLARAVAHHTDCTFIRVSGSELVQKYIGEGSRMVRELFVMAREHAPSIIFMDEIDSIGSARMQSGSGGGDSEVQRTMLELLNQLDGFEASNKIKVLMATNRMDILDQALLRPGRIDRKIEFPNPNEDSRFDILKIHSRKMNLMRGIDLKKIAEKMNGASGAELKAVCTEAGMFALRERRVHVNQEDFLMAVAKVMKKDTEKNMSLRKLWK

SEQ ID NO: 4951 - DNA, 1347 bp, Oryza sativa subsp
  CDS (1)..(1347)
atggcgcttcgaccaccgcggccgtgtccggccggcgtgcagcagcggcagctcgacgtcgacagcgccggcaacgccaagacttccccggaacagaagctcgagttgctggacctgcaggaggaggacgacgagctcatcttcctcgacgccgacgacgaggagggacgccagctgcgcgagaagctggagtcgctggagcgggagttctgcctgctggatgagcagcgggacaacgcgctgttccagattcacgtgctggaagagacggtgcgcttccgcgaggagctcgtcaggtggctgacggcggtcacccccctcgtcgtcgcccagctcgacgaggtcgtcgacgagcaccacgccgtcgtgacgctgggcgacggatgcgagaggaagatgtgcgtcggcgtcgccggctcgttcgaccgcggcctcctcaagccctcggcgaacgtcgcgctgaacggccggtcgctcgcgctcgtcggcgtgctcccctccgacgtcgccggctgctcggccgcgcggttcctcgtggcggacgccgacaagccgggcgtcgcctacggcgacatcggcgggtgcgaggcgcagaagcgggaggtgcgcgaggccgtggagctgccgctgacgcacccggagctcttcgccgccgccggcgtcgacccgccgcgcggcgtgctcctgcacggcccgccgggcaccgggaagaccatgctcgccaaggccgtcgcgcgcgagacctcggcggcgttcttccgcgtgaacgccgccgagctcgcgcggcacgacggaccgagggtggtgcgcgacctgttccggctcgccagggacagggcgccggccatcgtcttcatcgacgaggtggacgcgatcgcggcggcgcggcaaggcggcgacggcgacgacggcggcgccaggcgccacgtgcagcgcgtgctgattgagctgctcacccagatggacggcttcgacgagtccaccaacgtgcgggtgatcatggcgacgaaccgcgccgacgacctggacccggcgctgctccggccggggcggctggaccgcaaggtggagttcaccgcgcccgagagcccggaggagaagcggctggtgctgcagacgtgcacggcggggatgagcctggacggcgacgtcgacctcgacgccctggcggcgcggcgcgacaagctcagcgccgccgagatcgccgccgtgtgccgcgaggccggcatgcaggccgtgcgcgacaggcggggcgcggtgacggcggacgacttcgacaagggatacctcgccgtcgtcggcaagaagcccggcgacgtcgccaccgagttccacttctacaactga

SEQ ID NO: 4952 - protein, 448 aa, Oryza sativa subsp
MALRPPRPCPAGVQQRQLDVDSAGNAKTSPEQKLELLDLQEEDDELIFLDADDEEGRQLREKLESLEREFCLLDEQRDNALFQIHVLEETVRFREELVRWLTAVTPLVVAQLDEVVDEHHAVVTLGDGCERKMCVGVAGSFDRGLLKPSANVALNGRSLALVGVLPSDVAGCSAARFLVADADKPGVAYGDIGGCEAQKREVREAVELPLTHPELFAAAGVDPPRGVLLHGPPGTGKTMLAKAVARETSAAFFRVNAAELARHDGPRVVRDLFRLARDRAPAIVFIDEVDAIAAARQGGDGDDGGARRHVQRVLIELLTQMDGFDESTNVRVIMATNRADDLDPALLRPGRLDRKVEFTAPESPEEKRLVLQTCTAGMSLDGDVDLDALAARRDKLSAAEIAAVCREAGMQAVRDRRGAVTADDFDKGYLAVVGKKPGDVATEFHFYN

SEQ ID NO: 4953 - DNA, 1416 bp, Oryza sativa subsp
  CDS (1)..(1416)
atggggcagggcactcccggcgggatggggaagcagggcggcctccccggcgatcgcaagccgggcgacggcggcgccggcgacaagaaggaccgcaagttcgagccccccgccgcgccgtcccgcgtcggccggaagcagcggaagcagaaggggcccgaggcggcggcgcgcctgcccgccctggagcgggtcaaggactacctcctcatggaggaggagttcgtcgtcagccaggagcggctgcgacccagcgaggacaagacggaggaggaccgatccaaggtcgatgacctccggggcacccccatgagcgttggctcgcttgaggagatcatcgatgagagccacgccatcgtctcgtcgtccgtcgggccggaatactatgttggcatattatcattcgtcgacaaggaccagctcgagccagggtgtgccattctgatgcataacaagtgggattggaagcaccacactaacacatcagtagttcatggtttggtgattgggtcgaaaaggcaatcagatcagatggtgcacattcggtacctgcaaatggttctctctgtggttggaattttgcaagatgaggttgaccctatggtttctgtcatgaaagttgaaaaggcacctttggagtcttatgcggacatcggtggtctggatgcccaaattcaagagattaaagaggctgttgagcttcccttgactcatcctgagctatatgaggacattggaataaggcctcccaagggagtaatattatatggggaacctggcacaggcaaaactctacttgcaaaggcggttgctaattctacatcagcaacatttttgcgtgttgttgggagtgagttgatccaaaagtaccttggtgatggccccaagcttgtaagagaattgtttagggtggctgatgatctttctccgtcaattgtctttattgacgagattgatgcagtcggaacaaagaggtatgatgctcattcgggtggagagcgtgaaattcagagaaccatgttggagttgcttaatcagctggatggttttgattcaaggggagatgttaaagttattttagcaacaaatcgcattgaaagtcttgacccagctttgcttcgacctggtcggatagacagaaagattgaatttccgttaccagatattaaaaccaggaggcggatcttccagatacacacatctaagatgacattggcagatgatgttaacctagaagagtttgtgatgaccaaggatgagttttctggtgctgacatcaaagcaatatgtacggaggccggattgctcgctttaagggagcgcagaatgaaggtgacacatgccgatttcaagaaggccaaagagaaggtcatgttcaagaagaaggaaggtgtaccggaagggctttatatgtga

SEQ ID NO: 4954 - protein, 471 aa, Oryza sativa subsp
MGQGTPGGMGKQGGLPGDRKPGDGGAGDKKDRKFEPPAAPSRVGRKQRKQKGPEAAARLPALERVKDYLLMEEEFVVSQERLRPSEDKTEEDRSKVDDLRGTPMSVGSLEEIIDESHAIVSSSVGPEYYVGILSFVDKDQLEPGCAILMHNKWDWKHHTNTSVVHGLVIGSKRQSDQMVHIRYLQMVLSVVGILQDEVDPMVSVMKVEKAPLESYADIGGLDAQIQEIKEAVELPLTHPELYEDIGIRPPKGVILYGEPGTGKTLLAKAVANSTSATFLRVVGSELIQKYLGDGPKLVRELFRVADDLSPSIVFIDEIDAVGTKRYDAHSGGEREIQRTMLELLNQLDGFDSRGDVKVILATNRIESLDPALLRPGRIDRKIEFPLPDIKTRRRIFQIHTSKMTLADDVNLEEFVMTKDEFSGADIKAICTEAGLLALRERRMKVTHADFKKAKEKVMFKKKEGVPEGLYM

SEQ ID NO: 4955 - DNA, 1650 bp, Oryza sativa subsp
  CDS (1)..(1650)
atggctaatttactcggaaaaaagaattcatggctaactaaacttggaagatggatggatatttcagcgttaaatgaagtcagtggacggtccagatcgatcagaggaaagagagggcctcggactactactcctcctatatcactggttctttcttgcaaagtaagtcgaacacaaaagaaggggagaaggggaaggatagatagatcgccgccgccgccgtcgtctccgcccctctccagccaccagatccagcgaccatggggcagggcaccccgggaggcatgggcaagcagggcggcgcccccggcgaccgcaagcctggcggcgacggcgacaagaaggaccgcaagttcgagccccccgccgccccctcccgcgtcggccgcaagcagcgcaagccagaagggccccgaggcggccgctcgcctccccaacgtcgcccctctctccaagtgccgcctccgcctcctcaagctcgagcgggtcaaggactacctcctcatggaggaggagttcgtcgccgcccaggagcgcctccgccccaccgaggacaagaccgaggaggaccgatccaaggtcgacgacctccgcggcacccccatgagcgtcggatccctcgaggagatcatcgacgagagccatgccatcgtctcctcctccgtcggccccgagtactacgtcggcatcctctccttcgtcgacaaggaccagctcgagcccggctgctccatcctcatgcacaacaagatggctgtcagatgccaatgcttgtataaggctgcttttcaggttctgtctgtggtcggaattttgcaagatgaagttgatcctatggtttctgtgatgaaagtggagaaagctccgctggaatcctatgctgacattggtgggctagatgctcagatccaagaaatcaaagaggcagttgagcttcctttgacccatcctgagctatatgaagacattggcatcaggccacccaagggagtcatattatacggagaacctggaacagggaagacactacttgccaaggctgttgctaactccacatccgcaactttcttgcgtgttgttggaagtgagcttattcaaaagtatcttggtgatggtcccaaactagtcagggaactgttcagagttgctgatgagctttctccctcaatagtctttatcgatgagattgatgctgttggaacaaagaggtacgatgctcattcaggaggggagcgtgagattcagagaactatgttggagcttcttaaccagttagatggttttgactctcgtggtgatgtcaaagttatactagcaacaaatcgcatcgaaagtcttgatccagcattgctacgccctggtcgcatagatcggaagatagaatttcctctgccagatattaaaactaggcggcgcatcttccagatacacacatctaagatgacattggcagatgatgtgaacctggaagagtttgtcatgaccaaggatgagttttccggtgctgatatcaaagcaatatgtactgaagctggacttcttgctttgagagaacgccgaatgaaggtgacacatgctgacttcaagaaggcaaaggagaaggtgatgttcaagaagaaggaaggtgtgccggagggtctttacatgtga

SEQ ID NO: 4956 - protein, 549 aa, Oryza sativa subsp
MANLLGKKNSWLTKLGRWMDISALNEVSGRSRSIRGKRGPRTTTPPISLVLSCKVSRTQKKGRRGRIDRSPPPPSSPPLSSHQIQRPWGRAPREAWASRAAPPATASLAATATRRTASSSPPPPPPASAASSASQKGPEAAARLPNVAPLSKCRLRLLKLERVKDYLLMEEEFVAAQERLRPTEDKTEEDRSKVDDLRGTPMSVGSLEEIIDESHAIVSSSVGPEYYVGILSFVDKDQLEPGCSILMHNKMAVRCQCLYKAAFQVLSVVGILQDEVDPMVSVMKVEKAPLESYADIGGLDAQIQEIKEAVELPLTHPELYEDIGIRPPKGVILYGEPGTGKTLLAKAVANSTSATFLRVVGSELIQKYLGDGPKLVRELFRVADELSPSIVFIDEIDAVGTKRYDAHSGGEREIQRTMLELLNQLDGFDSRGDVKVILATNRIESLDPALLRPGRIDRKIEFPLPDIKTRRRIFQIHTSKMTLADDVNLEEFVMTKDEFSGADIKAICTEAGLLALRERRMKVTHADFKKAKEKVMFKKKEGVPEGLYM

SEQ ID NO: 4957 - DNA, 1284 bp, Pichia stipitis
  CDS (1)..(1284): transl_table=12
atgtcaaccttggaagaattggaaaacaaccatgatgactttttcgaccaggagattttgaactcggccacttccgacatcatcaaccgtaccaaactattggataacgacatcaaggtgatgagactggagtcacagcgtttaacccacgagaagacggtgatgttagagcgtatcaaggacaaccaggaaaagatcaacaataataaacagttgccttatttggttggtaacgttgtagagttacttgatcttgatgctgaaaaggaagcctcggaacaaggagctaatgtagacttagacgctgccagatctggcaagtctgccgtgatcaaaacttctacgagacagaccatcttcttgccgttgattggcctcgtagatccagccaaattgaagcccaatgacttaattggtgtcaacaaggactcgtacttgatattggatacgttgccctcggaatacgactcacgtgtcaaggccatggaagtggatgagaaacccacggaagactattcagacattggtgggttggataaacagatcgaagagctcattgaagccgtagttctccccatgaaacaggcagagaagttcaccaacctcggaattaaaccaccgaagggtgcccttatgtatggaccaccaggtacggggaagacgttgttggccagagcatgtgctgcccaatctggggctactttcttgaagttggcagctccccagttggttcaaatgttcattggtgatggtgccaagttggttcgtgatgcctttgccttggccaaagagaaggctcctacgatcatatttatcgacgaattagacgctatcggaacaaagagattcgattctgataaaagtggagacagagaagtccagagaaccatgttggagttattgaaccagttggatgggttcgattctgatgatagagtcaaggtgttggctgcaacgaatcgtgtagataccttagatcccgctcttttgagatcgggaagattggacagaaagattgaatttcctttaccttcagaagaagccagagagtcagttctaaagatccatgccagaaagttgaactgcgacaacaactcagtcaactggagagaattggccaggtccactgacgaattcaacggagcgcaattgaaggctgtcactgtcgaagcaggtatgattgcattgagaaacggcaagtctataataaagcacgaagactttgttgaggctatcggcgaagtccaggccagaaagtcgaaatcggtcaacttctacgcctga

SEQ ID NO: 4958 - protein, 427 aa, Pichia stipitis
MSTLEELENNHDDFFDQEILNSATSDIINRTKLLDNDIKVMRLESQRLTHEKTVMLERIKDNQEKINNNKQLPYLVGNVVELLDLDAEKEASEQGANVDLDAARSGKSAVIKTSTRQTIFLPLIGLVDPAKLKPNDLIGVNKDSYLILDTLPSEYDSRVKAMEVDEKPTEDYSDIGGLDKQIEELIEAVVLPMKQAEKFTNLGIKPPKGALMYGPPGTGKTLLARACAAQSGATFLKLAAPQLVQMFIGDGAKLVRDAFALAKEKAPTIIFIDELDAIGTKRFDSDKSGDREVQRTMLELLNQLDGFDSDDRVKVLAATNRVDTLDPALLRSGRLDRKIEFPLPSEEARESVLKIHARKLNCDNNSVNWRELARSTDEFNGAQLKAVTVEAGMIALRNGKSIIKHEDFVEAIGEVQARKSKSVNFYA

SEQ ID NO: 4959 - DNA, 1197 bp, Vitis vinifera
  CDS (1)..(1197)
  misc_feature (27)..(27): w is a or t
atgagcgatggagaagacgcagtgcgwcgacgtagtgtgttggcggactaccgtaaaaagctcctccaccacaaagaactcgattctagagtccgatcagtgagggagagtttacgtggtgctaagaaggagttcaacaaaacggaggatgatttgaagtctcttcagagtgttgggcagatcattggagaagttctccggcctcttgacaatgaacgcttgattgtaaaagcaagtagtggacccaggtatgtagttggctgtcgcagtaaagtggataaggaaaaactgacttctggaacaagagtggttcttgatatgacaacactcacaatcatgcgagctcttccacgtgaagttgatccagttgtttataacatgttgcacgaagatcctggtaatgtcagctactcagctgtgggtgggttatcagatcaaatccgagaactcagggaatcaattgagctacctctaatgaatcctgaactctttcttagagttggaattaaacctcccaagggtgttcttctttatgggcctcctggtactgggaagacattattagctagagcaattgccagtaatatagatgccaacttcttgaaggttgtttcaagtgcaataattgataaatacattggggaaagtgcaaggttaatacgagaaatgtttggatatgcacgtgatcaccaaccctgcattatttttatggatgagattgatgccatcggtggacgccgtttcagtgagggaacaagtgctgaccgtgaaatacaaagaacactgatggagttacttaatcagcttgatggatttgaccagcttgggaaggttaaaatgattatggcaacaaaccggcctgatgttcttgaccctgcacttcttcgtcctgggcgattagacagaaagatagagattccattgccaaatgagcaatcaagaatggaaatccttaagattcatgcggctgggattgccaagcatggcgagattgactatgaggctgttgtaaagcttgcagagggatttaatggggctgatcttcgtaatgtttgcacggaggctggaatgtctgcaattcgtgcagaacgtgattatgtcatacatgaagatttcatgaaggctgttcggaaactgaatgaagcaaagaaacttgaatctagtgctcactacaatgctgattttgggaaagactag

SEQ ID NO: 4960 - protein, 398 aa, Vitis vinifera
MSDGEDAVRRRSVLADYRKKLLHHKELDSRVRSVRESLRGAKKEFNKTEDDLKSLQSVGQIIGEVLRPLDNERLIVKASSGPRYVVGCRSKVDKEKLTSGTRVVLDMTTLTIMRALPREVDPVVYNMLHEDPGNVSYSAVGGLSDQIRELRESIELPLMNPELFLRVGIKPPKGVLLYGPPGTGKTLLARAIASNIDANFLKVVSSAIIDKYIGESARLIREMFGYARDHQPCIIFMDEIDAIGGRRFSEGTSADREIQRTLMELLNQLDGFDQLGKVKMIMATNRPDVLDPALLRPGRLDRKIEIPLPNEQSRMEILKIHAAGIAKHGEIDYEAVVKLAEGFNGADLRNVCTEAGMSAIRAERDYVIHEDFMKAVRKLNEAKKLESSAHYNADFGKD

SEQ ID NO: 4961 - DNA, 1272 bp, Vitis vinifera
  CDS (1)..(1272)
atggcatcgtcaatggttgaagacagtagtttcgaagatgaccagctcgcttctatgtccaccgacgacatcgctagggcttctcgccttctcgataacgaaatccgaattctcaaggaggagttgcagaggacgaacatggagtgggactcctataaggagaagatcaaggagaatcaggagaagatcaagctcaacaagcagcttccctacttggtcggcaacatagtcgagatcttggaaatgaacccagaggatgacgcagaggaagatggtgcaaatattgatcttgactctcagaggaagggaaaatgtgttgttttgaaaacatctacacgccagacaatctttctgcctgttgttgggctcgttgaccctgataaattaaagcctggtgatttggttggggtgaacaaagatagctacttaatcttagatactttgccatctgagtatgattctcgagtaaaggctatggaggttgatgaaaaaccaacagaagactacaatgatatcggagggctggagaagcagatccaagaattagttgaggcaattgttttgcccatgacacataaggagcggtttcagaaattaggtattcgcccacctaaaggagtgcttttgtatggacctccagggactgggaaaactctgatggcccgtgcatgcgcggctcaaacaaatgccacttttctgaagctggcaggccctcaacttgtccagatgttcattggggatggggcgaaacttgtccgtgatgcctttcagcttgctaaagagaaatctccttgcatcatttttatagatgaaattgatgccataggcacaaagcggtttgatagtgaagtgagtggagatagggaggtgcagcggacaatgttggagttattgaatcagcttgatggctttagcagtgatgatcgcataaaggtgatagcagcaacaaaccgagctgatattctggaccctgcacttatgcgatctggtcgattggatcgtaaaattgagtttccacatcccactgaagaagcaagagctcgaatcttgcagatccactcaagaaagatgactgttcatccggatgtcaattttgaagaactggctcgatccacagatgatttcaatggggcacaactgaaagctgtttgtgtagaggcgggaatgctggctcttcgtcgtgatgcaactgaggtgaaccatgaggacttcaacgaaggtataattcaagtacaggccaagaagaaatcaagcttaaattattatgcatag

SEQ ID NO: 4962 - protein, 423 aa, Vitis vinifera
MASSMVEDSSFEDDQLASMSTDDIARASRLLDNEIRILKEELQRTNMEWDSYKEKIKENQEKIKLNKQLPYLVGNIVEILEMNPEDDAEEDGANIDLDSQRKGKCVVLKTSTRQTIFLPVVGLVDPDKLKPGDLVGVNKDSYLILDTLPSEYDSRVKAMEVDEKPTEDYNDIGGLEKQIQELVEAIVLPMTHKERFQKLGIRPPKGVLLYGPPGTGKTLMARACAAQTNATFLKLAGPQLVQMFIGDGAKLVRDAFQLAKEKSPCIIFIDEIDAIGTKRFDSEVSGDREVQRTMLELLNQLDGFSSDDRIKVIAATNRADILDPALMRSGRLDRKIEFPHPTEEARARILQIHSRKMTVHPDVNFEELARSTDDFNGAQLKAVCVEAGMLALRRDATEVNHEDFNEGIIQVQAKKKSSLNYYA

SEQ ID NO: 4963 - DNA, 1338 bp, Vitis vinifera
  CDS (1)..(1338)
  misc_feature (579)..(579): r is g or a
  misc_feature (978)..(978): r is g or a
atgggtcagggagcttccggcggtttgaatcggcaaggtctgccgggcgacagaaagaacgatggcgacaagaaggagaaaaagttcgagccagcggctccgcctgccagagttggccggaagcaacgtaaacaaaaggggccggaggcagcggcgcggctgccgacggtgacgcctctgagcaagtgcaagcttaggctgctgaagctggagcggatcaaggactatcttctaatggaggaggagttcgtcagtaaccaggagaggttgaagccgcaggaggagaagactgaggaggatagatccaaggtcgatgatctgcgtggatctccgatgagtgtagggaatctggaggagctgattgacgagaaccacgccatcgtgtcgtcgtccgtgggtccggagtattatgtggggattttgtcgtttgttgataaggatcagctcgagcctggttgcgccattcttatgcacaataaggttctttctgttgttggtcttctccaagacgaagttgatccaatggtgtccgtaatgaaagttgagaaggctccattggaatcatatgctgacataggrggcttagatgcccagatacaggaaatcaaagaagcagttgaactccctctaacacatcctgaactgtatgaggacattggtatcaagcctcctaagggggtcatactatatggagagcctggaacaggaaagaccttgcttgcaaaggcagttgcaaactctacatcagcaactttcttacgtgttgttggcagtgagttaattcaaaaatatttgggagatgggccaaaattagtgagggagttatttagagttgctgatgatctctcaccttcaattgtcttcattgatgaaattgatgcagttggtacaaagaggtatgatgctcactcaggtggtgaacgtgaaatccagaggaccatgttggaactgctaaaccagttagacggttttgattcraggggagatgtcaaagtgattcttgcaacaaacagaattgaaagtttggatccagctttgcttcggcctggtcgaatagataggaagattgaattccctcttcctgacattaaaacaagaagacgcattttccagatacacacatcaaggatgacattggctgatgatgttaacttggaagaatttgttatgactaaggatgagttttctggagctgatataaaggcaatatgcactgaagctggtttgcttgctttaagagaacggcgtatgaaggtgactcatgtagacttcaagaaggcaaaggagaaggtgatgttcaagaagaaagaaggggtgccagaaggactttacatgtga

SEQ ID NO: 4964 - protein, 445 aa, Vitis vinifera
MGQGASGGLNRQGLPGDRKNDGDKKEKKFEPAAPPARVGRKQRKQKGPEAAARLPTVTPLSKCKLRLLKLERIKDYLLMEEEFVSNQERLKPQEEKTEEDRSKVDDLRGSPMSVGNLEELIDENHAIVSSSVGPEYYVGILSFVDKDQLEPGCAILMHNKVLSVVGLLQDEVDPMVSVMKVEKAPLESYADIGGLDAQIQEIKEAVELPLTHPELYEDIGIKPPKGVILYGEPGTGKTLLAKAVANSTSATFLRVVGSELIQKYLGDGPKLVRELFRVADDLSPSIVFIDEIDAVGTKRYDAHSGGEREIQRTMLELLNQLDGFDSRGDVKVILATNRIESLDPALLRPGRIDRKIEFPLPDIKTRRRIFQIHTSRMTLADDVNLEEFVMTKDEFSGADIKAICTEAGLLALRERRMKVTHVDFKKAKEKVMFKKKEGVPEGLYM

SEQ ID NO: 4965 - DNA, 1272 bp, Vitis vinifera
  CDS (1)..(1272)
atggcttccgctatggttgaagacagtagcttcgaagacgaccagctcgcttcgatgtccactgacgacattgctagagcttcccgtctccttgataatgagattcgaatcctcaaggaagagttgcagagaacgaatctggagttggaatcgttcaaagaaaaaataaaggagaatcaagagaagatcaagctcaacaagcagctaccctaccttgttgggaacatcgttgagattttggaaatgaacccagaagatgaagctgaagaagatggcgctaacgttgatcttgactcccaaagaaaaggaaaatgtgtcgtgttgaaaacctctacacgccagacgatctttttgcctgttgttgggcttgttgaccctgataagctgaaacctggtgacttggttggggtgaataaagatagctacctgatcttggacactcttccgtctgaatatgattctcgagtaaaggctatggaagtcgatgaaaagccaactgaagattacaatgacattgggggtctggagaagcagatccaggaactcgttgaggcaattgttctgcccatgactcacaaagagcgattccagaaactaggaattcggccacccaagggagtgcttttgtatgggcctccagggactggcaaaacattaatggctcgtgcttgtgctgcacagacaaatgccacttttctgaagctagctggtccacaacttgtccagatgttcataggggatggtgcaaaacttgttcgagatgcattccagcttgcaaaagagaaatccccatgtatcattttcattgatgaaattgatgccattggcacgaagcgttttgatagtgaggtgagtggagatagagaagtgcagcgaacaatgttggaattgctcaatcagcttgatggttttagtagtgatgaccgtataaaggtcatagcagcaacaaacagggctgatatcctggatccagctctcatgcgttctggtcgtttagaccgaaaaattgagttccctcatccttctgaagatgcaagagcgagaattttgcagatccattcaaggaaaatgaatgtacacccagacgtaaattttgaggaactcgctcgttcaactgatgatttcaatggagcacagctgaaagccgtttgtgtggaggcaggcatgttagctctccgtcgagatgcaactgaggtgatccacgaagacttcaatgaaggtattattcaagtacaggccaaaaagaaatccagtttaaactattatgcataa

SEQ ID NO: 4966 - protein, 423 aa, Vitis vinifera
MASAMVEDSSFEDDQLASMSTDDIARASRLLDNEIRILKEELQRTNLELESFKEKIKENQEKIKLNKQLPYLVGNIVEILEMNPEDEAEEDGANVDLDSQRKGKCVVLKTSTRQTIFLPVVGLVDPDKLKPGDLVGVNKDSYLILDTLPSEYDSRVKAMEVDEKPTEDYNDIGGLEKQIQELVEAIVLPMTHKERFQKLGIRPPKGVLLYGPPGTGKTLMARACAAQTNATFLKLAGPQLVQMFIGDGAKLVRDAFQLAKEKSPCIIFIDEIDAIGTKRFDSEVSGDREVQRTMLELLNQLDGFSSDDRIKVIAATNRADILDPALMRSGRLDRKIEFPHPSEDARARILQIHSRKMNVHPDVNFEELARSTDDFNGAQLKAVCVEAGMLALRRDATEVIHEDFNEGIIQVQAKKKSSLNYYA

SEQ ID NO: 4967 - DNA, 1257 bp, Vitis vinifera
  CDS (1)..(1257)
atggccgtggttctggaaccaaaaccctcgtccgagccaccaccgtcgttcccctccacaagatctgacatccaaggcttctccgatcagtcttcttccttctccgacgaggatgatctctacggccgccttaaatccctccagcgtcagctcgagttcatcgatatccaggaagaatacgtcaaggatgagcagaagaatctaaagcgggagctccttcgagcccaggaggaggtcaagaggattcagtccgtgcccctcgtcatcggccagttcatggagatggtcgatcagaacaatggtattgtgggatccactactggttctaattactatgtcaggattctcagcacgattaatcgggagcttttgaagccctccgcttctgttgctctccaccgccattccaatgctctcgttgatgtcttgccgccggaggccgactctagcatctcgcttctcagccagtccgaaaagccggatgttacctataacgatattggaggatgtgatattcagaagcaggaaatccgtgaagctgttgagttacctttgactcatcatgagctgtacaaacagattggtatagatcctccccgtggtgtgttgctctatggtccccctggcactggtaaaaccatgcttgctaaggctgttgcaaatcatactactgctgctttcatcagagttgtgggttcagaatttgttcagaagtatttgggtgagggtccgagaatggtccgtgatgttttccgtcttgccaaggagaatgctcctgcaattatcttcattgatgaggttgatgctattgctaccgctaggtttgatgcccaaactggagctgatagagaagttcagcgaatcctcatggagctcctcaatcagatggatgggtttgaccagactgtgaatgttaaggtcataatggcaactaatcgagcagacactctggaccctgcacttcttcgtcctggaagactcgaccgaaagattgaattccctttgcctgatcgaagacaaaagaggcttgtttttcaggtttgcactgctaagatgaacttaagcgatgaggttgacttggaggactatgtttctcggccagataaaattagtgctgctgagattgctgctatttgtcaagaagctgggatgcatgctgttcgcaagaaccgatatgtaattctccccaaggactttgagaagggttatcgaaccaatgtgaagaagcccgacactgacttcgagttttacaaatga

SEQ ID NO: 4968 - protein, 418 aa, Vitis vinifera
MAVVLEPKPSSEPPPSFPSTRSDIQGFSDQSSSFSDEDDLYGRLKSLQRQLEFIDIQEEYVKDEQKNLKRELLRAQEEVKRIQSVPLVIGQFMEMVDQNNGIVGSTTGSNYYVRILSTINRELLKPSASVALHRHSNALVDVLPPEADSSISLLSQSEKPDVTYNDIGGCDIQKQEIREAVELPLTHHELYKQIGIDPPRGVLLYGPPGTGKTMLAKAVANHTTAAFIRVVGSEFVQKYLGEGPRMVRDVFRLAKENAPAIIFIDEVDAIATARFDAQTGADREVQRILMELLNQMDGFDQTVNVKVIMATNRADTLDPALLRPGRLDRKIEFPLPDRRQKRLVFQVCTAKMNLSDEVDLEDYVSRPDKISAAEIAAICQEAGMHAVRKNRYVILPKDFEKGYRTNVKKPDTDFEFYK

SEQ ID NO: 4969 - DNA, 1263 bp, Vitis vinifera
  CDS (1)..(1263)
atggccacagcagtgaccgagctcagtcagtctggtccagccatggtcggggaggtctgcaccgccaaaacgacgtcgtctaagcaaggagatgggctgaggcagtactacctccaacacatccacgatctccagctacaggttcgccagaagagccataatctcaatcgccttgaagcccagcgcaacgatctcaattcccgagtgaggatgctcagagaagaattgcagctgcttcaagagcctggatcatatgttggtgaagtagtcaaagttatgggaaaatcgaaggttttggttaaggttcatccagaagggaagtatgttgttgatattgataagaacatagacatcactaagatcacaccttcaacccgagttgctcttcgcaatgacagctatgtgcttcacttgatattgcccagtaaagtagatccactggtaaaccttatgaaagttgaaaaagttccggattctacatatgatatgattggtggtcttgatcagcaaatcaaagagataaaggaggttattgagcttccaatcaagcatcctgaattatttgaaagtcttggtatagctcaaccaaagggagtcctgctttatggtcctcctggtacagggaaaacacttcttgcaagggcagtggctcatcacactgactgtacctttataagggtttctggctctgagttagttcagaagtatattggtgaagggtctcgaatggttagagaactgtttgttatggcaagggagcatgctccatcaatcatcttcatggatgaaattgacagtattggatctgctcgaatggaatctggaactggaaatggtgatagtgaagtgcagcgaactatgttggagcttctcaatcaactggatggatttgaagcctcaaacaagatcaaggttttgatggctacaaatcgcattgatattttggatcaagccctccttaggcctggacgaattgacaggaagattgagttcccaaatcccaacgaagagtcccgctttgatattttgaaaatccactcaagaaaaatgaacttaatgcgtgggattgatctgaagaagatagcagagaagatgaatggtgcatctggtgcagagcttaaggcggtatgcacagaagctggaatgtttgctctaagggagaggagagtacatgtgacacaagaagattttgagatggcagtggcaaaggtgatgaaaaaggagacagagaaaaacatgtccttgcggaagctgtggaagtaa

SEQ ID NO: 4970 - protein, 420 aa, Vitis vinifera
MATAVTELSQSGPAMVGEVCTAKTTSSKQGDGLRQYYLQHIHDLQLQVRQKSHNLNRLEAQRNDLNSRVRMLREELQLLQEPGSYVGEVVKVMGKSKVLVKVHPEGKYVVDIDKNIDITKITPSTRVALRNDSYVLHLILPSKVDPLVNLMKVEKVPDSTYDMIGGLDQQIKEIKEVIELPIKHPELFESLGIAQPKGVLLYGPPGTGKTLLARAVAHHTDCTFIRVSGSELVQKYIGEGSRMVRELFVMAREHAPSIIFMDEIDSIGSARMESGTGNGDSEVQRTMLELLNQLDGFEASNKIKVLMATNRIDILDQALLRPGRIDRKIEFPNPNEESRFDILKIHSRKMNLMRGIDLKKIAEKMNGASGAELKAVCTEAGMFALRERRVHVTQEDFEMAVAKVMKKETEKNMSLRKLWK

SEQ ID NO: 4971 - DNA, 1254 bp, Vitis vinifera
  CDS (1)..(1254)
atggcgacagcttcaacggagaggtcactggcggagcccatggcggaggagaggtgtacggcgaagacgaagcaacaaggcgagggactcaagcagtactatctgcaacacaatcacgatctccagctccaggtccgccagaaggctcacaatctcaaccgccttgaagcccaacgcaatgatctcaattctcgagtgaggatgcttagagaagagttgcaacttcttcaggagcctggatcatatgttggtgaagttgtcaaagttatggggaagtcaaaggtcttagttaaggtacatccagaagggaagtatgttgtagatattgacaagaacatagatatcacaaagatcacaccatcaactagagttgctttacggaatgatagctatgtgctccatttgatcttgccaagtaaagtagatcccctcgtaaaccttatgaaagttgaaaaagttccagactccacatatgacatgatcggtggtcttgaccagcaaattaaagaaataaaagaggtcattgagcttccaattaaacaccctgaactgtttgagagtcttggaatagctcaaccaaagggagtcctgctgtatgggccacctggtacagggaaaactttgcttgcaagggcagtagctcatcatactgactgtactttcatcagggtttctggttctgaattggttcagaagtacattggtgaaggctccagaatggttagagaacttttcgtgatggcaagggagcatgcaccatcaataatctttatggatgagattgacagtattggatctgctcgtatggaatcaggaagtggcaatggtgatagtgaagtccagcggactatgctggagcttctcaatcaactggatggatttgaagcatccaacaagataaaagttttaatggctacaaatcgaattgatattcttgaccaagccctcctcaggccaggacggattgacaggaagattgagtttccaaatcccaatggggagtctcgctgggatattttaaaaatacactcgaggaaaatgaatttgatgcgtgggatcgatctgaagaagattgcagagaagatgaatggtgcatctggtgcagagctcaaggcggtatgcacagaagcagggatgtttgctttgagggagaggagggttcacgtaacacaggaagatttcgagatggctgtagccaaagtgatgaagaaggagacggagaaaaacatgtccttgaggaaactttggaagtag

SEQ ID NO: 4972 - protein, 417 aa, Vitis vinifera
MATASTERSLAEPMAEERCTAKTKQQGEGLKQYYLQHNHDLQLQVRQKAHNLNRLEAQRNDLNSRVRMLREELQLLQEPGSYVGEVVKVMGKSKVLVKVHPEGKYVVDIDKNIDITKITPSTRVALRNDSYVLHLILPSKVDPLVNLMKVEKVPDSTYDMIGGLDQQIKEIKEVIELPIKHPELFESLGIAQPKGVLLYGPPGTGKTLLARAVAHHTDCTFIRVSGSELVQKYIGEGSRMVRELFVMAREHAPSIIFMDEIDSIGSARMESGSGNGDSEVQRTMLELLNQLDGFEASNKIKVLMATNRIDILDQALLRPGRIDRKIEFPNPNGESRWDILKIHSRKMNLMRGIDLKKIAEKMNGASGAELKAVCTEAGMFALRERRVHVTQEDFEMAVAKVMKKETEKNMSLRKLWK

SEQ ID NO: 4973 - DNA, 1200 bp, Vitis vinifera
  CDS (1)..(1200)
atggcgagcgaagcagaagacgccgtacgacgtcgtacaaccaccaccgactaccgtaagaagctgctccagcacaaggagctcgagtccagagttcgatcagtgagagagaatttgcgggctgccaaaaaggaatatgctaaaactgaagatgatttgaaatcgcttcagagtgttgggcaaattataggcgaagttcttaggcctcttgacaatgaacgcttgatagtgaaagcaagcagtggaccaaggtatgtggttggctgtcgcagtaaagtggacaaggaaaaactgactgcaggcacccgtgtagttcttgatatgactactctcacaattatgcgggctcttccacgagaagttgatccagttgtatataacatgcttcatgaagacccaggtaatgttagctacgcagcggtgggaggtctgtcagatcagattcgagaactccgggaatccattgaattgcctctaatgaatcctgagctctttattagggtggggattaagcctcccaagggtgttcttctctatggacctcctggaacaggcaagacactgttagccagagcaattgcgagcaacatagatgctaactttttgaaggttgtctcaagtgccattattgataaatatattggtgaaagtgcgagattgataagggagatgtttggatatgcacgagatcaccaaccctgtatcatttttatggatgagattgatgccattggtgggcgtcgtttcagcgagggaacaagtgctgatcgtgaaattcagagaacactcatggagttgctcaaccagctggatggatttgatcagcttgggaaggtcaaaatgattatggcaacaaatagacctgatgttctggaccctgcacttcttcgtcctgggcgactggataggaagatagaaattccattgccaaatgaacaatccagaatggaaatccttaaaatccatgctgctggaattgctaaacatggtgaaatcgactatgaagctgttgtaaagctggctgaggggtttaatggagccgatcttcgtaatgtttgcactgaagctgggatgtcagcaattcgtgcagaacgtgactatgtcatccatgaagatttcatgaaggctgtccggaaactgaatgaggcaaagaaacttgaatcaagtgctcactacaatgctgattttggaaaagactaa

SEQ ID NO: 4974 - protein, 399 aa, Vitis vinifera
MASEAEDAVRRRTTTTDYRKKLLQHKELESRVRSVRENLRAAKKEYAKTEDDLKSLQSVGQIIGEVLRPLDNERLIVKASSGPRYVVGCRSKVDKEKLTAGTRVVLDMTTLTIMRALPREVDPVVYNMLHEDPGNVSYAAVGGLSDQIRELRESIELPLMNPELFIRVGIKPPKGVLLYGPPGTGKTLLARAIASNIDANFLKVVSSAIIDKYIGESARLIREMFGYARDHQPCIIFMDEIDAIGGRRFSEGTSADREIQRTLMELLNQLDGFDQLGKVKMIMATNRPDVLDPALLRPGRLDRKIEIPLPNEQSRMEILKIHAAGIAKHGEIDYEAVVKLAEGFNGADLRNVCTEAGMSAIRAERDYVIHEDFMKAVRKLNEAKKLESSAHYNADFGKD

SEQ ID NO: 4975 - DNA, 1278 bp, Vitis vinifera
  CDS (1)..(1278)
atggcgtctcaacgagaagacaagatcaaggacgagaaaacccctcctctcgatgaagacgacattgccctccttaaaacctatggccaaggaccatactctgacagaataaaaatagtggagaaagaaatcgaggaaatggtgaagaagatggatgatatttgtggtatcgcggaatctgacactggtttggctccaccaagtcactggaatcttccttctgatagactaatgatgcagaatgagaagtcacttcgggttgcaaggtgcacgaggataatcaaccccaattctgaaaacccccagtatatgatagatgtcaagccaactgcaacgtacgtggtcaaactgggtgccaacgtctcccaaacggatatagatgaaggcatgcgtgttgggattgatcgaattacacgtcagattgagatgccattgcccccaaagattaatccaagtgtaacaatgttgatagtagaagagaagcctaatgtaacatatgatgatgttggtggatgtaaagagcagattgagaagctgcgcgaggttgttgagctgcccatgcttcacccggagaaatttgagaaacttggaatcgaacctcccaagggtgtgctgttttatggtcctcctggaactggcaagactctcttagctagagctgtggccaatagaactggtgcatgttttattcgtgttattgggagtgaacttgttcgaagatatgttggtgagggtgcccgcatggtccgacagatttttcggatggcacgctcaaagagggcttgcattgtcttttttgatgaagttgatgccataggtggtgcacgttttgatgatggtaagggtggagacagagaagttcaacgtaccatgcttgaaattgtaaatcagcttgatggttttgatgctcgaggaaacatcaaagttatgatggcaacaaacagacctggtacactggacccagctctattacgtcctgggagactagatcggaagcttgaatttgggctacccgatgtgaagagcgggacacaaatattcaagatccacactcgaactatgaactgtgaaagagatattcgttttgagcttcttgcacgcatttgccccagctctactggagctgacataaggagtgtctgcactgaggctgggatgtttgctattagagcacgtaggaagattgtgacagagcgagatttccttgattcaataaaaaaggtcatcaagggccacctcaagttcagtgcaacaccggagtacatgatttacaactga

SEQ ID NO: 4976 - protein, 425 aa, Vitis vinifera
MASQREDKIKDEKTPPLDEDDIALLKTYGQGPYSDRIKIVEKEIEEMVKKMDDICGIAESDTGLAPPSHWNLPSDRLMMQNEKSLRVARCTRIINPNSENPQYMIDVKPTATYVVKLGANVSQTDIDEGMRVGIDRITRQIEMPLPPKINPSVTMLIVEEKPNVTYDDVGGCKEQIEKLREVVELPMLHPEKFEKLGIEPPKGVLFYGPPGTGKTLLARAVANRTGACFIRVIGSELVRRYVGEGARMVRQIFRMARSKRACIVFFDEVDAIGGARFDDGKGGDREVQRTMLEIVNQLDGFDARGNIKVMMATNRPGTLDPALLRPGRLDRKLEFGLPDVKSGTQIFKIHTRTMNCERDIRFELLARICPSSTGADIRSVCTEAGMFAIRARRKIVTERDFLDSIKKVIKGHLKFSATPEYMIYN

SEQ ID NO: 4977 - DNA, 1197 bp, Picea sitchensis
  CDS (1)..(1197)
atggcggaagcagacgacgcggcagcccgtctacatgcagttaacgagtacaggaagaaacttcttcagcacaaggagtttgatgccagagttcgtacacttcgagagaatttgaggactgccaagaaggactttgacaaaactgaagatgatttaaaatctcttcaaagtgttggtcaaattataggagaagtgcttagaccacttgataatgaacgcttgattgtcaaagctagcagtggtcctagatatgttgttggttgccggaataaggtggataaggaaaaactcactgcgggaacacgagttgttctagacatgacaactctcacaattatgcgtgctctgcctcgtgaggtggaccctgttgtatataatatgcttcacgaagatcctggcaatgtgagttactctgctgtgggaggattggcagatcaaataagggaacttagagagtctatcgaacttcctctgatgaatcctgaactctttattagagttggaatcaagcctcccaagggggttcttctatatggtcctcctggtacaggtaagacactgttggcaagagctattgccagcaacattgatgccaatttcttaaaggtcgtttcaagtgccataatagataaatatattggtgaaagtgctaggctgataagggagatgtttggatatgcacgagatcaccaaccatgcattatttttatggatgaaatagatgcaattggtggacgtcgtttcagtgaaggaactagtgccgatagagagattcaaaggacactaatggagttacttaatcaactagatgggtttgatcaattgggaaaagtaaaaatgattatggccaccaatcgaccggatgttctggaccctgccttgcttcgacctggtcgcttggatcgtaagattgaaattccattaccgaatgaacaagcaagaatggaaattttgaaaatacatgctgcaggaatagcaaaacatggagagatagattatgaagctgtagtaaagctggctgagggcttcaatggagcagaccttcgaaatgtttgcacagaagctggcatgtcagccatccgagcagagcgtgattatgtaattcatgaagattttatgaaggctgttcggaaattgaatgaagcaaagaaactagagtcaagttcacactataatgcagactttggaaaggactag

SEQ ID NO: 4978 - protein, 398 aa, Picea sitchensis
MAEADDAAARLHAVNEYRKKLLQHKEFDARVRTLRENLRTAKKDFDKTEDDLKSLQSVGQIIGEVLRPLDNERLIVKASSGPRYVVGCRNKVDKEKLTAGTRVVLDMTTLTIMRALPREVDPVVYNMLHEDPGNVSYSAVGGLADQIRELRESIELPLMNPELFIRVGIKPPKGVLLYGPPGTGKTLLARAIASNIDANFLKVVSSAIIDKYIGESARLIREMFGYARDHQPCIIFMDEIDAIGGRRFSEGTSADREIQRTLMELLNQLDGFDQLGKVKMIMATNRPDVLDPALLRPGRLDRKIEIPLPNEQARMEILKIHAAGIAKHGEIDYEAVVKLAEGFNGADLRNVCTEAGMSAIRAERDYVIHEDFMKAVRKLNEAKKLESSSHYNADFGKD

SEQ ID NO: 4979 - DNA, 1275 bp, Picea sitchensis
  CDS (1)..(1275)
atggccacggcaatgaccgaagacagtattttcgaaggcgaggacgagctttcttcgatgacgacagaagagcttactagaggagctcgcatgctggagagcgaaaatcgggttctcagggacgaagcgcagaggacaaatctagagctagataccacgaaagagaagataaaggagaaccaagagaaaatcaaactgaacaagcaacttccttatttggtcggcaatatcgtcgagatcctggaaatgaaccctgaggaggaagcagaagaagatggtgcaaatgttgatttggactcacaaaggaagggaaaatgtgtagtgttgaagacatcaacacggcaaacaatctttttgcccgtggtagggcttgtagatccagataaactgaaacctggagatctagtgggagttaataaagacagctatttaatacttgacacgctcccatcagagtatgattctcgtgtgaaggctatggaagtagatgaaaagccaactgaggattacaatgacatagggggccttgaaaaacagattacagaattggttgaggccatcgtcttgccaatgactcacaaggagaggtttcagaaacttggtattcgcccgccgaaaggcgtcctactttatgggcctccaggaactggaaaaacactcatggcacgtgcatgtgctgcacagacaaatgcaacatttttaaaacttgctggtccgcaactagtccagatgttcattggagatggtgccaaacttgttcgagatgcatttcaacttgcaaaggataaatctccttgtattatctttatagatgaggttgacgcaattggaacaaagcgttttgacagtgaagtaagtggggatagagaagtacaacgcactatgctagagttactgaatcagctcgatggatttagcagtgatgatcgtataaaggtcatagcagcaacaaatcgtgcagatattttagatccagctctaatgcgttcaggccgtctagatcggaagatagaatttcctcacccaacagaggatgcacgtgcacggattttacagattcattcaagaaagatgactgttcatccagatgtcaactttgaagagcttgcacgttctactgatgatttcaatggtgcacagttaaaagctgtttgtgtagaagctggtatgcttgcgctgcgtcgagatgccactgaggttacccatgaagatttcaatgaaggaataattcaagttcaagctaaaaagaagtccagcttgaattactatgcataa

SEQ ID NO: 4980 - protein, 424 aa, Picea sitchensis
MATAMTEDSIFEGEDELSSMTTEELTRGARMLESENRVLRDEAQRTNLELDTTKEKIKENQEKIKLNKQLPYLVGNIVEILEMNPEEEAEEDGANVDLDSQRKGKCVVLKTSTRQTIFLPVVGLVDPDKLKPGDLVGVNKDSYLILDTLPSEYDSRVKAMEVDEKPTEDYNDIGGLEKQITELVEAIVLPMTHKERFQKLGIRPPKGVLLYGPPGTGKTLMARACAAQTNATFLKLAGPQLVQMFIGDGAKLVRDAFQLAKDKSPCIIFIDEVDAIGTKRFDSEVSGDREVQRTMLELLNQLDGFSSDDRIKVIAATNRADILDPALMRSGRLDRKIEFPHPTEDARARILQIHSRKMTVHPDVNFEELARSTDDFNGAQLKAVCVEAGMLALRRDATEVTHEDFNEGIIQVQAKKKSSLNYYA

SEQ ID NO: 4981 - DNA, 1209 bp, Populus trichocarpa
  CDS (1)..(1209)
atggcaacgataagcaacgatggagaagacgcagcgcgacgtcgtactgcagaggcggattatcgcaagaagttactcaaccacaaagagctcgaatccagagttcgatctacgagggagaatttgaaagctgcaaaaaaagaatttaacaaaacagaagatgatttgaagtctcttcaaagtgttggtcagattataggagaagttcttcgacctcttgacaatgaacgcttgattgtcaaagcgagcagcgggccgaggtatgtggtaggctgccgtagtaaggtggataaggaaaaactgacttcaggaactagagtggttcttgatatgacaacacttacgatcatgcgagctcttccacgtgaagttgacccagttgtttataacatgctgcatgaagatcctggtaatgtgagctactcagctgtgggtggtttatctgatcagattagagaattgagggaatctattgagctacctttgatgaaccctgagcttttcattagagtggggattaagcctccaaagggtgtccttctgtatggacctcctggtactgggaagacattgctggctagggctattgcaagcaacatagatgccaactttttaaaggttgtttcaagtgccatcattgacaaatacataggagaaagtgctaggttgatccgagaaatgtttgggtatgcacgtgatcatcaaccctgcatcattttcatggacgagatagatgcaattggtggacgccgttttagtgagggaacaagtgctgatcgtgaaattcaaagaacattgatggagttgcttaatcaacttgatggatttgatcagcttgggaaggttaaaatgataatggccacaaaccgccctgatgttcttgaccctgcacttcttcgtccaggaagattagacagaaaaatagagattccacttccaaatgaacagtcaagaatggaaatccttaagatccatgctgctgggattgcgaagcatggggatattgattatgaggctgttgtgaaacttgcagagggttttaatggagctgatcttcgtaatgtctgcacggaagctggaatgtcagcaatccgtgcagaacgtgattatgtcatccatgaagattttatgaaggccgtacgaaaacttaatgaagcaaagaaactcgagtctaccgcgcactacaatgctgattttggcaaagactag

SEQ ID NO: 4982 - protein, 402 aa, Populus trichocarpa
MATISNDGEDAARRRTAEADYRKKLLNHKELESRVRSTRENLKAAKKEFNKTEDDLKSLQSVGQIIGEVLRPLDNERLIVKASSGPRYVVGCRSKVDKEKLTSGTRVVLDMTTLTIMRALPREVDPVVYNMLHEDPGNVSYSAVGGLSDQIRELRESIELPLMNPELFIRVGIKPPKGVLLYGPPGTGKTLLARAIASNIDANFLKVVSSAIIDKYIGESARLIREMFGYARDHQPCIIFMDEIDAIGGRRFSEGTSADREIQRTLMELLNQLDGFDQLGKVKMIMATNRPDVLDPALLRPGRLDRKIEIPLPNEQSRMEILKIHAAGIAKHGDIDYEAVVKLAEGFNGADLRNVCTEAGMSAIRAERDYVIHEDFMKAVRKLNEAKKLESTAHYNADFGKD

SEQ ID NO: 4983 - DNA, 1200 bp, Populus trichocarpa
  CDS (1)..(1200)
atgtcgagcgaagtagaggaggcggctcgacgccgtacagcgatcgccgagtaccgcaagaagctactgaaccataaagagctcgaatcccgagtccgtacagtgagagagaatttgcgggctgccaagaaggaatttgctaaaactgaagatgatttgaagtccctacagagtgttggacaaatcattggtgaagttctcaggccactcgacaatgaacgcttgatagctaaagcaagcagcggacctaggtatgtggttggttgtcgtagtaaagtggacaaagaaaaactaacagctggaacccgagttgttcttgatatgactactctcacaatcatgcgagctcttcctcgtgaggttgatccagttgtatataacatgcttcatgaggatcctggtaatgttagctactctgctgtgggagggctctcagatcagattcgagagcttagagaatctatagaactgcctctcatgaatccagagctctttttgagggtgggaatcaagcctcccaagggtgttcttctttatggacctcctggaacaggaaagacattattagctagagccatagcaagcaacatagatgccaactttttgaaggttgtgtcgagtgccattattgataaatatattggtgaaagtgcaagattgattagagagatgtttgggtacgcacgtgatcatcaaccatgtattatatttatggatgagattgatgccattggtggacgtcgattcagtgagggaacaagtgcagaccgtgaaatccaaagaacactcatggagttgcttaatcagcttgatggatttgaccagcttgggaaggttaaaatgattatggcaacaaacagacctgatgttctggaccctgcacttcttcgaccaggccgtctagacaggaagattgaaattccattgccaaatgagcagtcaagaatggaaatccttaaaatccatgctgctggaattgccaaacatggtgatattgactatgaagcggttgtgaagcttgctgaggggttcaatggtgctgatcttagaaatgtttgcactgaagctgggatgtctgcaatccgtgcagaacgtgattacgtcatccatgaggatttcatgaaggctgtccggaaattaaatgaggccaagaagcttgaatctagtgctcactacaatgctgactttggaaaggattga

SEQ ID NO: 4984 - protein, 399 aa, Populus trichocarpa
MSSEVEEAARRRTAIAEYRKKLLNHKELESRVRTVRENLRAAKKEFAKTEDDLKSLQSVGQIIGEVLRPLDNERLIAKASSGPRYVVGCRSKVDKEKLTAGTRVVLDMTTLTIMRALPREVDPVVYNMLHEDPGNVSYSAVGGLSDQIRELRESIELPLMNPELFLRVGIKPPKGVLLYGPPGTGKTLLARAIASNIDANFLKVVSSAIIDKYIGESARLIREMFGYARDHQPCIIFMDEIDAIGGRRFSEGTSADREIQRTLMELLNQLDGFDQLGKVKMIMATNRPDVLDPALLRPGRLDRKIEIPLPNEQSRMEILKIHAAGIAKHGDIDYEAVVKLAEGFNGADLRNVCTEAGMSAIRAERDYVIHEDFMKAVRKLNEAKKLESSAHYNADFGKD

SEQ ID NO: 4985 - DNA, 1281 bp, Populus trichocarpa
  CDS (1)..(1281)
atggcaactgtaggagtggagaggaagcagcagcagcaaacagaatcaacgatgacgatgatagcggaggagagctgctcggcgaaaacgggagcggtgaggcaaggagagggtttgaagcagtactatctccaacacatccatgagcttcagctccttgtccgccaaaaatcccacaatcttaatcgcctcgaagcgcaacgcaatggccttaattccagagtcaggatgcttagagaagagtcgcagctacttcaagagcctgggtcatatgttggtgaagttgtcaaagtaatggggaagaacaaggtgttagttaaggttcatccagaggggaagtatgttgttgatattgataaaagtattgatatcacaaagatcactccatcaacaagggttgcccttcgcaatgacagctatgttcttcacttgatcttgccaagcaaagtggatcctttggtcaacctcatgaaggttgaaaaagttccagattccacctatgacatgatcggtggtcttgatcaacaaattaaagagattaaggaggtcattgaacttccaatcaaacaccctgaattgtttgagagtcttggaattgctcaaccaaagggtgttctgctttatggacctcctggcacaggaaaaactctactggctagggcagtggctcatcacactgactgtactttcatcagggtttctggttctgaattagttcagaaatacattggagaaggctctagaatggtcagagagctttttgttatggcaagagagcatgctccatcaatcattttcatggatgaaattgatagtattggatccgctcgaatggaatctggcagtggcaatggtgacagtgaggtgcagcgtactatgctggagctcctcaatcagctggatggatttgaagcatcaaacaagatcaaggttttgatggctacaaatcggattgatattctggatcaagctctccttaggccaggaagaattgacaggaagattgaatttccaaatcccaacgtggattcacgttttgatatcgtgaaaatccattcaagaaggatgaatttaatgcgtgggattgatatgaagaagatagctgagaagatgaatggggcatccggtgcagagctcaaggcggtgtgcactgaggccggaatgtttgctctaagagagaggagggtccatgttacacaagaagattttgagatggctgtagcaaaggtcatgaagaaggagacagagaagaacatgtctttgcggaagctctggaaataa

SEQ ID NO: 4986 - protein, 426 aa, Populus trichocarpa
MATVGVERKQQQQTESTMTMIAEESCSAKTGAVRQGEGLKQYYLQHIHELQLLVRQKSHNLNRLEAQRNGLNSRVRMLREESQLLQEPGSYVGEVVKVMGKNKVLVKVHPEGKYVVDIDKSIDITKITPSTRVALRNDSYVLHLILPSKVDPLVNLMKVEKVPDSTYDMIGGLDQQIKEIKEVIELPIKHPELFESLGIAQPKGVLLYGPPGTGKTLLARAVAHHTDCTFIRVSGSELVQKYIGEGSRMVRELFVMAREHAPSIIFMDEIDSIGSARMESGSGNGDSEVQRTMLELLNQLDGFEASNKIKVLMATNRIDILDQALLRPGRIDRKIEFPNPNVDSRFDIVKIHSRRMNLMRGIDMKKIAEKMNGASGAELKAVCTEAGMFALRERRVHVTQEDFEMAVAKVMKKETEKNMSLRKLWK

SEQ ID NO: 4987 - DNA, 1239 bp, Populus trichocarpa
  CDS (1)..(1239)
atgtcggcgatggtactagacccgaaacccgctccagccacggagccaagatccgaccttgtactggacccatcaaccatacccatcgaagacgacgatctttacagtcgcttaaagtctctccaaaggcagctcgaattcatcgaaattcaagaagagtatgtgaaagatgaacagaagaatttaaagcgagaactcctccgtgcgcaggaagaggtgaagcggatccagtcggtgccgcttgtaatcgggcagtttatggagatggtggatcagaataatgggattgttgggtctactacgggttcgaattattatgtcaggattttgagtacgattaatagagagttgttgaagccgtcggcttctgtggcgttgcatcgtcactctaatgctctcgttgatgttctgccgccggaggctgattctagtatttctctgcttagtcagagtgagaaacctgatgttacttataatgacattggaggatgtgacattcaaaagcaggaaattcgcgaggcagttgagttgccactaactcaccatgagctgtacaaacaaattggtatcgacccgcctcgtggtgtcttgctctatggtcctcctggaactggaaaaactatgcttgccaaggccgttgctaatcatacaacagcggcctttattagagttgttggctctgagtttgttcagaagtatctgggcgagggtccccgtatggttcgtgatgtttttcgtcttgctaaagagaatgccccagcaattatttttattgatgaggtagatgctattgctactgctaggttcgacgctcaaactggagctgatagagaagttcagcgtattctgatggagctcctgaatcagatggatgggtttgatcagacggtaaatgtcaaggtcataatggcaactaatcgggctgacactttggaccctgcacttctgcgtcctggaagacttgaccggaaaattgaatttcctttgcctgatagacggcagaagaggcttgttttccaggtttgcactgcaaaaatgaatttaagtggtgaggtggacttggaggattatgtgtctcgacccgataaaattagcgctgctgagattcaagctatttgccaagaagcaggcatgcatgcagttcgcaagaacaggtatgtcatacttcctaaggactttgagaaaggctaccgaaccaatgtgaagaagcctgacactgactttgagttctacaagtga

SEQ ID NO: 4988 - protein, 412 aa, Populus trichocarpa
MSAMVLDPKPAPATEPRSDLVLDPSTIPIEDDDLYSRLKSLQRQLEFIEIQEEYVKDEQKNLKRELLRAQEEVKRIQSVPLVIGQFMEMVDQNNGIVGSTTGSNYYVRILSTINRELLKPSASVALHRHSNALVDVLPPEADSSISLLSQSEKPDVTYNDIGGCDIQKQEIREAVELPLTHHELYKQIGIDPPRGVLLYGPPGTGKTMLAKAVANHTTAAFIRVVGSEFVQKYLGEGPRMVRDVFRLAKENAPAIIFIDEVDAIATARFDAQTGADREVQRILMELLNQMDGFDQTVNVKVIMATNRADTLDPALLRPGRLDRKIEFPLPDRRQKRLVFQVCTAKMNLSGEVDLEDYVSRPDKISAAEIQAICQEAGMHAVRKNRYVILPKDFEKGYRTNVKKPDTDFEFYK

SEQ ID NO: 4989 - DNA, 1239 bp, Populus jackii
  CDS (1)..(1239)
atgtcggcgatggtactagacccgaaacccgccccagccacggagccaagatccgaccttgtactggacccatcaaccatacccatcgaagacgacgatctttacagtcgcttaaagtctctccaaaggcagctcgaattcatcgaaattcaagaagagtatgtgaaagatgaacagaagaatttaaagcgagaactcctccgtgcgcaggaagaggtgaagcggatccagtcggtgccgcttgtaatcgggcagtttatggagatggtggatcagaataatgggattgttgggtctactacgggttcgaattattatgtcaggattttgagtacgattaatagagagttgttgaagccgtcggcttctgtggcgttgcatcgtcactctaatgctctcgttgatgttctgccgccggaggctgattctagtatttctctgcttagtcagagtgagaaacctgatgttacttataatgacattggaggatgtgacattcaaaagcaggaaattcgcgaggcagttgagttgccactaactcaccatgagctgtacaaacaaattggtatcgacccgcctcgtggtgtcttgctctatggtcctcctggaactggaaaaactatgcttgccaaggccgttgctaatcatacaacagcggcctttattagagttgttggctctgagtttgttcagaagtatctgggcgagggtccccgcatggttcgtgatgtttttcgtcttgctaaagagaatgccccagcaattatttttattgatgaggtagatgctattgctactgctaggtttgacgctcaaactggagctgatagagaagttcagcgtattctgatggagctcctgaatcagatggatgggtttgatcagacagtaaatgtcaaggtcataatggcaactaatcgggctgacactctggaccctgcacttctacgtcctggaagacttgaccggaaaattgaatttcctttgcctgatagacggcagaagaggcttgttttccaggtttgcactgcaaaaatgaatttaagtgatgaggtggacttggaggattatgtgtctcgacccgataaaattagcgctgctgagattcaagctatttgccaagaagcaggcatgcatgcagttcgcaagaacaggtatgtcatacttcctaaggactttgagaaaggctaccgaaccaatgtgaagaagcctgacactgactttgagttctacaagtga

SEQ ID NO: 4990 - protein, 412 aa, Populus jackii
MSAMVLDPKPAPATEPRSDLVLDPSTIPIEDDDLYSRLKSLQRQLEFIEIQEEYVKDEQKNLKRELLRAQEEVKRIQSVPLVIGQFMEMVDQNNGIVGSTTGSNYYVRILSTINRELLKPSASVALHRHSNALVDVLPPEADSSISLLSQSEKPDVTYNDIGGCDIQKQEIREAVELPLTHHELYKQIGIDPPRGVLLYGPPGTGKTMLAKAVANHTTAAFIRVVGSEFVQKYLGEGPRMVRDVFRLAKENAPAIIFIDEVDAIATARFDAQTGADREVQRILMELLNQMDGFDQTVNVKVIMATNRADTLDPALLRPGRLDRKIEFPLPDRRQKRLVFQVCTAKMNLSDEVDLEDYVSRPDKISAAEIQAICQEAGMHAVRKNRYVILPKDFEKGYRTNVKKPDTDFEFYK

SEQ ID NO: 4991 - DNA, 1191 bp, Manduca sexta
  CDS (1)..(1191)
atgcctgccggaccttccgcggtggatacgccgagagaaaaggcgttccaagattacagaaagaagttgatggaacacaaagaagtcgagtcgcggctcaaagcaatgcgagaccagctaaaagacctaacaaaacagtatgacaagagtgaaaatgacctgaaagccttgcagagtgtcggtcagattgttggcgaggtgctcaaacagcttactgaggagaaattcatagtgaaagcaaccaatggtccccgctatgtggtgggctgccgtcgccagctggacaagaacaagttgaagggaggcaccagggtcgcactggacatgaccacacttactatcatgcgtcacctgcccagagaggtggatcctctagtatacaacatgagccatgaagaccctggagatgtcacatatgctgcaattggtggtctgcaggagcaaatcagacagctgagagaggttattgagctgcctcttctgaatccggaactgtttgtacgcgtcggtatcactccaccaaagggttgcctgctgtatggcccacctggtacaggaaaaactctgctggccagagctgtcgcttcacaactggacgctaacttcttgaaggtggtatcatcagccatagttgacaaatacataggcgagtcggcgcgtctgatccgtgagatgttcaactacgcgcgcgaccaccagccctgcatcatattcatggacgagattgatgccataggaggcagacgtttctcagaaggtaccagcgctgaccgtgagattcagcgcacgctcatggagctactgaatcagatggacggctttgactccttgggccaggtcaaaatcatcatggcgaccaaccggcctgacacgctcgaccctgcactgctcagacctggacgtttggacaggaagattgagatcccgctgcctaatgaacaggctagactggagatcctgaagatccacgcggcacccatcgccaagcacggcgagatggactatgaggccgtggtgaaactgtccgacacgttcaacggcgccgacctcaggaacgtgtgcactgaagccggcttgttcgcgatcagggcggagagagagtatattatacaggaggatctgatgaaggcggtccgaaaagtggccgacaacaagaaactcgagagcaagttggactacaagcccgtttaa

SEQ ID NO: 4992 - protein, 396 aa, Manduca sexta
MPAGPSAVDTPREKAFQDYRKKLMEHKEVESRLKAMRDQLKDLTKQYDKSENDLKALQSVGQIVGEVLKQLTEEKFIVKATNGPRYVVGCRRQLDKNKLKGGTRVALDMTTLTIMRHLPREVDPLVYNMSHEDPGDVTYAAIGGLQEQIRQLREVIELPLLNPELFVRVGITPPKGCLLYGPPGTGKTLLARAVASQLDANFLKVVSSAIVDKYIGESARLIREMFNYARDHQPCIIFMDEIDAIGGRRFSEGTSADREIQRTLMELLNQMDGFDSLGQVKIIMATNRPDTLDPALLRPGRLDRKIEIPLPNEQARLEILKIHAAPIAKHGEMDYEAVVKLSDTFNGADLRNVCTEAGLFAIRAEREYIIQEDLMKAVRKVADNKKLESKLDYKPV

SEQ ID NO: 4993 - DNA, 1278 bp, Ostreococcus tauri
  CDS (1)..(1278)
atggatcgccgcgttcgcgttcgcccgcgcgcgcgtcgatcgcgatggatctcgacgacgcgttcgatgacgatcacgcccgcgcgctcgccgagctcgagcgcgcgagcctggacgacgtgctcgcgcgctcgcgcatgctcgaacacgagcttcgccgagcgagagcgcgtgcgggataacaaggagaagatcaagctgaataaacagctgccgtacctggtggggaacgtcgtggagctcctggacctggcgccggaggaggaggagttggaggatcaggccacggcggacgtggacgcgcagcggagcgggaaggcgtgcgtgttgaagacgacgacgagacagacgattttcttgcccgtcgtggggttggtggacgcggagacgctgaaaccgggcgatctggtgggggtgaataaggattcgtatttgatcctcgacaccctgccggcggagtacgactcgagggtaaaggcgatggaggtggatgaaaagccgacggatgattacaccgatatcggtgggctcgagaaacagattcgggagatgcgggaggcgatcgtgctgccgatgacgcacgcggagaaatttgccaaacttgggattcgaccgccaaagggcgtgcttctttacggtccgccggggaccgggaagacgctcatcgcgcgggcgtgcgcggcgcagacgaacgcggcgtatttgaagctcgctgggccgttgttggtgcagatgttcatcggtgatggcgctaagttggtgcgggacgcgttcgcgttggccaaagaaaaggcgcccgccatcatcttcatcgacgagatcgacgccatcggtaccaagagatttgattcggacaccaacggcgatcgcgaggtccagcgtacgatgttggagctcctgaaccagctcgacggtttttcgagcgacgataggattaagatcatcgcggcgacgaaccgggcggatattctcgatccggcgctcatgcgctccggtcgtctcgaccgtaagattgagttccctcatcccaacgaggacgctcgcgcgcaaatcatgaagattcactctcgtaagatgaacgtcaaccccgaggtgaactttgaagagctcgctcggggaaccgaggactttaacggcgcccagctcaaagccgtgtgcgtcgaagccggcatgctcgcgctgcgccgcgacggcaccgaaatccagcacgaggacttcaacgagggcatcatccaggtccaggccaagaagaaggccgatttgttctactacgcctag

SEQ ID NO: 4994 - protein, 425 aa, Ostreococcus tauri
MDRRVRVRPRARRSRWISTTRSMTITPARSPSSSARAWTTCSRARACSNTSFAERERVRDNKEKIKLNKQLPYLVGNVVELLDLAPEEEELEDQATADVDAQRSGKACVLKTTTRQTIFLPVVGLVDAETLKPGDLVGVNKDSYLILDTLPAEYDSRVKAMEVDEKPTDDYTDIGGLEKQIREMREAIVLPMTHAEKFAKLGIRPPKGVLLYGPPGTGKTLIARACAAQTNAAYLKLAGPLLVQMFIGDGAKLVRDAFALAKEKAPAIIFIDEIDAIGTKRFDSDTNGDREVQRTMLELLNQLDGFSSDDRIKIIAATNRADILDPALMRSGRLDRKIEFPHPNEDARAQIMKIHSRKMNVNPEVNFEELARGTEDFNGAQLKAVCVEAGMLALRRDGTEIQHEDFNEGIIQVQAKKKADLFYYA

SEQ ID NO: 4995 - DNA, 1329 bp, Ostreococcus tauri
  CDS (1)..(1329)
atgacggacgtcttgacgagcgatgcgccgcgcgcgcagggcctgcgcgcgtattacgacgcgaagatcgaacagctcgaggtggcgctcagggacaagacgatgaatcttcgacgtttggaggcgcagaggaacgcgctgaacggacgaggtgcgtcgtgggcgcgagatgacgcgtatattgttcgtgcgacatcgttcgtcggacgcgctcgtgcgatgggcgagcgggagggggagttccttggagatcgcgcggagaggagactgacgtcgttgcgagaggagttacacatgcttcaggaaccgggatcgtacgttggagaggtcgtcaaggtgatggggaagaagaaggtgttggtcaaggtgcatccggagggtaaatacgtatgtgacatggataagagcatcgatgtgacgaagctcacgccggggacgcgggtggcgctgcggaacgattcgtacacgctacacgtgatcttgccgtcgaacattgacccgttggtgtcgctcatgaaagtggagaaggttccggactcgacgttcgacatgatcggtggtctggatcagcaggtgaaggagatcaaggaggtggtggagctccctatcaaacacccggagctgttcgattcgctcggcatcgcgcagccaaagggggtgattctgtacgggcccccaggaacggggaagacactcctggctcgagccgtggcgcaccataccgattgttgtttcattcgcgtgtccggatcggaattagttcaaaagtacataggggaaggggcacggatggtacgcgaactgttcgtcatggctcgcgaacacgcgccgagcatcctattcatggacgaagttgattccatcgggagcgcgcgtgattctggtggcggaggcggtgggggtgacagcgaagtccaacgcacgatgctcgagcttttgaaccaactcgacggtttcgaggcgacgaaccagatcaaggtgatcatggcgacgaatcggctggacattctcgatcaagcgttacttcgtccgggtcgcatcgatcgtaaaatcgagttccctaacccatctgaggaaagtagagtggacattctcaagattcacagccgtaaaatgaaccttgtgcgtggtattgatctcaagaagatcgcgagcaagatgggcggcgcctcgggagcggagtcgaaggctgtgtgcacggaggcgggtatgttcgcccttcgcgagcggcgcgtgcacgtcactcaagaagacttcgaaatggccgtttccaaggtaatgaagaaggatagcgagaagaatatcagcatcaagaagctcttttcgtaa

SEQ ID NO: 4996 - protein, 442 aa, Ostreococcus tauri
MTDVLTSDAPRAQGLRAYYDAKIEQLEVALRDKTMNLRRLEAQRNALNGRGASWARDDAYIVRATSFVGRARAMGEREGEFLGDRAERRLTSLREELHMLQEPGSYVGEVVKVMGKKKVLVKVHPEGKYVCDMDKSIDVTKLTPGTRVALRNDSYTLHVILPSNIDPLVSLMKVEKVPDSTFDMIGGLDQQVKEIKEVVELPIKHPELFDSLGIAQPKGVILYGPPGTGKTLLARAVAHHTDCCFIRVSGSELVQKYIGEGARMVRELFVMAREHAPSILFMDEVDSIGSARDSGGGGGGGDSEVQRTMLELLNQLDGFEATNQIKVIMATNRLDILDQALLRPGRIDRKIEFPNPSEESRVDILKIHSRKMNLVRGIDLKKIASKMGGASGAESKAVCTEAGMFALRERRVHVTQEDFEMAVSKVMKKDSEKNISIKKLFS

SEQ ID NO: 4997 - DNA, 1161 bp, Ustilago hordei
  CDS (1)..(1161)
atgcaggcagaggaggacacatatcttcgatacaaaaagttacaacaacaccttgagtttctcaacactatggaagagtacgtcaaggacgagcaacgaaatctgaaacgcgagcttgtaagggcgcaagaggaggtcaagcgcattcagtcagtgccactcgtcattggtcaatttctcgagcccatcgaccaacacaccggcatagtcggttccaccaccggatccaattacgttgtccgaatcctttccacaatcgaccgcgagctgctcaaagccagctcaagtgttgcactacaccgtcactcgaatgctttggttgatgtgctgccacctgaggcagactcatccatcgctatgctgggtcaggacgagaagccgaccgagacctaccaggacatcggtggtatggacattcagaagcaggagatccgagaagctgtagagttgccattggtacagttcgacttgtatctccagatcggtatcgacccaccacgcggtgtattgctctacggacctcccggtacaggaaagaccatgttggtcaaggccgttgccaacgccaccactgccagctttatccgtgttgttggttccgagtttgtacagaagtatcttggtgaaggtccaagaatggtacgtgatgtcttccgacttgcgcgcgaaaatgcacccgccatcatcttcatcgacgagatcgacgccattgcgacaaagcgtttcgacgcacagaccggtgcggatcgtgaagtgcagcgtatcttgctcgaattgctcaaccagatggacggtttcgaccaaggcagcaacgtcaaggtcatcatggcaaccaaccgagcagacacactcgacccagcgcttcttcgacccggtcggttggatcgaaagattgaattcccaacaccatcacgtcgtgagaagcgtcttattttccagaccatctgcggcaagatgaacttgagtccagaggtcgacctcgaggactacgttgggcgacccgacaagctttccagcgccgagatcgccagtatttgccaggcggcaggtttgcaggctgtgcgcaagaaccgatacgtcatcatgcccgaggacttcgaggaagcgtggaagcagatcgtcaagaagccggacgactcgaagatggatttctaccagtag

SEQ ID NO: 4998 - protein, 386 aa, Ustilago hordei
MQAEEDTYLRYKKLQQHLEFLNTMEEYVKDEQRNLKRELVRAQEEVKRIQSVPLVIGQFLEPIDQHTGIVGSTTGSNYVVRILSTIDRELLKASSSVALHRHSNALVDVLPPEADSSIAMLGQDEKPTETYQDIGGMDIQKQEIREAVELPLVQFDLYLQIGIDPPRGVLLYGPPGTGKTMLVKAVANATTASFIRVVGSEFVQKYLGEGPRMVRDVFRLARENAPAIIFIDEIDAIATKRFDAQTGADREVQRILLELLNQMDGFDQGSNVKVIMATNRADTLDPALLRPGRLDRKIEFPTPSRREKRLIFQTICGKMNLSPEVDLEDYVGRPDKLSSAEIASICQAAGLQAVRKNRYVIMPEDFEEAWKQIVKKPDDSKMDFYQ

SEQ ID NO: 4999 - DNA, 1338 bp, Medicago truncatula
  CDS (1)..(1338)
atgggtcaaggaacaccaggcggcggtttgaaccggcaaccgggtgaccggaaaccagatggcaacgacaaaaaggacaagaaattcgaaccggccgcaccaccagctcgcgtcggtcgcaaacagcgaaaacaaaagggttctgaggctgcgtcgcggttgccgactgtaactccgttatcgaagtgcaaacttcggttattgaaactggaacgaatcaaagactatttgttgatggaggaagagtttgtagcgaatcaggaacggttgaagcctcaggaagagaaagctgaagaagatagatctaaggttgatgatcttcgtggttcgcctatgagcgttggaaatctcgaagagcttattgatgagaatcatgctattgtttcgagttctgttggaccggagtattatgttgggattttgtcgtttgttgataaggatcaattggaacctggttgcgctatcttgatgcataacaaggttctttctgttgttggacttcttcaagatgaagttgatccaatggtctctgtaatgaaggttgagaaggctcctttggaatcatatgctgacattggtggtttagatgcccagatacaggaaattaaagaagccgtagagcttcccctgacacatcctgaactgtatgaagatattggtatcaagcctccaaagggagtcattttatatggagaacctggtacaggaaagacacttcttgcaaaggctgtggccaactcaacatcagcaacattcttgcgtgttgttggtagtgaattgattcaaaaatacttaggagatggtccaaaacttgtgagggaactttttcgagttgctgatgatctttctccctctattgtctttattgatgaaatagacgctgttggtacaaagaggtatgatgctcactcaggtggagagcgtgaaattcaaaggaccatgttggagttgctgaaccagttagatggttttgattctagaggagatgttaaagttattctcgcaaccaacagaattgaaagcctcgatccagctctgctaagaccaggtcgaatagacaggaagattgaatttcctctccctgatatcaaaactaggagacgcattttcacgatccatacatctaggatgacattagctgatgatgtcaatttagaagaatttgtcatgactaaggatgagttctctggagctgatataaaagcaatatgtaccgaagctggcttacttgctttacgagaacgccgaatgaaggtgacccatgctgattttaaaaaggcaaaagataaagttatgtttaagaagaaagaaggggtgcccgaaggattgtatatgtga

SEQ ID NO: 5000 - protein, 445 aa, Medicago truncatula
MGQGTPGGGLNRQPGDRKPDGNDKKDKKFEPAAPPARVGRKQRKQKGSEAASRLPTVTPLSKCKLRLLKLERIKDYLLMEEEFVANQERLKPQEEKAEEDRSKVDDLRGSPMSVGNLEELIDENHAIVSSSVGPEYYVGILSFVDKDQLEPGCAILMHNKVLSVVGLLQDEVDPMVSVMKVEKAPLESYADIGGLDAQIQEIKEAVELPLTHPELYEDIGIKPPKGVILYGEPGTGKTLLAKAVANSTSATFLRVVGSELIQKYLGDGPKLVRELFRVADDLSPSIVFIDEIDAVGTKRYDAHSGGEREIQRTMLELLNQLDGFDSRGDVKVILATNRIESLDPALLRPGRIDRKIEFPLPDIKTRRRIFTIHTSRMTLADDVNLEEFVMTKDEFSGADIKAICTEAGLLALRERRMKVTHADFKKAKDKVMFKKKEGVPEGLYM

SEQ ID NO: 5001 - DNA, 1335 bp, Solanum tuberosum
  CDS (1)..(1335)
atgggtcaaggaacgcccggtggacttaaccggcaacttcccggagatcggaagaacgacggagacaagaaggagaaaaagtttgagccggctgctccaccggctcgagttggccgtaagcagcgcaaacagaagggacctgaagcggcagctcggctcccgactgttacaccgctgaccaagtgcaagcttcggctactaaagctcgaacggatcaaggattattttttgatggaggaggaattcgtggctaatcaggaaagactgaaacctcaggaagagaaaaccgaagaggatagatctaaggttgatgatctacgtggttctccgatgagcgtggggaatcttgaggagcttattgatgagaaccatgccatagtttcttcttcagttgggccagagtattatgttgggatcttgtcctttgtggataaggaccaattggaacctggttgtgccattttgatgcataataaggttctatctgttgttgggcttctacaagacgatgttgatccaatggtgtctgtcatgaaggttgagaaagctcctttggaatcctacgctgatataggtggattggatgctcagattcaggagattaaagaagctgttgagcttcccttgactcaccctgagctgtatgaagacattggtataaaacctcctaaaggggtcattctctatggggagcccgggactggcaaaaccttgcttgcaaaggcagttgcaaactccacttcggcaactttcttgcgtgttgttggaagtgaactgattcagaaatatttgggagatgggcctaaattggtgagggagctcttcagagttgctgacgatctctcaccttctatcgtcttcattgatgagattgatgcagtccgtaccaagaggtacgatgcacattctggtggtgaacgtgagatccagaggaccatgttagagttgttgaaccagctagatggttttgattccagaggagatgttaaagtgattcttgctacaaataaaatcgagagtcttgatcctgccctactgcgacctggtagaatagacaggaagattgagttccctcttcctgatattaaaacaaggaggcgcatattccagatacacacaggcaagatgactttgtctgatgatgtcaacctagaagaatttgttatgaccaaggatgaattttctggagctgatatcaaggcaatatgtactgaagctggattgcttgctctaagagaacggcgtatgaaggtgattcatgcagatttcaagaaggcaaaagataaggtgatgttcaagaagaaagagggagtgccagaaggactttacatgtag

SEQ ID NO: 5002 - protein, 444 aa, Solanum tuberosum
MGQGTPGGLNRQLPGDRKNDGDKKEKKFEPAAPPARVGRKQRKQKGPEAAARLPTVTPLTKCKLRLLKLERIKDYFLMEEEFVANQERLKPQEEKTEEDRSKVDDLRGSPMSVGNLEELIDENHAIVSSSVGPEYYVGILSFVDKDQLEPGCAILMHNKVLSVVGLLQDDVDPMVSVMKVEKAPLESYADIGGLDAQIQEIKEAVELPLTHPELYEDIGIKPPKGVILYGEPGTGKTLLAKAVANSTSATFLRVVGSELIQKYLGDGPKLVRELFRVADDLSPSIVFIDEIDAVRTKRYDAHSGGEREIQRTMLELLNQLDGFDSRGDVKVILATNKIESLDPALLRPGRIDRKIEFPLPDIKTRRRIFQIHTGKMTLSDDVNLEEFVMTKDEFSGADIKAICTEAGLLALRERRMKVIHADFKKAKDKVMFKKKEGVPEGLYM

SEQ ID NO: 5003 - DNA, 1296 bp, Toxoptera citricida
  CDS (1)..(1296)
  misc_feature (1254)..(1254): n is a, g, c or t
atgactgaagaaggaaccagtaagacattagaagatccatcagtttgggaggacagtgatcgggtagaggatgagattttgctcatgtctaatgaagaaataatatcacgcacacgtcttttagacaacgacataaaagtcatgaaaagtgatgttatgcgaatatctcatgaactgcaatctcaagctgacaagatcaaagaaaacactgaaaaaattaaagtcaacaagacattaccttatttggtatctaatgtgattgaattattagatgttgacccacaagatactgaagaagacggtgctgttgttgatttagacagccaaagaacagggaaatgcgcagttattaaaacatcaacaagacaaacttacttcttacctgttattggtctggtagatccagaacaattaaaaccaggagatttagtcggtgttaacaaagattcgtatctcgtattggaaacattacccgctgaatatgatgcccgtgttaaagcaatggaggttgatgaaagaccaactgaacaatatgtagatattggtggcttggacaaacaaattcaagagctcattgaagctgtggtgttacctatgactcacaaagagaaattcctcaatcttggtatacaaccaccaaaaggagttctgttatatggtccacctggtactggaaaaacacttttagctcgagcatgtgctgctcaaacaaagtcgacctttttaaagcttgctggtccacaattggtacagatgtttattggcgatggggcaaaattagtacgagatgcatttgctttagctaaagaaaaagctcctgctgtaatctttattgatgagctggatgctattggtacaaaacgttttgactctgaaaaagctggtgatcgagaagttcaaagaacaatgttggaacttcttaatcaactggacggttttagttcaacagctgatataaaagtgattgcagctactaacagagtagatattttggatccagcattgttgaggtctggcagattagatagaaaaattgagttcccgcaccccaaccaagaagctcgtgcacgtattatgcaaattcattcaaggaaaatgaacaaatttgatgtcaactttgaagaactttcaagatctactgatgattttaatggtgcacaatgcaaggctgtttgtgttgaagctggtatgattgctttgaggagaggtgcatcaactgttactcatgaagattttatggatgccataatggangttcaagctaaaaagaaatccaacttaaactattatgcttaa

SEQ ID NO: 5004 - protein, 431 aa, Toxoptera citricida
  misc_feature (418)..(418): The Xaa at location 418 stands for Asp, or Glu.
MTEEGTSKTLEDPSVWEDSDRVEDEILLMSNEEIISRTRLLDNDIKVMKSDVMRISHELQSQADKIKENTEKIKVNKTLPYLVSNVIELLDVDPQDTEEDGAVVDLDSQRTGKCAVIKTSTRQTYFLPVIGLVDPEQLKPGDLVGVNKDSYLVLETLPAEYDARVKAMEVDERPTEQYVDIGGLDKQIQELIEAVVLPMTHKEKFLNLGIQPPKGVLLYGPPGTGKTLLARACAAQTKSTFLKLAGPQLVQMFIGDGAKLVRDAFALAKEKAPAVIFIDELDAIGTKRFDSEKAGDREVQRTMLELLNQLDGFSSTADIKVIAATNRVDILDPALLRSGRLDRKIEFPHPNQEARARIMQIHSRKMNKFDVNFEELSRSTDDFNGAQCKAVCVEAGMIALRRGASTVTHEDFMDAIMXVQAKKKSNLNYYA

SEQ ID NO: 5005 - DNA, 1314 bp, Toxoptera citricida
  CDS (1)..(1314)
atgcctgactatttgggcgacgaaatgagaaaagtgaagaaagatgaacccgaaaaagatgaaaaagaaaaagaaattaaatctttggatgaagaggacatagcattacttaaaacatatggtcaaggtcaatggacaattaatgtaaaagcagtagaagatgatatccaaggtatcattaaacgtattaatgaattaactggaattaaagaatcagacacaggattagctcctcctgcattttgggatttaactgctgacaaacagactcttcaaaatgaacaaccattacaggtggccagatgtacaaaaattattaatgctgattcagatgatcctaaatatataattaatgtcaaacaatttgccaagtttgttgtggatctcgcagattctgtagcaccaactgatattgaagaaggaatgcgtgttggagttgaccgcaataagtatcaaattcatattccgcttccacctaaaattgatcctactgttactatgatgcaagttgaagaaaagccagatgttacatattcagatgttggtggatgtaaagaacagatagataaattacgagaagttgttgaaactccattattgcatcctgaaaaatttgtgaacttgggaattgaaccgccaaaaggcgtgttattgtttggaccaccaggaactggtaaaactttatgtgctagagcagttgctaatcgtacagatgcatgtttcatccgagtaattggttctgagcttgttcaaaaatatgttggagagggagcacgaatggttcgtgagttatttgaaatggcacgcagtaagaaagcttgtttgatattctttgatgaaattgatgcaattggtggtgcacgttttgatgacggtgctggtggcgataatgaagtacaaagaactatgttggagcttattaatcagttggatggatttgatcccagaggaaacattaaagttttaatggcaactaatcgaccagatacattagatccagcattgatgcgtcctggacgtcttgatagaaaagttgaatttggtttgcctgatttagaaggtcgaactcatattttcaatattcatgctagagcaatgagtgttgaacgagatattcgttttgaattgttggctagactttgtcccaatagcactggagctgaaataagatccgtatgtactgaagctggtatgtttgcaataagagctcgccgaaaagttgctactgaaaaagatttcctagaagctgtaaataaggtcatcaaatcatatgctaagttctcttctactccacgttatatgacatacaactaa

SEQ ID NO: 5006 - protein, 437 aa, Toxoptera citricida
MPDYLGDEMRKVKKDEPEKDEKEKEIKSLDEEDIALLKTYGQGQWTINVKAVEDDIQGIIKRINELTGIKESDTGLAPPAFWDLTADKQTLQNEQPLQVARCTKIINADSDDPKYIINVKQFAKFVVDLADSVAPTDIEEGMRVGVDRNKYQIHIPLPPKIDPTVTMMQVEEKPDVTYSDVGGCKEQIDKLREVVETPLLHPEKFVNLGIEPPKGVLLFGPPGTGKTLCARAVANRTDACFIRVIGSELVQKYVGEGARMVRELFEMARSKKACLIFFDEIDAIGGARFDDGAGGDNEVQRTMLELINQLDGFDPRGNIKVLMATNRPDTLDPALMRPGRLDRKVEFGLPDLEGRTHIFNIHARAMSVERDIRFELLARLCPNSTGAEIRSVCTEAGMFAIRARRKVATEKDFLEAVNKVIKSYAKFSSTPRYMTYN

SEQ ID NO: 5007 - DNA, 1227 bp, Toxoptera citricida
  CDS (1)..(1227)
atgacgcctaatccacccgagttcatggaggtggatcaaaatagtagttctaggggagatggttttaaatcatactatacaactaaaatcgaagaactgttattagttgtagcagaaaaaagtatgaatctcagacgtttacaagctcagaggaatgaactcaatgctaaagtaagattgttgagagaagaactgcaattacttcaagaacaaggttcttatgtaggcgaagtagtgaagccaatggataaaaaaaaggtgcttgttaaagtgcatccagaaggaaaatttgtcgtagacattgataaaaacattgatatcaatgatgttacaccgaattgtcgagtagcattgcgtaatgaaagttacacattgcacaaaattctacctaataaggtggatcctttggtttctcttatgatggttgaaaaagtaccagattccacttatgaaatggttggtggattagatacacaaatcaaagaaattaaagaggttattgaattacccgtcaaacatcccgaattgtttgacgctcttggtattgcccaaccaaaaggtgtattgttgtacggacctcctggaactggtaaaactttattggctagagcggttgctcatcacacagagtgtacatttattagagtatctggttctgaacttgtacagaaatttattggtgaaggttcaagaatggtcagagaactcttcgtcatggctagagaacatgcgcctagtattatttttatggatgaaattgattctatcggttcgtcacgtattgaatctggtagtggtggtgattctgaagtacaaagaactatgttggagctgctcaatcaacttgatggtttcgaagcaactaagaacattaaggtcataatggcaaccaatcgtattgatattttggatacggctctgttacgtcctggacgtattgatcgtaaaattgagttccctccaccaaatgaagaagctcgttgggatattttgcgtattcattctagaaaaatgaacttaacaagaggtattaatctaaaaaaaattgctgaactcatgcctggagcgtctggagctgaagttaagggcgtctgcacagaagctggaatgtacgcattacgtgaaagacgtgtgcacgtaacacaagacgattttgaaatggcagttgctaaagtaatgcaaaaggactctgaaaaaaatatgtctatcaagaagctttggaaataa

SEQ ID NO: 5008 - protein, 408 aa, Toxoptera citricida
MTPNPPEFMEVDQNSSSRGDGFKSYYTTKIEELLLVVAEKSMNLRRLQAQRNELNAKVRLLREELQLLQEQGSYVGEVVKPMDKKKVLVKVHPEGKFVVDIDKNIDINDVTPNCRVALRNESYTLHKILPNKVDPLVSLMMVEKVPDSTYEMVGGLDTQIKEIKEVIELPVKHPELFDALGIAQPKGVLLYGPPGTGKTLLARAVAHHTECTFIRVSGSELVQKFIGEGSRMVRELFVMAREHAPSIIFMDEIDSIGSSRIESGSGGDSEVQRTMLELLNQLDGFEATKNIKVIMATNRIDILDTALLRPGRIDRKIEFPPPNEEARWDILRIHSRKMNLTRGINLKKIAELMPGASGAEVKGVCTEAGMYALRERRVHVTQDDFEMAVAKVMQKDSEKNMSIKKLWK

SEQ ID NO: 5009 - DNA, 1230 bp, uncultured archaeon GZfos26E7
  CDS (1)..(1230): transl_table=11
atggatttggaaatggacgttgatgcggatatagactcaacagagttctccaagtatgtcgtggatcgcatgcagcaactcgaattgaaaaataacctgctcgagaagcagtaccagaaggtcgagactgaaaaacagcttgctgaagaccagcgattgaagtacgagcgcgaacttagaaaactgcggagtgaactggataaactgaaaacaaccccgcagctggtcggaacgctcgtaaacgttcttgaggagggtaaatcgattgtgcgatcgagcacaggtcctgaattcatcgtagggagttcccagttcatcaaagacggcgatctcaaacccggcgtgcaggttgcgcttaataaggagcatctgtcgatcgttgcggtcatccccggatcggaagaccccctggtgcaggcaatggaggtcatagaatctcctgacatcgattacaaccagatcggagggcttgataaacagattgaggtactcaggggtgctgttgaatttgcactcactaaaccagagatattcgaacgcatcggcatcgatcccccgaaaggcgttctgctgttcggtccaccaggcacgggaaagacccttcttgcaaaagcggttgccacccggactgatgccacattcatccgcgtggtcggttcggaactcgttcagaagtacatcggtgagggcgcacgtatggtgcgtgacgtattcgagatggcgcggaaaaaagcgcccgcgatcatattcatcgatgaactggactcgattggagcggtacggctcgatgatgccagttccggcggaagggaggttcagcgtacgctcatgcaactcctatcagagatggacggattcaattcgagaggcgatgtctgcatccttgcagcaaccaacaggtgggatatactcgatcccgcgctgatccgcccaggacgtttcgaccgactggtctacgtgcccataccggatcgtgaagcacgcgtcaagatcctgctcatccacacaaaaaagatgcgacttgcaggcgatgtcgattttgatcgcattgtgacactgaccgaggacgcgaacggcgctactttacgtgcgatcgtgatggaagcgggcatgtgtgcggtgcgcgaggatgcggatgcggtataccagaaggatttcgaggatgcgatcaagcacataatgaaccccgagggcatggtagaccggtattcagaaggcatgtttgcgtga

SEQ ID NO: 5010 - protein, 409 aa, uncultured archaeon GZfos26E7
MDLEMDVDADIDSTEFSKYVVDRMQQLELKNNLLEKQYQKVETEKQLAEDQRLKYERELRKLRSELDKLKTTPQLVGTLVNVLEEGKSIVRSSTGPEFIVGSSQFIKDGDLKPGVQVALNKEHLSIVAVIPGSEDPLVQAMEVIESPDIDYNQIGGLDKQIEVLRGAVEFALTKPEIFERIGIDPPKGVLLFGPPGTGKTLLAKAVATRTDATFIRVVGSELVQKYIGEGARMVRDVFEMARKKAPAIIFIDELDSIGAVRLDDASSGGREVQRTLMQLLSEMDGFNSRGDVCILAATNRWDILDPALIRPGRFDRLVYVPIPDREARVKILLIHTKKMRLAGDVDFDRIVTLTEDANGATLRAIVMEAGMCAVREDADAVYQKDFEDAIKHIMNPEGMVDRYSEGMFA

SEQ ID NO: 5011 - DNA, 1494 bp, uncultured archaeon GZfos18C8
  CDS (1)..(1494): transl_table=11
gtgcgaaatgtgatgcctgccggcaccctacctgccgataccttacccgctggcactcttccggtggcagtggcttttggcacctgcttgacctcgtgcccgtattttgcacaagcgtcacagacgtttaactcggtaccctcgaggatcacccgatgcgcttttccgcggatgttgcttccgcatatttcgcattgcataggaatagcgtatcatcccatcttccataaaggtttatgtgttgtcaggatattcagtcttataatggatttggaaatggacgttgatgcggatatagactcaacagagttctccaagtatgtcgtggatcgcatgcagcaactcgaattgaaaaataacctgctcgagaagcagtaccagaaggtcgagactgaaaaacagcttgctgaagaccagcgattgaagtacgagcgcgaacttagaaaactgcggagtgaactggataaactgaaaacaaccccgcagctggtcggaacgctcgtaaacgttcttgaggagggtaaatcgattgtgcgatcgagcacaggtcctgaattcatcgtagggagttcccagttcatcaaagacggcgatctcaaacccggcgtgcaggttgcgcttaataaggagcatctgtcgatcgttgcggtcatccccggatcggaagaccccctggtgcaggcaatggaggtcatagaatctcctgacatcgattacaaccagatcggagggctggataaacagattgaggtactcaggggtgctgttgaatttgcactcaccaaaccagagatattcgaacgcatcggcatcgatcccccgaaaggcgttctgctgttcggtccaccaggcacgggaaagacccttcttgcaaaagcggttgccacccggactgatgccacattcatccgcgtggtcggttcggaactcgttcagaagtacatcggtgagggcgcacgtatggtgcgtgacgtattcgagatggcgcggaaaaaagcgcccgcgatcatattcatcgatgaactggactcgattggagcggtacggctcgatgatgccagttccggcggaagggaggttcagcgtacgctcatgcaacttctggcagagatggacggattcaattcgagaggcgatgtctgcatccttgcagcaaccaacaggtgggatatactcgatcccgcgctgatccgcccaggacgtttcgaccggctggtctacgtgcccataccggatcgtgaagcacgcgtcaagatcctgctcatccacacaaaaaagatgcgacttgcaggcgacgtcgattttgatcgcattgtgacactgaccgaggacgcgaacggcgctactttacgtgcgatcgtgatggaagctggtatgtgtgcggtgcgtgaggatgcggatgcggtataccagaaggatttcgaggatgcgatcaagcacataatgaaccccgagggcatggtagaccggtattcagaaggcatgtttgtgtga

SEQ ID NO: 5012 - protein, 497 aa, uncultured archaeon GZfos18C8
MRNVMPAGTLPADTLPAGTLPVAVAFGTCLTSCPYFAQASQTFNSVPSRITRCAFPRMLLPHISHCIGIAYHPIFHKGLCVVRIFSLIMDLEMDVDADIDSTEFSKYVVDRMQQLELKNNLLEKQYQKVETEKQLAEDQRLKYERELRKLRSELDKLKTTPQLVGTLVNVLEEGKSIVRSSTGPEFIVGSSQFIKDGDLKPGVQVALNKEHLSIVAVIPGSEDPLVQAMEVIESPDIDYNQIGGLDKQIEVLRGAVEFALTKPEIFERIGIDPPKGVLLFGPPGTGKTLLAKAVATRTDATFIRVVGSELVQKYIGEGARMVRDVFEMARKKAPAIIFIDELDSIGAVRLDDASSGGREVQRTLMQLLAEMDGFNSRGDVCILAATNRWDILDPALIRPGRFDRLVYVPIPDREARVKILLIHTKKMRLAGDVDFDRIVTLTEDANGATLRAIVMEAGMCAVREDADAVYQKDFEDAIKHIMNPEGMVDRYSEGMFV

SEQ ID NO: 5013 - DNA, 1239 bp, Antonospora locustae
  CDS (1)..(1239)
  misc_feature (234)..(234): s is g or c
  misc_feature (236)..(236): s is g or c
atgggagatgcaaagccagtttcagaccaagacgtgggatttcttctaagctacggaaaaaattattacgcagacgaaataggcgaggtccagagccaaataaacactatttttgatcaagtatctgtgaagcttgggacaaaggaggtggaaacaggccttgcgccgccttcgctatgggacttgacaggagacaggagccggcagcttactgagcagacgctacaggtggcscstgttcagaaaatactcgatggagagaaggaccagaagtatgttatcaatgtcaggcagatggcgaagtttgtagttagcagaaacaaaaggcttgggagggatctaattgaggaaggaatgcgtgtgggtgttgacagggcaaagtacagcatcatgatgcctcttcccagaaagatcgatgcatctgttacgcttatgcaagttgaagaaagacctgacatcacatacaacgacattgggggatgcaaggaggagatagaaaagatcagagaggttgtggagatgccacttttgaaccccgagaagttcatcaaccttggaatagatccgccaaaaggtgttttactttacgggccgcccggaacaggtaagactctgctagcaagggcggttgcaaatcggacagacgcatgttttataagagtaataggctcagaacttgttcagaagtacgttggagagggtgcgcgcatggtgcgtgaaatttttgagctagccaagtctaaaaaggctgcaatcatattttttgacgaagtggatgcctttggaggaacaaggtttgaggatagtggtgaaaacgaagtgcagaggacaatgctggagctaatcaaccagctagacggctttgattctcgtggaaatatcaaagtgctgatggcaactaatcgtccggacacattgcaccctgctcttcttcgccccggaagactggacagaaaggtggagtttggccttccagacgcggagggaaggactcagatactgaagatccatgcaaagacaatgagtgttgaaaagaatattcggtatgatcttattgcgagaatgtgtccaaactctacaggtgctgagctgagaagtgtgtgcacagaggcaggtatgtttgcaataagagaaaggcgtaagatagcaactgagaacgacttcatggcagcagtcgacaaggtggtcaagggatacgccaagttttcggcaacaccaaaataccttacgtataattaa

SEQ ID NO: 5014 - protein, 412 aa, Antonospora locustae
  misc_feature (79)..(79): The Xaa at location 79 stands for Arg, or Pro.
MGDAKPVSDQDVGFLLSYGKNYYADEIGEVQSQINTIFDQVSVKLGTKEVETGLAPPSLWDLTGDRSRQLTEQTLQVAXVQKILDGEKDQKYVINVRQMAKFVVSRNKRLGRDLIEEGMRVGVDRAKYSIMMPLPRKIDASVTLMQVEERPDITYNDIGGCKEEIEKIREVVEMPLLNPEKFINLGIDPPKGVLLYGPPGTGKTLLARAVANRTDACFIRVIGSELVQKYVGEGARMVREIFELAKSKKAAIIFFDEVDAFGGTRFEDSGENEVQRTMLELINQLDGFDSRGNIKVLMATNRPDTLHPALLRPGRLDRKVEFGLPDAEGRTQILKIHAKTMSVEKNIRYDLIARMCPNSTGAELRSVCTEAGMFAIRERRKIATENDFMAAVDKVVKGYAKFSATPKYLTYN

SEQ ID NO: 5015 - DNA, 1389 bp, Neurospora crassa
  CDS (1)..(1389)
atgtcgacccttgaggaactcgacgacctcgatcgccgtgagcgcgaggacaagaagaaggatcaggacaaggataagaacaacaagaaagagggagatggcgatgccgagatgaaggatgccgagcccgaggccgatgacatcctagatgaggagatcctgagtttgagcacagaggacatcctgatgcggaagcgcctcctcgagaacgatgccagaatcatgaagagcgaataccagcggttatcacatgagagggctaccatgaaggacaagatcaaggagaaccaagaaaagattgccaacaaccgacaacttccgtatctcgtaggaaatgtcgttgaacttttggaccttgacccgaccgccgagtcctccgaagagggcgccaacatcgacttggatgccacgcgcgtgggtaaatcggcagtcatcaagacatcgaccagacagaccatctttctccctctcatcggcttggtcgaccccgagaagttgaagcccggcgatctcatcggtgttaacaaggattcgtaccttattctggatacgttgcccgccgagtacgacagcagagtcaaggctatggaggtcgacgagaagcctcaggagaagtacacagatgtcggtggtctcgacaaacagattgacgaacttgtcgaggctattgtgtggcctatgaaggaagccgaacggtttaagaagatcggtatcaaggcgcccaagggaataggagctttgatgtacggacctcccggaacaggcaagactttacttgccagagcttgcgccgctcagacagatgccacattcctcaagcttgctggcccccagctagtgcagatgtttatcggagacggtgccaagctcgtaagggactgcttcgccctagcaaaagagaaggccccgtcaattatcttcatcgacgagttggatgccgtcggtaccaagcgtttcgacagcgagaagtccggcgatcgtgaagtccagcgaaccatgttggagctcctcaaccagctcgacggtttcgcttctgacgaccgtatcaaggttctcgccgcgacgaaccgtatcgacgtcctcgaccccgctttgcttcgttccggtcgtcttgaccgcaagatcgagttccctcttccgaacgaggaggcacgcgcacagattctcaagattcattccaggaagatgaaggtcaaccccggcgttaactggggcgagttggcgcgcagcacggatgagtttggcggtgccatgctgaaggctgtgtgtgtcgaggctggcatgattgccctccgtatgggcaagaatcagattggacacgaacactacgttgacgctatttctgaggtgcaggccaagaagaaggaaaccgtcaacttctacgcttaa

SEQ ID NO: 5016 - protein, 462 aa, Neurospora crassa
MSTLEELDDLDRREREDKKKDQDKDKNNKKEGDGDAEMKDAEPEADDILDEEILSLSTEDILMRKRLLENDARIMKSEYQRLSHERATMKDKIKENQEKIANNRQLPYLVGNVVELLDLDPTAESSEEGANIDLDATRVGKSAVIKTSTRQTIFLPLIGLVDPEKLKPGDLIGVNKDSYLILDTLPAEYDSRVKAMEVDEKPQEKYTDVGGLDKQIDELVEAIVWPMKEAERFKKIGIKAPKGIGALMYGPPGTGKTLLARACAAQTDATFLKLAGPQLVQMFIGDGAKLVRDCFALAKEKAPSIIFIDELDAVGTKRFDSEKSGDREVQRTMLELLNQLDGFASDDRIKVLAATNRIDVLDPALLRSGRLDRKIEFPLPNEEARAQILKIHSRKMKVNPGVNWGELARSTDEFGGAMLKAVCVEAGMIALRMGKNQIGHEHYVDAISEVQAKKKETVNFYA

SEQ ID NO: 5017 - DNA, 1209 bp, Dermacentor variabilis
  CDS (1)..(1209)
atggcggcggctgcagtgactactccgccggtggctcctgtgggagaccaaatcgagaaatatcgcgaagactaccgaaagaagttgacggagcacaaggaggtggagagcaggctcaaggaaatgcgtgagcagctgaaggaactgaacaaacagtatgaaaagtctgagaatgacctgaaggctcttcaaagtgttggccagattgttggtgaagtactgaagcaacttacagaagaaaaatttattgtaaaggcaaccaacgggccacgctatgtggtcggatgccgacgacagttggacaaagccaagctcaagccagggacacgtgtggctctggatatgaccacactaacaatcatgaggtacctccctcgggaggtggacccattggtgtataacatgtcacacgaagaccccggcaacatctcttactccatgattggaggtcttgccgagcagatccgcgagctgcgagaggtgattgagctgcccctgctgaaccccgagctgttccagcgtgtgggcatcacccctcccaaaggctgcctgctgtatgggcccccgggcactgggaaaacacttctcgcccgtgctgttgcaagccagattgaagccaatttcctcaaggtggtttcaagtgccatcgtcgacaagtacattggggagagtgcaagactcatccgcgagatgttcaactatgctcgcgaccatcaaccctgcgtcatcttcatggacgagattgatgccattggtggccgtaggttctctgaaggaacatccgccgaccgagaaatccagaggaccctcatggagcttttgaaccagatggacggcttcgactccctgggacaggtcaagatcatcatggctacgaacaggcccgacacccttgaccctgcactcctgcgtcctggtcgccttgaccgcaaaattgagatcccgctgccaaacgaacaagcccggctcgacatcgtcaagatccatgccacacccatcacaaagcatggcgaagttgactgggaggctgtggtgaagctttcagatggcttcaacggtgcagatctgcgcaacgtgtgcactgaagctggtatgtttgccattcgtgccgaccgggagttcgtcattgaggaagacttcatgaaggcggtgcgtaaggtggccgacaacaagaagctagaatccaagctggactacaagccggtgtag

SEQ ID NO: 5018 - protein, 402 aa, Dermacentor variabilis
MAAAAVTTPPVAPVGDQIEKYREDYRKKLTEHKEVESRLKEMREQLKELNKQYEKSENDLKALQSVGQIVGEVLKQLTEEKFIVKATNGPRYVVGCRRQLDKAKLKPGTRVALDMTTLTIMRYLPREVDPLVYNMSHEDPGNISYSMIGGLAEQIRELREVIELPLLNPELFQRVGITPPKGCLLYGPPGTGKTLLARAVASQIEANFLKVVSSAIVDKYIGESARLIREMFNYARDHQPCVIFMDEIDAIGGRRFSEGTSADREIQRTLMELLNQMDGFDSLGQVKIIMATNRPDTLDPALLRPGRLDRKIEIPLPNEQARLDIVKIHATPITKHGEVDWEAVVKLSDGFNGADLRNVCTEAGMFAIRADREFVIEEDFMKAVRKVADNKKLESKLDYKPV

SEQ ID NO: 5019 - DNA, 1194 bp, Rhipicephalus appendiculatus
  CDS (1)..(1194)
atgccgtcacctgagccgcccttgtcgtacccacagttgcacaaacttcgcatagactaccgtaagaagttgaccgagtgcaaggaggtcgagagcaaactcaaagacgtgcgcgagcagctgaaggaactgaacaaacagtacgaaaagtccgagaatgacctgaaggctcttcaaagtgtgggccagattgttggcgaagtgctgaagcagcttacggaagaaaaatttattgtaaaggcaaccaacgggccgcgctatgtggtcggatgccggcggcagttggacaaggccaagctgaagtccgggacgcgtgtggcgctggacatgaccacactgacgatcatgaggtaccttcctcgagaggtagacccactggtgtacaacatgtcgcacgaggaccccggcaacatctcctactccatgatcggaggtctcgccgagcagatccgcgagctgcgagaggtgattgagctgcccctgctcaaccccgagctgttccagcgtgtgggcatcacccctcccaagggctgcctgctgtacggtcccccgggcactggaaagacccttcttgcccgtgctgtcgcgagccagatcgaagccaacttcctcaaggtggtttcaagtgccatcgtcgacaagtacatcggggagagtgcccgactcatccgcgagatgttcaactacgcccgtgaccatcaaccctgcgtcattttcatggacgagacgatgccattggtggccgtaggttctcggaagggacgtggcggtgaccgagagatccagaggaccctcatggagctcctgaaccagatggacggcttcgactccctgggacaggtcaagatcatcatggccacaaacagacccgacaccctcgaccctgcactgctgcgtcctggtcgccttgaccgcaaaattgagatcccactgcccaatgaacaagcccggcttgacattgtcaagattcatgccacgcccatcacgaagcacggcgaagttgactgggaggccgtggtgaagctttcggacggattcaacggcgcagatcttcgcaacgtgtgcactgaagctggtatgttcgccatccgtgccgatcgggagtttgtcattgaggaagacttcatgaaggcagtgcgcaaggtggccgacaacaagaagctagaatccaagctggactacaagccggtataa

SEQ ID NO: 5020 - protein, 397 aa, Rhipicephalus appendiculatus
MPSPEPPLSYPQLHKLRIDYRKKLTECKEVESKLKDVREQLKELNKQYEKSENDLKALQSVGQIVGEVLKQLTEEKFIVKATNGPRYVVGCRRQLDKAKLKSGTRVALDMTTLTIMRYLPREVDPLVYNMSHEDPGNISYSMIGGLAEQIRELREVIELPLLNPELFQRVGITPPKGCLLYGPPGTGKTLLARAVASQIEANFLKVVSSAIVDKYIGESARLIREMFNYARDHQPCVIFMDETMPLVAVGSRKGRGGDREIQRTLMELLNQMDGFDSLGQVKIIMATNRPDTLDPALLRPGRLDRKIEIPLPNEQARLDIVKIHATPITKHGEVDWEAVVKLSDGFNGADLRNVCTEAGMFAIRADREFVIEEDFMKAVRKVADNKKLESKLDYKPV

SEQ ID NO: 5021 - DNA, 1275 bp, Arabidopsis thaliana
  CDS (1)..(1275)
atggcaactcctatggttgaagatacgtcaagcttcgaagaggatcagcttgcttccatgtccaccgaagatatcactagagctactcgtcttctcgacaacgagattcgaattctcaaggaagacgcgcaaagaacaaatctagaatgtgattcttacaaggagaagattaaggagaatcaggagaagattaaactcaacaagcagctgccttacttggttggcaacattgtcgagattttggagatgaatccagaagatgatgctgaggaagatggtgcaaatattgatcttgactcgcaacggaaaggaaaatgtgttgtgttgaaaacgtctacacggcagaccatctttctaccagttgttggactcgtggatcctgatagtttgaaacctggtgacttggttggagttaacaaagatagctacttgattttggataccttgccatccgagtatgactctagggttaaagccatggaggtcgatgaaaaaccaactgaagattacaatgacattggaggactagagaagcagatccaagagcttgtagaggcaattgtgcttcccatgacgcacaaggaacgttttgagaagctgggtgttcgtccaccaaagggagtgctcttgtatggtcccccagggactggtaaaactttaatggctcgtgcctgcgcagcacagaccaatgccaccttccttaaattggcaggccctcaattggtccagatgttcattggagacggagcaaagcttgtccgtgatgcctttcaacttgccaaagagaaagctccgtgcattatcttcatatatgaaatcgatgccattggtacaaagcgtttcgacagtgaagtcagcggagacagggaagtgcagaggactatgttggagttgctcaatcaacttgacggattcagtagcgatgaacgtattaaggtgattgcagctactaaccgtgcagatattctggacccagcactcatgcgttctggtcgattagacagaaagattgagttcccacacccaaccgaagaagcgagagcaagaatcttgcagattcactcaaggaagatgaatgtccacccagacgtcaactttgaggagcttgcacgatcaacagatgatttcaatggagctcagctgaaagcagtgtgtgtagaggcaggcatgttagctcttcgccgtgatgccacagaggtgaaccatgaagacttcaatgaaggtatcatccaagtccaggccaagaagaaagcaagcttgaactactacgcctga

SEQ ID NO: 5022 - protein, 424 aa, Arabidopsis thaliana
MATPMVEDTSSFEEDQLASMSTEDITRATRLLDNEIRILKEDAQRTNLECDSYKEKIKENQEKIKLNKQLPYLVGNIVEILEMNPEDDAEEDGANIDLDSQRKGKCVVLKTSTRQTIFLPVVGLVDPDSLKPGDLVGVNKDSYLILDTLPSEYDSRVKAMEVDEKPTEDYNDIGGLEKQIQELVEAIVLPMTHKERFEKLGVRPPKGVLLYGPPGTGKTLMARACAAQTNATFLKLAGPQLVQMFIGDGAKLVRDAFQLAKEKAPCIIFIYEIDAIGTKRFDSEVSGDREVQRTMLELLNQLDGFSSDERIKVIAATNRADILDPALMRSGRLDRKIEFPHPTEEARARILQIHSRKMNVHPDVNFEELARSTDDFNGAQLKAVCVEAGMLALRRDATEVNHEDFNEGIIQVQAKKKASLNYYA

SEQ ID NO: 5023 - DNA, 1197 bp, Solanum tuberosum
  CDS (1)..(1197)
atggcgaccgaagaagacgccgtccgacgccgtactgcactggccgattatcggaaaaagctccttcagcacaaggagcttgatgctcgggttcggacagtgagagagaacttgcgggctaccaaaaaggaatatgctaaaacagaagatgatttgaagtcacttcagagtgttggacagatcataggagaagtgctccgacctctagataatgagcgtttgatagtaaaagctagcagcggtccgaggtatgtggttggctgtcgcagtaaagttgacaaggaaaaactgacttcaggcacacgagtggttctcgatatgacaacacttacaatcatgcgggcactcccccgtgaagttgatcctgttgtatacaacatgcttcatgaagatcctggcaacatcagttactctgccgtgggtggactgtcagatcagatcagggagctgagagaatccattgagttacctctaatgaaccctgagcttttcctccgggttgggattaagcctccaaagggtgttcttctctacgggccacctggaacaggcaagacattgttagccagggcaatcgctagcaacatagatgccaatttcttaaaggttgtatcaagtgccattattgataagtacattggtgagagtgcaagattaattcgggaaatgtttaactatgctcgtgatcaccaaccctgcatcatattcatggatgagatagatgcaattggtggacgtcgttttagtgagggaaccagtgcagaccgtgaaatccaaagaacgctcatggagttgctcaatcagttggatggatttgaccagcttggaaaggtaaaaatgattatggcaacaaatagacctgatgttttggacccagctcttcttcgtcctggtcgattagatagaaagatagaaatacccttgcctaatgaacaatcaagaatggaaatcctcaagatccatgctgctgggattgccaaacatggtgaaattgattatgaggctgctattaagctcgctgagggatttaatggggctgatatgcggaatgtttgcactgaagccggtatgtttgcaattcgtgcagagcgtgattatgtcatccatgaggatttcatgaaggctgtaaggaaactgaatgaagcaaagaaacttgaatcaagtgctcactacagtgctgattttggtaaggaataa

SEQ ID NO: 5024 - protein, 398 aa, Solanum tuberosum
MATEEDAVRRRTALADYRKKLLQHKELDARVRTVRENLRATKKEYAKTEDDLKSLQSVGQIIGEVLRPLDNERLIVKASSGPRYVVGCRSKVDKEKLTSGTRVVLDMTTLTIMRALPREVDPVVYNMLHEDPGNISYSAVGGLSDQIRELRESIELPLMNPELFLRVGIKPPKGVLLYGPPGTGKTLLARAIASNIDANFLKVVSSAIIDKYIGESARLIREMFNYARDHQPCIIFMDEIDAIGGRRFSEGTSADREIQRTLMELLNQLDGFDQLGKVKMIMATNRPDVLDPALLRPGRLDRKIEIPLPNEQSRMEILKIHAAGIAKHGEIDYEAAIKLAEGFNGADMRNVCTEAGMFAIRAERDYVIHEDFMKAVRKLNEAKKLESSAHYSADFGKE

SEQ ID NO: 5025 - DNA, 1332 bp, Arabidopsis thaliana
  CDS (1)..(1332)
atgggtcaaggaccttccggcggattgcatcggcaaggagatcggaaaccagatggtggagagaagaaggagaagaagttcgaaccagccgcaccacctgctcgtgtagggaggaagcaacggaagcagaaaggacctgaagcggcggcgagattgccgacggtgactccttctactaaatgtaagcttcgattgctgaaattggagcgaatcaaggactatttgcttatggaggaagagttcgtagcgaatcaggagagattgaaacctcaggaagagaaagctgaggaagatagatctaaagttgatgatcttcgtggtacacctatgagtgttggcaatcttgaagagcttattgatgagaatcacgccattgtttcttcttcggttggtcctgagtactacgttggcattttgtctttcgttgataaggatcagcttgaacctggctgctctattttgatgcataacaaggtactctctgttgttgggattcttcaagatgaagtggatccaatggtgtctgtgatgaaagtggagaaggctcctttggagtcatatgctgacattggaggtttagaagctcagattcaggagattaaggaagctgttgagttacctttaacacatcccgagctgtatgaagatattggaattaagccaccaaaaggtgtgatcttgtatggtgagccaggcactgggaagacattgcttgctaaggcagtggcaaattctacttcagctactttcttgcgtgttgtcggtagtgaactgattcagaagtatttaggagatggtcccaagcttgtgagggaacttttcagggttgctgatgacctttctccttctattggtttcatagacgagattgatgctgttggcaccaagcggtatgacgcaaactcaggtggggaacgtgaaatccaaagaaccatgttggaactactgaaccagcttgatgggtttgattcaagaggagatgttaaggttattctcgcgacaaacaggatcgagagtcttgacccggcacttcttagaccaggccggatcgacaggaaaatcgaattccctcttccagatatcaaaacaagaagacgtatcttccagatacacacatcaaagatgactttggctgaagatgtgaacttagaagagtttgtaatgacaaaagacgagttctcaggagctgatataaaggcaatatgcacagaagctggtctgcttgctcttagagagcgtcggatgaaagtgacgcatgtggacttcaagaaggcgaaggagaaggttatgttcaagaagaaagaaggagttcctgaaggtctttacatgtga

SEQ ID NO: 5026 - protein, 443 aa, Arabidopsis thaliana
MGQGPSGGLHRQGDRKPDGGEKKEKKFEPAAPPARVGRKQRKQKGPEAAARLPTVTPSTKCKLRLLKLERIKDYLLMEEEFVANQERLKPQEEKAEEDRSKVDDLRGTPMSVGNLEELIDENHAIVSSSVGPEYYVGILSFVDKDQLEPGCSILMHNKVLSVVGILQDEVDPMVSVMKVEKAPLESYADIGGLEAQIQEIKEAVELPLTHPELYEDIGIKPPKGVILYGEPGTGKTLLAKAVANSTSATFLRVVGSELIQKYLGDGPKLVRELFRVADDLSPSIGFIDEIDAVGTKRYDANSGGEREIQRTMLELLNQLDGFDSRGDVKVILATNRIESLDPALLRPGRIDRKIEFPLPDIKTRRRIFQIHTSKMTLAEDVNLEEFVMTKDEFSGADIKAICTEAGLLALRERRMKVTHVDFKKAKEKVMFKKKEGVPEGLYM

SEQ ID NO: 5027 - DNA, 1194 bp, Drosophila melanogaster
  CDS (1)..(1194)
atgaccgtgaccgccacaccgatgccggacaatctgcgggtgaaagccttatccgagtaccgaaagaagttgctagagcacaaggaaatcgagggacgcctcaaagaaaagcgcgaggagatcaaggatctgaccaagctgtacgacaagtcggagaacgatctaaaggccctgcagagcgtgggacagatcgttggtgaggtgctgaagcagctgaccgaggataaattcattgtgaaggccaccaatggaccccgctacgtggtcggctgccgccggcagctggacaaagccaagctgaagtccggaactcgtgtggccctcgacatgaccacactgaccattatgcgctacttgccgcgcgaggtggacccactggtgtacaatatgtcgcacgaggatcccggggatgtcacctactcggccatcggcggcctaaccgaccaaattcgcgagctgcgcgaagtgatcgagctgcccctactgaatccggagctcttcctgcgcgtcggcatcacgccaccgaagggttgtttgctgtacggacctcctggcaccggcaagaccctgctggcccgtgcagtggcctcccagctggacgccaacttcctcaaggtcgtgtcctcggcgattgtcgacaagtatattggcgagagtgcgcgtctcattcgcgagatgttcaactatgcccgcgaccatcagccctgcatcattttcatggacgaaatcgacgctatcggtggtcggcgcttctccgagggcacctctgccgatcgcgagatccagcgcaccctgatggagctgctcaaccagatggacggcttcgattcgcttggccaagtcaagatgatcatggcaaccaatcgtccggactccctcgatcctgcccttctgcgtccgggtcgcttggacaggaagatcgagattccgctgcccaacgagcaggctaggttggaaattctcaagattcacgcactgaagatcgccaagcacggcgaaatcgactacgaggccattgtcaagctgtcggacaactttaatggcgctgatctgcgtaatgtctgcacggaggcgggtctctttgccattcgtgcggagcgggagtacgtcatccagggggacttcatgaaggcggtgcgcaaggtgtcggacaacaagaagttggagagcaagctggactacaagcccgtctag

SEQ ID NO: 5028 - protein, 397 aa, Drosophila melanogaster
MTVTATPMPDNLRVKALSEYRKKLLEHKEIEGRLKEKREEIKDLTKLYDKSENDLKALQSVGQIVGEVLKQLTEDKFIVKATNGPRYVVGCRRQLDKAKLKSGTRVALDMTTLTIMRYLPREVDPLVYNMSHEDPGDVTYSAIGGLTDQIRELREVIELPLLNPELFLRVGITPPKGCLLYGPPGTGKTLLARAVASQLDANFLKVVSSAIVDKYIGESARLIREMFNYARDHQPCIIFMDEIDAIGGRRFSEGTSADREIQRTLMELLNQMDGFDSLGQVKMIMATNRPDSLDPALLRPGRLDRKIEIPLPNEQARLEILKIHALKIAKHGEIDYEAIVKLSDNFNGADLRNVCTEAGLFAIRAEREYVIQGDFMKAVRKVSDNKKLESKLDYKPV

SEQ ID NO: 5029 - DNA, 1341 bp, Tortula ruralis
  CDS (1)..(1341)
atggggcaggggcagtcgggcgggttgccgaagcaggggccaggcggggagcgcaacaagggcgatggccagaagaaggagaagaagtacgagccggccgcgccacccacgcgcgtggggcgcaagcagcgcaagcagaagggctccgaggcggccgcgcgcctgcccgttgtcacgcccgccaccaagtgtaacctgcgcctgctgaagctggaccgtgccaaggactatctgctcatgaaggaggagttcgtccgcacccagaagcgcttgaacccgcaggaggacaagaccgagaaggatcgaagcaaggtcgatgatctccgaggctcgcccatgagcgtgggcaacctggaggagatcatcgatgagaatcacgcgattgtgtcttcctctgttgggcctgagtattatgtgaatatcttgtcgttcgtggataaggatcaacccgggcccgggtgcgccattcttatgcacaacaaggttctctcagttgtggggttattgcaagatgatgtggacccgatggtttcagtgatgaaggttgagaaagcccctctggagtcatacgctgatattggtggactagatcctcagattcaggaaatcaaggaagcagtggagctgcccctcacacatcctgagctttacgaggacattggtatcaagccgctcaagggtgttattctgtatggtgaaccgggaactggaaagactcttcttgcaaaggctgttgcgaattcaacgtctgcaacgtttcttcgcgttgttggaagtgagctgatccagaagtatctgggagatggacctaagttggtgcgggagttgtttcgagtcgctgatgaattgtcccccactattgttttcattgatgaaatcgatgctatcggaacaaagagatatgatgcccattctggtggagaacgtgagattcagaggaccatgttggagttgctgaaccagttggatggtttcgattctcgtggagatgtgaaggtcattttggctaccaaccgtatcgaaagtttagacccggctctgcttcgacctggtagaattgatcgcaagatcgagtttccattgccagataccaaaaccaggaggagaattttccagattcacacctctagaatgactatggccgatgatgtaaacctggaggaatttgtgatgactaaggatgaattctctggtgccgacatcaaagctatatgtactgaggctggtcttcttgcattgcgtgagcgccgtatgaaggtgacgcacgctgattttaagaaggccaaagagaaagtgatgtataagaagaaggaaggcgtccctgaaggattatacatgtag

SEQ ID NO: 5030 - protein, 446 aa, Tortula ruralis
MGQGQSGGLPKQGPGGERNKGDGQKKEKKYEPAAPPTRVGRKQRKQKGSEAAARLPVVTPATKCNLRLLKLDRAKDYLLMKEEFVRTQKRLNPQEDKTEKDRSKVDDLRGSPMSVGNLEEIIDENHAIVSSSVGPEYYVNILSFVDKDQPGPGCAILMHNKVLSVVGLLQDDVDPMVSVMKVEKAPLESYADIGGLDPQIQEIKEAVELPLTHPELYEDIGIKPLKGVILYGEPGTGKTLLAKAVANSTSATFLRVVGSELIQKYLGDGPKLVRELFRVADELSPTIVFIDEIDAIGTKRYDAHSGGEREIQRTMLELLNQLDGFDSRGDVKVILATNRIESLDPALLRPGRIDRKIEFPLPDTKTRRRIFQIHTSRMTMADDVNLEEFVMTKDEFSGADIKAICTEAGLLALRERRMKVTHADFKKAKEKVMYKKKEGVPEGLYM

SEQ ID NO: 5031 - DNA, 1332 bp, Arabidopsis thaliana
  CDS (1)..(1332)
atgggtcaaggaccttccggcggattgaatcggcaaggagatcggaaaccagatggtggagagaagaaggagaagaagttcgaaccagccgcaccacctgctcgtgtagggaggaagcaacggaagcagaaaggacctgaagcggcggcgagattgccgacggtgactccttctactaaatgtaagcttcgattgctgaaattggagcgaatcaaggactatttgcttatggaggaagagttcgtagcgaatcaggagagattgaaacctcaggaagagaaagctgaggaagatagatctaaagttgatgatcttcgtggtacacctatgagtgttggcaatcttgaagagcttattgatgagaatcacgccattgtttcttcttcggttggtcctgagtactacgttggcattttgtctttcgttgataaggatcagcttgaacctggctgctctattttgatgcataacaaggtactctctgttgttgggattcttcaagatgaagtggatccaatggtgtctgtggtgaaagtggagaaggctcctttggagtcatatgctgacattggaggtttagaagctcagattcaggagattaaggaagctgttgagttacctttaacacatcccgagctgtatgaagatattggaattaagccaccaaaaggtgtgatcttgtatggtgagccaggcactgggaagacattgcttgctaaggcagtggcaaattctacttcagctactttcttgcgtgttgtcggtagtgaactgattcagaagtatttaggagatggtcccaagcttgtgagggaacttttcagggttgctgatgacctttctccttctattgttttcatagacgagattgatgctgttggcaccaagcggtatgacgcaaactcaggtggggaacgtgaaatccaaagaaccatgttggaactactgaaccagcttgatgggtttgattcaagaggagatgttaaggttattctcgcgacaaacaggatcgagagtcttgacccggcacttcttagaccaggccggatcgacaggaaaatcgaattccctcttccagatatcaaaacaagaagacgtatcttccagatacacacatcaaagatgactttggctgaagatgtgaacttagaagagtttgtaatgacaaaagacgagttctcaggagctgatataaaggcaatatgcacagaagctggtctgcttgctcttagagagcgtcggatgaaagtgacgcatgtggacttcaagaaggcgaaggagaaggttatgttcaagaagaaagaaggagttcctgaaggtctttacatgtga

SEQ ID NO: 5032 - protein, 443 aa, Arabidopsis thaliana
MGQGPSGGLNRQGDRKPDGGEKKEKKFEPAAPPARVGRKQRKQKGPEAAARLPTVTPSTKCKLRLLKLERIKDYLLMEEEFVANQERLKPQEEKAEEDRSKVDDLRGTPMSVGNLEELIDENHAIVSSSVGPEYYVGILSFVDKDQLEPGCSILMHNKVLSVVGILQDEVDPMVSVVKVEKAPLESYADIGGLEAQIQEIKEAVELPLTHPELYEDIGIKPPKGVILYGEPGTGKTLLAKAVANSTSATFLRVVGSELIQKYLGDGPKLVRELFRVADDLSPSIVFIDEIDAVGTKRYDANSGGEREIQRTMLELLNQLDGFDSRGDVKVILATNRIESLDPALLRPGRIDRKIEFPLPDIKTRRRIFQIHTSKMTLAEDVNLEEFVMTKDEFSGADIKAICTEAGLLALRERRMKVTHVDFKKAKEKVMFKKKEGVPEGLYM

SEQ ID NO: 5033 - DNA, 1275 bp, Brassica campestris
  CDS (1)..(1275)
atggcaactccgatggtagaagacacgtcaagcttcgaagaggatcagctcgcgtccatgtccaccgaagacatcgttagagctactcgtctcctcgacaacgagattcgaattctcaaggaagacgcacaaagaacaaatcttgaatgtgattcttacaaggagaagataaaggagaatcaggagaagattaaactcaacaagcagcttccttacttggttggcaacattgttgagatcttggagatgaatcctgaagacgatgctgaggaagacggtgctaatattgaccttgactcgcaacggaagggaaagtgcgttgtgttgaaaacctctacacggcagacaatctttcttccagttgttggtcttgtggatcccgatagccttaagcctggtgatttggttggagtgaataaagacagttacttgatactggataccttgccatccgagtatgactctagggttaaagccatggaggtcgatgagaaacctaccgaagattacaatgacattggaggactagagaagcagatccaagagcttgtagaggcaatcgtgctccctatgacccacaaggagcgtttcgagaagctgggtgttcgtccaccgaagggagtgcttttgtatggtcctccagggactggtaaaactttaatggcacgtgcctgtgcagcacagaccaatgccacattcctaaaattggcaggtcctcaattggtccagatgtttattggagacggagcaaaacttgtccgtgatgcttttcaactagcgaaagagaaagctccatgcatcatcttcattgatgaaatcgatgccattggtaccaagcgttttgacagtgaagtaagtggagacagggaagtgcagaggactatgttggagctacttaatcagcttgatggattcagtagcgatgagcgtattaaggtgattgcagccactaaccgtgcagatattctggacccagcgctcatgcgttctggtcgattagacaggaagattgagttcccacatccaacagaagaagcaagagccagaatcttacagatccactcgaggaagatgaatgtacacccagacgtcaactttgaggagcttgcaagatcgacagatgatttcaatggcgctcaactgaaagcagtatgtgtagaggctggcatgttagctcttcgccgtgatgccacagaggtgaaccatgaggacttcaatgaaggtatcatccaagtccaggccaagaagaaagcaagtttgaactactacgcctaa

SEQ ID NO: 5034 - protein, 424 aa, Brassica campestris
MATPMVEDTSSFEEDQLASMSTEDIVRATRLLDNEIRILKEDAQRTNLECDSYKEKIKENQEKIKLNKQLPYLVGNIVEILEMNPEDDAEEDGANIDLDSQRKGKCVVLKTSTRQTIFLPVVGLVDPDSLKPGDLVGVNKDSYLILDTLPSEYDSRVKAMEVDEKPTEDYNDIGGLEKQIQELVEAIVLPMTHKERFEKLGVRPPKGVLLYGPPGTGKTLMARACAAQTNATFLKLAGPQLVQMFIGDGAKLVRDAFQLAKEKAPCIIFIDEIDAIGTKRFDSEVSGDREVQRTMLELLNQLDGFSSDERIKVIAATNRADILDPALMRSGRLDRKIEFPHPTEEARARILQIHSRKMNVHPDVNFEELARSTDDFNGAQLKAVCVEAGMLALRRDATEVNHEDFNEGIIQVQAKKKASLNYYA

SEQ ID NO: 5035 - DNA, 1359 bp, Dactylis glomerata
  CDS (1)..(1359)
atggcgcaagaagagaaggagaagcccgacgaatcaacctcttctcgtcgaccgcaagcaaaggaaaccaaaccgaacccagctccagagccggagccggagatggcgacggtggcgatggacatctcgaagcccccgccggccgcggccggcgacgattccgccaagggcgcgcgcgccggaggggaggggctgcggcagtactacctgcagcacatccacgacctgcagctccagatccggaccaagacccacaacctcaaccgcctcgaggcccagcgcaacgacctcaactccaaagttagagcactcagggaagagctgcagttgcttcaagaacctggctcttatgttggtgaggtggtgaaggtcatgggtaaatcaaaggttctagtcaaggttcatccagaaggcaaatatgtcgtagatatcgacaagagcatcgatattacaaaaatcacaccttcaacaagagttgctcttcgaaatgatagctacatgctccatttgatcctgccaagcaaagttgatccattggtcaatcttatgaaagttgagaaggttccagattctacgtatgatatgattggaggccttgatcagcagatcaaggagatcaaagaggttattgagcttcctatcaaacatcctgagttatttgaaagccttggaattgcccagccaaagggtgttctcctttatggaccaccaggcacaggaaaaacattattggcacgtgcagttgctcaccacactgactgtaccttcatcagagtatctggctctgagttggttcaaaagtatattggtgagggttcccgcatggttcgtgaactctttgttatggctagggagcatgcaccatccattatattcatggatgaaatagactccattggatctgctagaatggagtctggaactggcaacggtgatagtgaagtgcaacgaaccatgcttgagcttcttaaccaacttgatggttttgaagcttcaaacaaaattaaggttctgatggcaacaaaccggatagacattctggatcaagcccttttgaggcctggccgcatagacaggaagattgaatttccgaatcctaatgaggattcacgaggtgatatcttgaagatccattcaacaacaatgaacttgatgcgtggaattgatcttaaaaagatcgcaggaaagatgaatggtgcttcaggagctgagctaaaggccgtctgcactgaagctggaatgtttgctctccgtgagaggagggtgcatgtaacgcaggaggacttcgaaatggcggtggccaaggtgatgaagaaggataacgagaagaacatgtccttgcggaaactgtggaagtga

SEQ ID NO: 5036 - protein, 452 aa, Dactylis glomerata
MAQEEKEKPDESTSSRRPQAKETKPNPAPEPEPEMATVAMDISKPPPAAAGDDSAKGARAGGEGLRQYYLQHIHDLQLQIRTKTHNLNRLEAQRNDLNSKVRALREELQLLQEPGSYVGEVVKVMGKSKVLVKVHPEGKYVVDIDKSIDITKITPSTRVALRNDSYMLHLILPSKVDPLVNLMKVEKVPDSTYDMIGGLDQQIKEIKEVIELPIKHPELFESLGIAQPKGVLLYGPPGTGKTLLARAVAHHTDCTFIRVSGSELVQKYIGEGSRMVRELFVMAREHAPSIIFMDEIDSIGSARMESGTGNGDSEVQRTMLELLNQLDGFEASNKIKVLMATNRIDILDQALLRPGRIDRKIEFPNPNEDSRGDILKIHSTTMNLMRGIDLKKIAGKMNGASGAELKAVCTEAGMFALRERRVHVTQEDFEMAVAKVMKKDNEKNMSLRKLWK

SEQ ID NO: 5037 - DNA, 1332 bp, Brassica napus
  CDS (1)..(1332)
atgggtcaaggaccatccggaggtttgaaccgtccaggagaccgcaagcccgacggcaacgaaaagaaagagaagaaattcgagccggcggctccaccgtctcgcgtcggaagaaagcagcggaagcaaaaaggacccgaggcggcggcgcggctcccgacggtgactccttccaccaaatgcaagctccggctgctcaaaatggagcggatcaaggactatctactgatggaggaagagttcgtggcgaaccaggagaggctgaagcctcaggaggagaaggcagaggaagatagatctaaggtcgatgatctgagaggtacgccgatgagcgttgggaacttggaggagctgattgatgagaatcacgcgatcgtgtcgtcttctgttgggcctgagtattacgttgggatattgtcttttgttgataaagatcagctcgagcctgggtgctcgattttgatgcataataaggttctgtctgttgttgggatactacaagatgaggtggatccgatggtgtctgtgatgaaagttgagaaggctccgttggagtcgtatgctgatattggaggtttagaagctcagattcaggagattaaggaagctgttgagttgcctttgactcatcctgagttgtatgaagatattggtattaagcctcccaagggtgtgattttgtatggtgagccaggaactgggaagacactgcttgctaaggctgtggcgaattctacatcagctactttcttgagagttgtagggagtgaactgattcagaagtatttgggagatggtcccaagctcgtgagggagcttttcagagttgccgatgacctttcaccatcaatcgtcttcattgatgagattgatgctgttggtaccaagcggtatgatgccaactcagggggtgagcgtgagatccaaagaactatgttggaacttctaaaccagcttgatgggtttgattcaagaggagacgtaaaggtcatccttgcaacaaacagaatagagagtctcgacccggcacttcttcgaccaggacgtattgataggaaaatcgagttcccgcttccagatatcaaaacgagaagacgaatcttccagatacacacatcaaagatgactctctcggaagatgtgaacttggaagagtttgtgatgacaaaagacgagttctcaggagctgatataaaggctatttgcactgaggctggtctgcttgctctcagggagcgccgaatgaaggtgacgcatccggatttcaagaaagcaaaggagaaggttatgttcaaaaagaaagaaggtgttcctgaaggcctttacatgtaa

SEQ ID NO: 5038 - protein, 443 aa, Brassica napus
MGQGPSGGLNRPGDRKPDGNEKKEKKFEPAAPPSRVGRKQRKQKGPEAAARLPTVTPSTKCKLRLLKMERIKDYLLMEEEFVANQERLKPQEEKAEEDRSKVDDLRGTPMSVGNLEELIDENHAIVSSSVGPEYYVGILSFVDKDQLEPGCSILMHNKVLSVVGILQDEVDPMVSVMKVEKAPLESYADIGGLEAQIQEIKEAVELPLTHPELYEDIGIKPPKGVILYGEPGTGKTLLAKAVANSTSATFLRVVGSELIQKYLGDGPKLVRELFRVADDLSPSIVFIDEIDAVGTKRYDANSGGEREIQRTMLELLNQLDGFDSRGDVKVILATNRIESLDPALLRPGRIDRKIEFPLPDIKTRRRIFQIHTSKMTLSEDVNLEEFVMTKDEFSGADIKAICTEAGLLALRERRMKVTHPDFKKAKEKVMFKKKEGVPEGLYM

SEQ ID NO: 5039 - DNA, 1314 bp, Pneumocystis carinii
  CDS (1)..(1314)
atgtttatgacagggcaatgttcaaaaaaagagtctaaatatgagccactggttatgtctacacgtataggaaggagatataatagaaataaggggccggatgcatcatataagtttccaatggtatatccgacgacaagatgtcgtttgaagcttttaaagatggaaaggatcaaagattatttgttattagagcaggaatttgtatctaatcaggagttgttgaagcttgattctgaaaaaagagatcaaaaaggcgaagaagaggatgatgataagcttcaaagtttaattggaagtcctatgggggtaggaacgttggaagagatgattgatgatgatcatgcaattgtatcatcagctacggggccggaatattatgtttctattatgtcttttgtaaataaggatttacttgagcctggatgttcggtattattacatcataaggcggtatcgattgttggggtgttaagtgatgatattgatccaatggtatcggtgatgaagttggacaaagcaccgacggagtcgtatgcggatattggggggcttgaatcacaaattcaagagatcaaagagacggtagaattgccattaacacatcctgagttgtatgaagagattggaattcgaccgcctaaaggagttattttatatggtgagccagggacgggaaagacattattagcaaaggcggtagcgaatcaaacgagtgcaacctttttacgtattgttggatcagaattaattcaaaaataccttggagatggaccaaaatttgtccgagagctctttcaaacggcacaggacaattcaccgtctatcgtatttattgatgaaatcgatgctattgggacgaaaaggtatgattcaacatcatcaggagaacgagaaatacaacgaacgatgcttgaacttttaaatcaattggatgggtttgatgatcgtggagatgtaaaggtaattatggcaacaaatcgaattaatgatttggatccggcattaatacggcccggaagaatggatagaaaaattttgtttgaaacaccagatcaaaatacaaaacgtaaaatctttcagattcatacgagtaaaatgaatctcggggatgatgtattaattgaagagtttataacagctaaagatgaaatgagtggcgcggatgtaaaggtaatagcaatttgcacggaagctggtctgcttgctcttagggaacgaagaatgcgtgtagttgccgatgactttagaaaagctaaagaacatgtattaaaaaccaaacaaaaaaatatacaaggcgaactttatatataa

SEQ ID NO: 5040 - protein, 437 aa, Pneumocystis carinii
MFMTGQCSKKESKYEPLVMSTRIGRRYNRNKGPDASYKFPMVYPTTRCRLKLLKMERIKDYLLLEQEFVSNQELLKLDSEKRDQKGEEEDDDKLQSLIGSPMGVGTLEEMIDDDHAIVSSATGPEYYVSIMSFVNKDLLEPGCSVLLHHKAVSIVGVLSDDIDPMVSVMKLDKAPTESYADIGGLESQIQEIKETVELPLTHPELYEEIGIRPPKGVILYGEPGTGKTLLAKAVANQTSATFLRIVGSELIQKYLGDGPKFVRELFQTAQDNSPSIVFIDEIDAIGTKRYDSTSSGEREIQRTMLELLNQLDGFDDRGDVKVIMATNRINDLDPALIRPGRMDRKILFETPDQNTKRKIFQIHTSKMNLGDDVLIEEFITAKDEMSGADVKVIAICTEAGLLALRERRMRVVADDFRKAKEHVLKTKQKNIQGELYI

SEQ ID NO: 5041 - DNA, 1302 bp, Pinus taeda
  CDS (1)..(1302)
atgcgtgtagaggaactcggaggaattctgaaacctgcctcagacttggaggccgctgcaaacgcgaaggaaaaattgaaggagaaacatcagctccccaaagaatctaacagaatggtgaagcatggcgagggtttgcgccagtattaccttcaacatattcacgatctccagctccaggtccgtcagaagacgcacaatcttaaccgtcttgaagcccagcgaaacgatcttaattccaaagtgagagcgctgagggaggaattacagttgctccaggaaccgggatcgtatgttggtgaagttgttaaagttatggggaagtctaaagttttggttaaggtgcatcctgaaggaaagtatgtagttgatgtagacaagaacattgacataacaaaaatcacaccttctacaagagtagctcttcgtaatgatagctacgtgcttcatttgattttgcctagcaaagtagacccgttggtcaacctgatgaaggtggagaaagtgccggattctacatatgacatgattggaggacttgaccaacagattaaggaaatcaaagaggttatcgagcttcctatcaagcatccagaactatttgaaagtcttggaatagctcaaccaaagggtgtactgttgtatggaccccctggcactggaaagacattgcttgccagggcagttgctcatcacacagactgcacctttattagagtttcaggttctgaattggttcagaagtacataggtgaaggatcaaggatggttcgtgagctttttgttatggcaagagaacatgctccttcgattatatttatggatgaaattgacagtataggatctgctcgaatggagtctggcactggtaatggtgatagtgaagtccagcgaactatgcttgagctccttaatcaacttgatggctttgaggcatctaataagattaaggttctaatggctacaaaccggatagatattcttgatcaagctcttcttcgacctggtaggattgacaggaaaattgaatttcctaatcctaatgaagagtctcgttttgacattctgaaaatccactcaagaaaaatgaatctaatgcggggcatcgatctaaagaaaattgctgaaaaaatgagtggtgcatcaggtgcagagcttaaggctgtatgcacagaagctgggatgtttgcattgcgggagcgacgtgtccatgttacacaagaagatttcgaaatggctgtagctaaggttatgaaaaaggaaacagagaagaacatgtcactgaggaaactatggaagtaa

SEQ ID NO: 5042 - protein, 433 aa, Pinus taeda
MRVEELGGILKPASDLEAAANAKEKLKEKHQLPKESNRMVKHGEGLRQYYLQHIHDLQLQVRQKTHNLNRLEAQRNDLNSKVRALREELQLLQEPGSYVGEVVKVMGKSKVLVKVHPEGKYVVDVDKNIDITKITPSTRVALRNDSYVLHLILPSKVDPLVNLMKVEKVPDSTYDMIGGLDQQIKEIKEVIELPIKHPELFESLGIAQPKGVLLYGPPGTGKTLLARAVAHHTDCTFIRVSGSELVQKYIGEGSRMVRELFVMAREHAPSIIFMDEIDSIGSARMESGTGNGDSEVQRTMLELLNQLDGFEASNKIKVLMATNRIDILDQALLRPGRIDRKIEFPNPNEESRFDILKIHSRKMNLMRGIDLKKIAEKMSGASGAELKAVCTEAGMFALRERRVHVTQEDFEMAVAKVMKKETEKNMSLRKLWK

SEQ ID NO: 5043 - DNA, 1257 bp, Fagus sylvatica
  CDS (1)..(1257)
atggcgatcgaaacgaaacatccggaggcggtgccggcggacgagacttgctcggcgaagtgctccaagcaaggggagggtctcaagcagtactatctccaacacattcacgagcaccagctccaggttcgccaaaagacccacaatctcaaccgcctcgaggcccagcgtaacgagttcaattctcgagtgagaatgctaagggaagaactacagctactccaggagcctggatcatatgttggtgaagttgtcaaagtaatggggaagaataaggttttagttaaggttcattctgaaggaaaatatgttgttgacatcgataaaaatattgacatcacaaagataactccatcaacaagagttgctcttcgcaatgacagttatgtgcttcatttaatcttgccaagcaaagttgatcctttggtcaacctaatgaaagttgaaaaggttcctgattcaacatatgacatgattgggggtcttgaccagcaaattaaagagataaaggaggtcattgagcttccaatcaaacatcctgaattatttctagagagtcttggaatagctcaaccaaagggtgtactgctatatgggccacctggtacagggaaaacgctgttggctagggcagtggcacatcatacagattgtactttcatcagggtttctggttctgaattagttcagaagtacattggagaaggttccagaatggttagggaacttttcgttatggccagggaacatgctccatctatcatatttatggatgaaatagacagtattggatctgctcgaatggaatctggtagtggcaatggtgatagtgaagtgcaggaccacatgctggagcttctcaaccagctggatggatttgaaagcatcaaacaaattaaggttcttatgcgtacaaatcgtattgatattctcgatcaagctctccttaggccagggcgaattgataggaagattgaatttcctaatcctaaccgggagtctcgatttgatattttaaaaatacattcaagaagaatgaatctgatgcgtgggattgacctgaagaaaatagctgagaaaatgaacggtgcatctggtgcagagctcaaggctgtgtgcacagaagctgggatgtttgctctgactgctgagaggagggttcgactggtaacacaagaagattttgagatggcagtagcaaaggtaatgaagaaggagaccgagaaaaacatgtcattgcggaagctatggaagtag

SEQ ID NO: 5044 - protein, 418 aa, Fagus sylvatica
MAIETKHPEAVPADETCSAKCSKQGEGLKQYYLQHIHEHQLQVRQKTHNLNRLEAQRNEFNSRVRMLREELQLLQEPGSYVGEVVKVMGKNKVLVKVHSEGKYVVDIDKNIDITKITPSTRVALRNDSYVLHLILPSKVDPLVNLMKVEKVPDSTYDMIGGLDQQIKEIKEVIELPIKHPELFLESLGIAQPKGVLLYGPPGTGKTLLARAVAHHTDCTFIRVSGSELVQKYIGEGSRMVRELFVMAREHAPSIIFMDEIDSIGSARMESGSGNGDSEVQDHMLELLNQLDGFESIKQIKVLMRTNRIDILDQALLRPGRIDRKIEFPNPNRESRFDILKIHSRRMNLMRGIDLKKIAEKMNGASGAELKAVCTEAGMFALTAERRVRLVTQEDFEMAVAKVMKKETEKNMSLRKLWK

SEQ ID NO: 5045 - DNA, 1218 bp, Arabidopsis thaliana
  CDS (1)..(1218)
atggaggaaacctgtaacgtgaaaggagcggcggcgaaacaaggggaagggcttaagcagtactatctccagcacatccatgagctccagcgccagcttcgacagaagactaataacctcaatcgccttgaagctcaaaggaatgaactcaattctcgagtgagaatgctcagagaagagttacagctccttcaagaacctgggtcctatgtgggagaagtggtaaaagttatgggaaagaacaaggtcttggttaaggttcatccagaggggaagtatgttgttgatattgacaaaagtatagacattacgaaaatcactccatcaacgagagttgctcttcgtaatgatagctatgttctccacctggttctgccaagtaaagtagatcccttggttaaccttatgaaagttgagaaggttccagactccacctatgacatgattggtggtcttgaccagcagattaaggaaataaaggaggtcattgagctgccaatcaagcatcctgaattgtttgagtctcttggaattgcgcagccaaagggtgtgttgttatacggtccacctggaactgggaagacactattggctcgggctgttgcacatcacactgactgtactttcataagagtttctggttccgagcttgtccagaaatacattggagaaggttctagaatggtcagagaactttttgtgatggcaagggagcatgcaccatcaatcatcttcatggatgaaatcgatagtattgggtctgctcgtatggaatctggaagtggaaatggtgacagtgaggtgcaacggaccatgctcgagcttctcaatcaacttgacggttttgaagcgtcaaacaaaatcaaggttttgatggctacaaatcgtattgatattctggatcaagctcttctcaggcctggaagaattgataggaaaattgaatttcctaatcctaatgaagagtcacgttttgacatcttgaagattcactcgaggaaaatgaatttgatgcgtggaatcgatctgaaaaagattgcagagaagatgaatggcgcttcaggtgctgagctgaaggctgtgtgcacggaggcgggaatgtttgctctgcgtgagaggagagtacacgtgacacaagaagactttgagatggcggtggccaaggtaatgaagaaagacacggagaagaacatgtctctgcgtaagctgtggaagtag

SEQ ID NO: 5046 - protein, 405 aa, Arabidopsis thaliana
MEETCNVKGAAAKQGEGLKQYYLQHIHELQRQLRQKTNNLNRLEAQRNELNSRVRMLREELQLLQEPGSYVGEVVKVMGKNKVLVKVHPEGKYVVDIDKSIDITKITPSTRVALRNDSYVLHLVLPSKVDPLVNLMKVEKVPDSTYDMIGGLDQQIKEIKEVIELPIKHPELFESLGIAQPKGVLLYGPPGTGKTLLARAVAHHTDCTFIRVSGSELVQKYIGEGSRMVRELFVMAREHAPSIIFMDEIDSIGSARMESGSGNGDSEVQRTMLELLNQLDGFEASNKIKVLMATNRIDILDQALLRPGRIDRKIEFPNPNEESRFDILKIHSRKMNLMRGIDLKKIAEKMNGASGAELKAVCTEAGMFALRERRVHVTQEDFEMAVAKVMKKDTEKNMSLRKLWK

SEQ ID NO: 5047 - DNA, 1332 bp, Arabidopsis thaliana
  CDS (1)..(1332)
atgggacaaggaccatcgggaggattgaatcggcaaggagatcggaaacctgatggtggagataagaaagagaagaagtttgagccggcggcaccaccggctcgtgtagtgaggaagcaaaggaagcagaaagggccagaggcggcggcgagacttccgacggtgactccgtctactaagtgtaagctccggttactgaaattggaacggatcaaggattatttgttgatggaggaagagtttgtggcgaatcaagagaggttgaaacctcaggaagagaaagctgaggaagatagatctaaggttgatgatcttcgtggtacacctatgagtgttgggaatttggaagagttgattgatgagaatcacgctattgtttcttcttctgttggacctgagtactacgttgggattttgtccttcgttgataaagatcagcttgaacctggatgttcgattttgatgcataataaggttctctctgttgttgggattctacaagatgaagtggatccaatggtgtctgtgatgaaagttgagaaagctcctttggagtcatatgctgatattggaggtttagaagctcagattcaggagattaaggaagctgttgagcttcctttgactcatcctgagttgtatgaagatattggtattaaaccaccaaagggtgtaattttgtatggtgagcctggaactgggaagacattgcttgctaaggcggttgcgaattcaacatcagctactttcttgagagttgttggtagtgagctgattcagaagtatttgggagatggtcctaagcttgtgagagaacttttcagagttgctgatgacctttcaccatcaatcgtcttcatagatgagattgatgctgttggtaccaagcggtatgacgctcactcaggaggtgaacgtgagatccaaagaactatgttggaacttctgaaccagcttgatggatttgattcaagaggagatgttaaggtcatccttgcaacaaacagaatcgagagtcttgacccagcactgcttcgacctggacggattgataggaaaatcgagttccctctcccagatatcaaaacaagaagacgtatcttccagatacacacatcgaagatgactctctcggaagatgtaaacctcgaagagtttgtgatgacgaaagacgagttctcaggagctgatataaaggctatatgcactgaggctggtctactagctctcagggagcgtcgtatgaaggtgacacatcctgatttcaagaaagcaaaggagaaggttatgttcaagaagaaagaaggcgtccctgaaggcctctacatgtaa

SEQ ID NO: 5048 - protein, 443 aa, Arabidopsis thaliana
MGQGPSGGLNRQGDRKPDGGDKKEKKFEPAAPPARVVRKQRKQKGPEAAARLPTVTPSTKCKLRLLKLERIKDYLLMEEEFVANQERLKPQEEKAEEDRSKVDDLRGTPMSVGNLEELIDENHAIVSSSVGPEYYVGILSFVDKDQLEPGCSILMHNKVLSVVGILQDEVDPMVSVMKVEKAPLESYADIGGLEAQIQEIKEAVELPLTHPELYEDIGIKPPKGVILYGEPGTGKTLLAKAVANSTSATFLRVVGSELIQKYLGDGPKLVRELFRVADDLSPSIVFIDEIDAVGTKRYDAHSGGEREIQRTMLELLNQLDGFDSRGDVKVILATNRIESLDPALLRPGRIDRKIEFPLPDIKTRRRIFQIHTSKMTLSEDVNLEEFVMTKDEFSGADIKAICTEAGLLALRERRMKVTHPDFKKAKEKVMFKKKEGVPEGLYM

SEQ ID NO: 5049 - DNA, 1245 bp, Matricaria chamomilla
  CDS (1)..(1245)
atgaaacccgcatcatcatcagcagattcagggactgaaagctgttcatcaaaaggtgttgcaaaaacaggtgaaggattaagacaatattatttgcaacatattcatgatgctcagcttcaagtccgccaaaagactcataatcttaatcgtcttgaggctcaacgtaacgaacttaattctagagtagggatgcttaaggaagagttgcagctgcttcaagagcccgggtcttatgttggtgaagttgtcaaagtgatgggcaagtcgaaagtactagtcaaggtgcacccagagggtaaatatgtggttgatatcgacaaaagcattgatatcactaagataactccatcaaccagagtagccctccgcaatgacagctacgttcttcatttggttttgccaagcaaagttgatcctttggtcaatctcatgaaagtcgaaaaagttcctgattctacttatgacatgattggtgggcttgaccagcaaatcaaggagattaaggaggttattgaacttccaatcaaacatccagagttattcgagagtcttggaattgctcaaccaaagggagttctgttatacggacctcctggtaccgggaagaccttgttggcgagagcagtggctcatcatactgattgcgcctttatcagggtctctggttctgagctagtgcagaaatatattggagaagggtctcggatggtgagagaacttttcgtcatggccagagaacatgctccatctattatatttatggatgaaatagacagtatcggatctgctcgtatggagtccggaagcggaaatggagacagtgaagtgcaaagaactatgcttgagcttcttaaccaactggatggatttgaaagctcaaccaaaatcaaggttttgatggctaccaaccggattgatatcttggatccagcccttctcaggccagggagaattgatagggagattgaatttccaaaccccaatgaagattcacggtttgatattctgaaaattcattcaagaaagatgaacttaatgcggggcatagatttaaagaagattgctgagaagatgaatggtgcgtcgggtgctgagcttaaggctgtttgcactgaagctggaatgtttgctttgagggaaagaagagtccatgtgacccaagaagattttgaaatggcagtagcgaaggttatgaagaaggaaactgagaaaaacatgtctctacgcaagctatggaagtaa

SEQ ID NO: 5050 - protein, 414 aa, Matricaria chamomilla
MKPASSSADSGTESCSSKGVAKTGEGLRQYYLQHIHDAQLQVRQKTHNLNRLEAQRNELNSRVGMLKEELQLLQEPGSYVGEVVKVMGKSKVLVKVHPEGKYVVDIDKSIDITKITPSTRVALRNDSYVLHLVLPSKVDPLVNLMKVEKVPDSTYDMIGGLDQQIKEIKEVIELPIKHPELFESLGIAQPKGVLLYGPPGTGKTLLARAVAHHTDCAFIRVSGSELVQKYIGEGSRMVRELFVMAREHAPSIIFMDEIDSIGSARMESGSGNGDSEVQRTMLELLNQLDGFESSTKIKVLMATNRIDILDPALLRPGRIDREIEFPNPNEDSRFDILKIHSRKMNLMRGIDLKKIAEKMNGASGAELKAVCTEAGMFALRERRVHVTQEDFEMAVAKVMKKETEKNMSLRKLWK

SEQ ID NO: 5051 - DNA, 1275 bp, Arabidopsis thaliana
  CDS (1)..(1275)
atggcaactcctatggttgaagatacgtcaagcttcgaagaggatcagcttgcttccatgtccaccgaagatatcactagagctactcgtcttctcgacaacgagattcgaattctcaaggaagacgcgcaaagaacaaatctagaatgtgattcttacaaggagaagattaaggagaatcaggagaagattaaactcaacaagcagctgccttacttggttggcaacattgtcgagattttggagatgaatccagaagatgatgctgaggaagatggtgcaaatattgatcttgactcgcaacggaaaggaaaatgtgttgtgttgaaaacgtctacacggcagaccatctttctaccagttgttggactcgtggatcctgatagtttgaaacctggtgacttggttggagttaacaaagatagctacttgattttggataccttgccatccgagtatgactctagggttaaagccatggaggtcgatgaaaaaccaactgaagattacaatgacattggaggactagagaagcagatccaagagcttgtagaggcaattgtgcttcccatgacgcacaaggaacgttttgagaagctgggtgttcgtccaccaaagggagtgctcttgtatggtcccccagggactggtaaaactttaatggctcgtgcctgcgcagcacagaccaatgccaccttccttaaattggcaggccctcaattggtccagatgttcattggagacggagcaaagcttgtccgtgatgcctttcaacttgccaaagagaaagctccgtgcattatcttcatagatgaaatcgatgccattggtacaaagcgtttcgacagtgaagtcagcggagacagggaagtgcagaggactatgttggagttgctcaatcaacttgacggattcagtagcgatgaacgtattaaggtgattgcagctactaaccgtgcagatattctggacccagcactcatgcgttctggtcgattagacagaaagattgagttcccacacccaaccgaagaagcgagagcaagaatcttgcagattcactcaaggaagatgaatgtccacccagacgtccactttgaggagcttgcacgatccacagatgatttccatggagctcagctgaaagcagtgtgtgtagaggcaggcatgttagctcttcgccgtgatgccacagaggtgaaccatgaagacttcaatgaaggtatcatccaagtccaggccaagaagaaagcaagcttgaactactacgcctga

SEQ ID NO: 5052 - protein, 424 aa, Arabidopsis thaliana
MATPMVEDTSSFEEDQLASMSTEDITRATRLLDNEIRILKEDAQRTNLECDSYKEKIKENQEKIKLNKQLPYLVGNIVEILEMNPEDDAEEDGANIDLDSQRKGKCVVLKTSTRQTIFLPVVGLVDPDSLKPGDLVGVNKDSYLILDTLPSEYDSRVKAMEVDEKPTEDYNDIGGLEKQIQELVEAIVLPMTHKERFEKLGVRPPKGVLLYGPPGTGKTLMARACAAQTNATFLKLAGPQLVQMFIGDGAKLVRDAFQLAKEKAPCIIFIDEIDAIGTKRFDSEVSGDREVQRTMLELLNQLDGFSSDERIKVIAATNRADILDPALMRSGRLDRKIEFPHPTEEARARILQIHSRKMNVHPDVHFEELARSTDDFHGAQLKAVCVEAGMLALRRDATEVNHEDFNEGIIQVQAKKKASLNYYA

SEQ ID NO: 5053 - DNA, 1173 bp, Drosophila melanogaster
  CDS (1)..(1173)
atgccggacaatctgcgggtgaaagccttatccgagtaccgaaagaagttgctagagcacaaggaaatcgagggacgcctcaaagaaaagcgcgaggagatcaaggatctgaccaagctgtacgacaagtcggagaacgatctaaaggccctgcagagcgtgggacagatcgttggtgaggtgctgaagcagctgaccgaggataaattcattgtgaaggccaccaatggaccccgctacgtggtcggctgccgccggcagctggacaaagccaagctgaagtccggaactcgtgtggccctcgacatgaccacactgaccattatgcgctacttgccgcgcgaggtggacccactggtgtacaatatgtcgcacgaggctcccggggatgtcacctactcggccatcggcggcctaaccgaccaaattcgcgagctgcgcgaagtgatcgagctgcccctactgaatccggagctcttcctgcgcgtcggcatcacgccaccgaagggttgtttgctgtacggacctcctggcaccggcaagaccctgctggcccgtgcagtggcctcccagctggacgccaacttcctcaaggtcgtgtcctcggcgattgtcgacaagtatattggcgagagtgcgcgtctcattcgcgagatgttcaactatgcccgcgaccatcagccctgcatcattttcatggacgaaatcgacgctatcggtggtcggcgcttctccgagggcacctctgccgatcgcgagatccagcgcaccctgatggagctgctcaaccagatggacggcttcgattcgcttggccaagtcaagatgatcatggcaaccaatcgtccggacaccctcgatcctgcccttttgcgtccgggtcgcttggacaggaagatcgagattccgctgcccaacgagcaggctaggttggaaattctcaagattcacgcactgaagatcgccaagcacggcgaaatcgactacgaggccattgtcaagctgtcggacaactttaatggcgctgatttgcgtaatgtctgcacggaggcgggtttttttgccattcgtgcggagcgggagtacgtcatccaggaggacttcatgaaggcggtgcgcaaggtgtcggacaacaagaagttggagagcaagctggactacaagcccgtttag

SEQ ID NO: 5054 - protein, 390 aa, Drosophila melanogaster
MPDNLRVKALSEYRKKLLEHKEIEGRLKEKREEIKDLTKLYDKSENDLKALQSVGQIVGEVLKQLTEDKFIVKATNGPRYVVGCRRQLDKAKLKSGTRVALDMTTLTIMRYLPREVDPLVYNMSHEAPGDVTYSAIGGLTDQIRELREVIELPLLNPELFLRVGITPPKGCLLYGPPGTGKTLLARAVASQLDANFLKVVSSAIVDKYIGESARLIREMFNYARDHQPCIIFMDEIDAIGGRRFSEGTSADREIQRTLMELLNQMDGFDSLGQVKMIMATNRPDTLDPALLRPGRLDRKIEIPLPNEQARLEILKIHALKIAKHGEIDYEAIVKLSDNFNGADLRNVCTEAGFFAIRAEREYVIQEDFMKAVRKVSDNKKLESKLDYKPV

SEQ ID NO: 5055 - DNA, 1167 bp, Schizosaccharomyces pombe
  CDS (1)..(1167)
atgtcggaaagagacactgctttagagaaatataaatcctatttattacaacatcgagaatgggattcaaaactgaaggatttgcgttttggaaatcgagatctagtcaagaaatatgataaaacagaggatgatataaaaagcttgcagtcggttggtcagattattggagaagtattgaaacaacttgattctgaaagattcattgtaaaagctagctctggtccacgttacgttgtaggttgcagaaacaatgtcgaccaatctcatttggttcaaggcgttcgtgtatctttagatatgaccacgttaaccattatgcgtattcttcctcgtgaggttgatcctctcgtttacaatatgtcaattgaagaccctggtgacatttctttcgccggtgtcggtggcttgaatgaacaaattcgtgaattgcgtgaagttattgaactacctttaaagaatccggaattattccttcgtgtgggaattaagccaccaaaaggtgttttgctctatggtcctcctggtactggtaaaactcttttagctcgtgccgtggcggcatctttaggtgttaactttttaaaagtagtttccagtgctatcgttgataaatatattggagaatctgctagaataattcgtgaaatgtttggctatgcaaaagagcatgagccatgtgttatttttatggacgaaattgatgctattggtggtagaagattctctgaaggaacatctgctgatcgtgaaattcagcgtacattgatggaattattgaatcagatggatggtttcgattaccttggccaaacgaaaattatcatggcgacaaatcgtcctgatactctagatcctgccttgcttcgtcctggtcgtctagatcgtaaaattgaaattcccctaccaaacgaagttggtcgtatggagattttgaaaatccatttagaaaaagtctctaaacaaggcgaaattgactatgaagcattggttaaactgacagatggaacaaatggtgctgacttgcggaatgtggttacagaagcaggattcatagccattaaagaagatcgcgactatgtcattcagtccgatttaatgtccgcagctcgtaaggttgctgacctgaagaaacttgaaggtacaattgattaccaaaagctttag

SEQ ID NO: 5056 - protein, 388 aa, Schizosaccharomyces pombe
MSERDTALEKYKSYLLQHREWDSKLKDLRFGNRDLVKKYDKTEDDIKSLQSVGQIIGEVLKQLDSERFIVKASSGPRYVVGCRNNVDQSHLVQGVRVSLDMTTLTIMRILPREVDPLVYNMSIEDPGDISFAGVGGLNEQIRELREVIELPLKNPELFLRVGIKPPKGVLLYGPPGTGKTLLARAVAASLGVNFLKVVSSAIVDKYIGESARIIREMFGYAKEHEPCVIFMDEIDAIGGRRFSEGTSADREIQRTLMELLNQMDGFDYLGQTKIIMATNRPDTLDPALLRPGRLDRKIEIPLPNEVGRMEILKIHLEKVSKQGEIDYEALVKLTDGTNGADLRNVVTEAGFIAIKEDRDYVIQSDLMSAARKVADLKKLEGTIDYQKL

SEQ ID NO: 5057 - DNA, 1320 bp, Drosophila melanogaster
  CDS (1)..(1320)
atgggacaaaaccaatcggctcaagggggagctggcgaaaagaaagatgacaaggataaaaagaagaagtacgagcctccaatcccaacgcgcgttggcaagaagaagaggcgcgcaaagggtccagatgcggccatgaagctgccccaggtcacgccccacacccgctgccgccttaagctgctcaagctggagcgcatcaaggattacctgatgatggaggacgagttcatccgcaaccaggagcgcctgaagccccaggacgagaagaacgaggaggagcgctccaaggttgacgatctgcgcggcacccccatgtccgtgggcaacctggaggagatcatcgacgacaaccacgccatcgtgtccacatcggtgggctccgaacattatgttagcatcctatccttcgtggacaaggatcagctggaaccaggctgctccgtgctgctcaaccacaaagtacacgctgttgtcggagttctcagcgacgacaccgatccaatggtcacggtgatgaaactggaaaaggctccgcaggagacttacgcagatatcggtggcttagacactcagatccaggagatcaaggagtctgtcgagctgccactgacccatcccgagtactacgaggaaatgggaatcaagccacccaagggcgtcatcctatatgggcctcctggcacgggcaagaccctgctagccaaggcagtggccaaccagacctcggccactttcctgcgcgttgtaggctcagagctgatccagaagtacctgggcgacggacccaagctagttcgtgagctcttccgtgtggctgaggagcacgctccatccattgtgttcatcgacgaaatcgatgcagtgggcacaaagcgctacgattcaaattctggtggcgagcgggagattcagcgtactatgttggagttactgaatcagttggatggtttcgattcgcgcggcgatgtcaaggtgatcatggccaccaatcgtatcgagacccttgacccggcgctcattcgacccggtcgtattgaccgcaagatcgagttcccgctgcccgatgagaagaccaagcgccgcatctttaccatccacacatctcgcatgacgctggccgaggacgtgaaccttagcgaactgatcatggcaaaggacgatctatccggcgccgacatcaaggccatctgtacagaggctggcttgatggcgctgcgggaacgccgcatgaaggtgaccaacgaggacttcaagaagtcaaaggagagcgtcttgtaccggaagaaggagggcacgcccgagggtctttatttataa

SEQ ID NO: 5058 - protein, 439 aa, Drosophila melanogaster
MGQNQSAQGGAGEKKDDKDKKKKYEPPIPTRVGKKKRRAKGPDAAMKLPQVTPHTRCRLKLLKLERIKDYLMMEDEFIRNQERLKPQDEKNEEERSKVDDLRGTPMSVGNLEEIIDDNHAIVSTSVGSEHYVSILSFVDKDQLEPGCSVLLNHKVHAVVGVLSDDTDPMVTVMKLEKAPQETYADIGGLDTQIQEIKESVELPLTHPEYYEEMGIKPPKGVILYGPPGTGKTLLAKAVANQTSATFLRVVGSELIQKYLGDGPKLVRELFRVAEEHAPSIVFIDEIDAVGTKRYDSNSGGEREIQRTMLELLNQLDGFDSRGDVKVIMATNRIETLDPALIRPGRIDRKIEFPLPDEKTKRRIFTIHTSRMTLAEDVNLSELIMAKDDLSGADIKAICTEAGLMALRERRMKVTNEDFKKSKESVLYRKKEGTPEGLYL

SEQ ID NO: 5059 - DNA, 1347 bp, Schizosaccharomyces pombe
  CDS (1)..(1347)
atgggacaagcacaatctgggaatttttctaatttcggcgatggtgccaacggcgacaataaaaaagaccaaaagaaagataagcccaaatacgaacctccagttcccactcgaactggtcgtcgtaagaagaaggctcaaagtggtcctgatgcatcggcaaaactacctactgttatcccaacgactcgttgtcgtttaaggttgttaaaaatgcaaagaatccacgatcatttgcttatggaagaagagtatgtgcaaaaccaggaacgtcttaagccacaggatgaacgaactcaggaagaacgcaatcgtgtagatgaaattcgtggtactccaatgtctgtaggaactttagaggaaattatagacgacgatcatgccatcgtttccacagctggaccagagtactatgtttccatcatgtcatttgtcgataaagacatgttagagcctggttgcagtgtacttctccatcacaaagccatgagtatagtaggcttacttcttgatgataccgatccaatgattaatgttatgaaactcgacaaagcacctacagaaagttatgccgatattggtggtcttgaatctcaaattcaagagatcaaagaggctgtagagcttcctcttacccatcctgaactctatgaggaaatgggcataaaaccccctaaaggtgtcattttatatggtgctcccggtactggtaaaactttactagcgaaagctgttgctaatcaaacttctgctacgttcttgcgtgtcgttggttctgaacttattcaaaaatatttaggtgatggtccccgtcttgtgagacaattatttaatgctgccgaagaacattcgccctctattgtttttattgatgaaattgatgctataggtacaaagcgttacgatgcccagtcgggtgctgaacgagaaattcaacgtactatgcttgagttactcaatcagttggatggattcgatacgagtcagcgtgatattaaggttattatggctactaaccgtatcagcgatcttgatccggctcttattcgtccaggtcgtattgaccgcaaaattcttttcgagaatcctgatgaagctacgaaacgtaaaatttttaccattcacacttccaagatgaatttgggcgaggatgttaatttagaagagttaattcaatgcaaagatgatttatctggtgcagaaattaaagcaatcgtttctgaagctggtttgcttgctctgcgtgaacgccgaatgcgagttgttatggacgactttcggcaagctcgtgaaaaggttttaaaaacgaaggacgaaggtggacctgctggtggtctttatatctaa

SEQ ID NO: 5060 - protein, 448 aa, Schizosaccharomyces pombe
MGQAQSGNFSNFGDGANGDNKKDQKKDKPKYEPPVPTRTGRRKKKAQSGPDASAKLPTVIPTTRCRLRLLKMQRIHDHLLMEEEYVQNQERLKPQDERTQEERNRVDEIRGTPMSVGTLEEIIDDDHAIVSTAGPEYYVSIMSFVDKDMLEPGCSVLLHHKAMSIVGLLLDDTDPMINVMKLDKAPTESYADIGGLESQIQEIKEAVELPLTHPELYEEMGIKPPKGVILYGAPGTGKTLLAKAVANQTSATFLRVVGSELIQKYLGDGPRLVRQLFNAAEEHSPSIVFIDEIDAIGTKRYDAQSGAEREIQRTMLELLNQLDGFDTSQRDIKVIMATNRISDLDPALIRPGRIDRKILFENPDEATKRKIFTIHTSKMNLGEDVNLEELIQCKDDLSGAEIKAIVSEAGLLALRERRMRVVMDDFRQAREKVLKTKDEGGPAGGLYI

SEQ ID NO: 5061 - DNA, 1314 bp, Saccharomyces cerevisiae
  CDS (1)..(1314)
atgggacaaggtgtatcatctggacaagacaaaaagaagaagaagggatctaatcagaaacccaaatatgaacctcccgttcaatctaaatttggtcgtaagaaaagaaagggaggtccagctactgctgaaaaattacccaacatatatccaagtactcgttgtaagttaaagcttctaaggatggaacgaattaaagaccatttgttattagaagaagaatttgtctctaactctgaaattttaaaaccctttgaaaagaagcaggaggaggaaaagaaacaattggaagaaatacgtggaaatccattgagcattgggacccttgaagaaattatagacgatgatcatgcgatagtgacaagtccaactatgcctgattattatgtatctatcttatcctttgtcgataaagagttactagagcctggatgttctgtgttattgcatcataaaaccatgtccatcgtaggtgttttacaggatgacgccgatccaatggtttcggtcatgaaaatggataagtcgccaacagaatcatacagtgatattggtggcttagaatctcaaattcaagaaataaaagagtctgtagagttaccgttaacacaccccgaactgtatgaagagatgggtatcaaacctcccaagggtgtgattctttatggtgcacccggtacaggtaagacattgctagcaaaggctgttgcaaatcaaacatctgccacattcttaaggattgttggctcagagttaattcaaaaatatttgggggatggtcctaggttgtgtaggcaaattttcaaagtagcgggtgagaacgcaccaagtattgtatttattgatgaaatagacgccattggtactaaaagatatgactccaatagtggtggtgagagagaaattcagagaaccatgctggaattgctgaaccagctggacgggttcgacgacagaggggatgtgaaggtgattatggccactaacaaaatcgagactcttgacccagcattaatcaggcctgggagaattgatcgtaaaatcttatttgaaaaccctgatctaagtactaagaaaaaaattttagggattcacacttccaagatgaatttaagtgaggacgttaatcttgaaactttagtaacaacaaaggatgatttgtcaggcgccgatatccaggcaatgtgtacagaagcaggtttgttagcccttagagagagaagaatgcaagttacagcggaggattttaaacaagccaaggagagagtcatgaaaaataaagttgaggaaaatttagaaggtttatacttgtga

SEQ ID NO: 5062 - protein, 437 aa, Saccharomyces cerevisiae
MGQGVSSGQDKKKKKGSNQKPKYEPPVQSKFGRKKRKGGPATAEKLPNIYPSTRCKLKLLRMERIKDHLLLEEEFVSNSEILKPFEKKQEEEKKQLEEIRGNPLSIGTLEEIIDDDHAIVTSPTMPDYYVSILSFVDKELLEPGCSVLLHHKTMSIVGVLQDDADPMVSVMKMDKSPTESYSDIGGLESQIQEIKESVELPLTHPELYEEMGIKPPKGVILYGAPGTGKTLLAKAVANQTSATFLRIVGSELIQKYLGDGPRLCRQIFKVAGENAPSIVFIDEIDAIGTKRYDSNSGGEREIQRTMLELLNQLDGFDDRGDVKVIMATNKIETLDPALIRPGRIDRKILFENPDLSTKKKILGIHTSKMNLSEDVNLETLVTTKDDLSGADIQAMCTEAGLLALRERRMQVTAEDFKQAKERVMKNKVEENLEGLYL

SEQ ID NO: 5063 - DNA, 1260 bp, Arabidopsis thaliana
  CDS (1)..(1260)
atggcggaggatacgagcttcgagggagaccaactagcttccatgactactgatgacatcggtagagcttctcgtctcttagccaacgagattcgcatcctcaaggaagaatcgcagaggacaaaccttgatttggaatcagtgaaggagaaaataaaggagaaccaggagaagattaagcttaacaaacagcttccttacttagttggcaatatcgttgagattcttgagatgagtccagaggatgatgcagaggaagatggagcgaatatcgatctggactctcagaggaagggaaagtgtgtcgttctaaaaacatcaactcgtcagaccatcttcctccctgttgttggacttgttgatccagatacattgaagcctggggacttagttggagttaacaaagatagttacttgattctggatactttaccttctgagtatgattcaagagtaaaagcaatggaggtcgacgaaaaacctactgaagactacaatgatatagggggactagaaaaacagatacaagaacttgttgaagccattgtgttgccaatgactcataaagagcagttcgaaaagttgggtatccgtccaccaaaaggtgtactcttgtatggtcctcctggaaccggaaagacgttgatggcccgagcttgtgcagcacagacaaatgcaactttcctcaaactagcagggccacaacttgttcagatgttcatcggagatggagcaaaacttgtccgtgatgctttcctgcttgcaaaagagaaatccccttgtattatattcatagatgagattgacgcaatagggacaaagcgttttgatagcgaagttagtggagaccgtgaggtacaaaggacaatgttggagctgctcaaccagcttgatggattcagcagcgatgatcgcattaaggttattgcagcgacaaatcgtgctgatatactagatcctgcccttatgcgttctggtcgtttggatcgtaaaatcgagtttccgcaccccactgaagaagctagaggcaggatcttacagatacattcaaggaaaatgaatgtgaatgcagacgtcaattttgaagagcttgctcggtcaacggatgatttcaatggagctcaactcaaagcagtgtgtgttgaagcgggtatgcttgccctgcgccgggatgcaactgaggtgaaccatgaggatttcaatgaaggtataattcaagtacaagccaagaagaaagcaagcttgaattactacgcctaa

SEQ ID NO: 5064 - protein, 419 aa, Arabidopsis thaliana
MAEDTSFEGDQLASMTTDDIGRASRLLANEIRILKEESQRTNLDLESVKEKIKENQEKIKLNKQLPYLVGNIVEILEMSPEDDAEEDGANIDLDSQRKGKCVVLKTSTRQTIFLPVVGLVDPDTLKPGDLVGVNKDSYLILDTLPSEYDSRVKAMEVDEKPTEDYNDIGGLEKQIQELVEAIVLPMTHKEQFEKLGIRPPKGVLLYGPPGTGKTLMARACAAQTNATFLKLAGPQLVQMFIGDGAKLVRDAFLLAKEKSPCIIFIDEIDAIGTKRFDSEVSGDREVQRTMLELLNQLDGFSSDDRIKVIAATNRADILDPALMRSGRLDRKIEFPHPTEEARGRILQIHSRKMNVNADVNFEELARSTDDFNGAQLKAVCVEAGMLALRRDATEVNHEDFNEGIIQVQAKKKASLNYYA

SEQ ID NO: 5065 - DNA, 1275 bp, Brassica campestris
  CDS (1)..(1275)
atggcaactccgatggtagaagacacgtcaagcttcgaagaggatcagctcgcttccatgtccaccgaagatatcgtcagagctactcgcctcctcgagaacgagattcgaatcctcaaggaagacgcgcaaagaacaaatcttgaatgcgattcttacaaggagaagattaaagagaatcaggagaagattaaactcaacaagcagcttccttacttggttggcaacattgttgagatattggagatgaatccggaagatgatgctgaagaagacggtgctaacattgaccttgactctcaacgtaagggaaagtgtgttgtcttgaaaacctctacacgacagactatctttctaccagttgttggccttgtggaccctgatagcttgaagcctggggacttggttggggtaaataaagacagttacttgattttggatactttgccatctgagtatgactcgagagttaaagccatggaggttgatgagaaacctaccgaagattacaatgacattggaggactggagaagcagatccaagagcttgtggaggcaattgtgcttcccatgacgcacaaggagcgtttcgagaagcttggtgttcgtccaccaaagggagtgctcttgtatggtcctccagggactggtaaaactctaatggctcgtgcctgtgcagcacagaccaatgccaccttcctaaaattggcaggtcctcagttggtccagatgtttattggagacggagcaaaacttgttcgtgatgcctttcaactagcaaaagagaaagctccgtgtatcatctttatagatgagatcgatgcaattggtacaaagcgttttgacagtgaagtaagcggagacagggaagtgcagaggactatgttggagctgcttaaccagcttgatggattcagtagcgatgagcgtattaaggtgattgctgccactaaccgagcagatattctggacccggcacttatgcgttctggtcggctagacaggaagattgagttcccacatccaacagaagaagcaagagccagaatcttacagattcactcgaggaagatgaatgtccacccagacgtcaactttgaggagcttgcgagatcaacagatgatttcaatggtgctcaactgaaagcagtatgtgtagaggctggtatgttagctcttcgtcgtgatgccacagaggtgaaccatgaggacttcaatgaaggtatcatccaagtccaggccaagaagaaagcaagcttgaactactacgcctaa

SEQ ID NO: 5066 - protein, 424 aa, Brassica campestris
MATPMVEDTSSFEEDQLASMSTEDIVRATRLLENEIRILKEDAQRTNLECDSYKEKIKENQEKIKLNKQLPYLVGNIVEILEMNPEDDAEEDGANIDLDSQRKGKCVVLKTSTRQTIFLPVVGLVDPDSLKPGDLVGVNKDSYLILDTLPSEYDSRVKAMEVDEKPTEDYNDIGGLEKQIQELVEAIVLPMTHKERFEKLGVRPPKGVLLYGPPGTGKTLMARACAAQTNATFLKLAGPQLVQMFIGDGAKLVRDAFQLAKEKAPCIIFIDEIDAIGTKRFDSEVSGDREVQRTMLELLNQLDGFSSDERIKVIAATNRADILDPALMRSGRLDRKIEFPHPTEEARARILQIHSRKMNVHPDVNFEELARSTDDFNGAQLKAVCVEAGMLALRRDATEVNHEDFNEGIIQVQAKKKASLNYYA

SEQ ID NO: 5067 - DNA, 1317 bp, Schizosaccharomyces pombe
  CDS (1)..(1317)
atgtcaactctcgaagaattagacgcgctagatcaatcccagcagggaggatcctccaataatgaaggtttggatggaattgaacaagaaattttggccgccggtatagatgaattgaatagtcggacacgattgttggaaaatgatattaaggttatgaaatccgagtttcaaagattaactcatgaaaagagcaccatgctcgaaaaaatcaaagaaaaccaagaaaaaatttcgaataataagatgctaccttatttggtaggaaacgttgttgaaattttagatatgcaacctgatgaagttgatgtccaagaatcagctaaccaaaactctgaggctactcgtgttggcaagtcagccgttattaagacatctactcgtcaaaccatcttccttcccttaatcggtcttgttgaacctgaagagcttcatccgggtgatcttattggtgtcaacaaagattcttacctgatcattgataaattaccttcagagtatgatagccgtgttaaggctatggaagtagacgaaaaacccacagagcgttattcagatattggtggtttatcaaaacaaatagaagaactgtttgaagccatcgttttgcccatgcagcaggctgataaattccgtaaacttggcgtgaaacctcccaagggatgtttgatgtttggtccccctggcactggtaagaccttattagctcgtgcctgtgctgcccagtccaatgctacattcctaaaacttgcggctcctcaacttgttcaaatgtttattggtgatggcgctaaactcgttcgcgatgctttcgccttggccaaagaaaaaagccctgccattatatttattgatgaattagatgctattggtaccaagcgttttgattctgaaaaagccggtgatcgtgaagtccaacgtactatgctggagctcctcaatcaactcgatggttttagtagtgatgaccgtgtcaaggtgattgctgctacaaatcgtgtagatacgttggatccggctctgttacgttctggtcgtctggaccgaaaactcgaatttcctcttcccaatgaagaagctcgtgttggtattttacgcattcattcacgtaaaatggccattgacgacgatattaactgggaggagttggcgagaagtacagatgaatataatggtgccatgttgaagagcgtttgcgttgaagcgggtatgattgctcttcgtcaaggtgatactaaaattaatcatgaacattttatggatggtatattggaagtacaaatgcgcaaatctaagactctgcaatactttgcataa

SEQ ID NO: 5068 - protein, 438 aa, Schizosaccharomyces pombe
MSTLEELDALDQSQQGGSSNNEGLDGIEQEILAAGIDELNSRTRLLENDIKVMKSEFQRLTHEKSTMLEKIKENQEKISNNKMLPYLVGNVVEILDMQPDEVDVQESANQNSEATRVGKSAVIKTSTRQTIFLPLIGLVEPEELHPGDLIGVNKDSYLIIDKLPSEYDSRVKAMEVDEKPTERYSDIGGLSKQIEELFEAIVLPMQQADKFRKLGVKPPKGCLMFGPPGTGKTLLARACAAQSNATFLKLAAPQLVQMFIGDGAKLVRDAFALAKEKSPAIIFIDELDAIGTKRFDSEKAGDREVQRTMLELLNQLDGFSSDDRVKVIAATNRVDTLDPALLRSGRLDRKLEFPLPNEEARVGILRIHSRKMAIDDDINWEELARSTDEYNGAMLKSVCVEAGMIALRQGDTKINHEHFMDGILEVQMRKSKTLQYFA

SEQ ID NO: 5069 - DNA, 1272 bp, Solanum lycopersicum
  CDS (1)..(1272)
atggcaacgccgatggctgaggatagcaacttcgaagatgaccagctccatgctatgtccactgaagatattattagggcttctcgccttcttgacaatgaaattcgaatcataaaggaagagctgcagaggacgaatctagagttggattcattcaaggagaagataaaggagaaccaagaaaaaattaagctcaataagcaacttccttacttggtcggcaacattgttgagatattggaaatgaatcctgaagaagaagctgaggaggatggtgcaaatattgatctcgactcacaaaggaagggcaagtgtgttgtactgaaaacatccacacgccagacaattttcttgcctgttgttggtcttgttgatcctgacaacttaaaacctggtgatctggttggagtaaataaagacagttatttgatattggacaccttgccatctgaatatgattctcgggtaaaggcaatggaagttgatgaaaagccaactgaagactaccatgatattggaggcttggagaaacagattcaagaacttgtcgaggcaattgtgctgcctatgacacaccaagaacggttccagaaattaggtgttcgtcctccaaagggagtccttttgtatgggcctcctgggactgggaaaaccctgatggccagagcctgtgctgcacaaacaaatgctacttttctcaagttagcgggacctcagcttgtgcagatgttcattggagatggagcaaaacttgttcgtgatgctttccagctggcaaaagagaaatcaccttgcataattttcattgatgaaattgatgctataggcacaaagcgttttgatagcgaagttagtggggatcgagaggtccaacgaactatgttggagttacttaaccagctcgatggttttagcagcgatgatcggattaaggtgatagcagcaacaaacagagctgatattttggatcctgctttgatgcgatctggtcgtttggatcgtaaaatcgaattcccccaccccacagaggaagccagggctcggatcctgcagatccattccagaaagatgaatgtcaacccagatgttaactttgaagaattggctcggtcgacagatgattttaatggggcacagttgaaagctgtatgtgttgaggcaggcatgctagcactccgtcgcgatgccactgaggtaactcatgaagacttcaatgaaggtatcattcaagttcaagccaagaagaaagccagcttaaactactatgcctaa

SEQ ID NO: 5070 - protein, 423 aa, Solanum lycopersicum
MATPMAEDSNFEDDQLHAMSTEDIIRASRLLDNEIRIIKEELQRTNLELDSFKEKIKENQEKIKLNKQLPYLVGNIVEILEMNPEEEAEEDGANIDLDSQRKGKCVVLKTSTRQTIFLPVVGLVDPDNLKPGDLVGVNKDSYLILDTLPSEYDSRVKAMEVDEKPTEDYHDIGGLEKQIQELVEAIVLPMTHQERFQKLGVRPPKGVLLYGPPGTGKTLMARACAAQTNATFLKLAGPQLVQMFIGDGAKLVRDAFQLAKEKSPCIIFIDEIDAIGTKRFDSEVSGDREVQRTMLELLNQLDGFSSDDRIKVIAATNRADILDPALMRSGRLDRKIEFPHPTEEARARILQIHSRKMNVNPDVNFEELARSTDDFNGAQLKAVCVEAGMLALRRDATEVTHEDFNEGIIQVQAKKKASLNYYA

SEQ ID NO: 5071 - DNA, 1305 bp, Saccharomyces cerevisiae
  CDS (1)..(1305)
atggccaccttggaagaattggatgctcaaactttaccaggagacgatgaattagatcaagagattttgaatctttcgacgcaggagcttcaaacaagagccaagctcttggacaatgaaattcgtatttttagatctgaattgcaaagactgtcccatgaaaacaacgttatgctcgagaagattaaggacaataaggaaaaaatcaagaataatagacagttaccgtaccttgtggctaacgttgtcgaggtcatggatatgaatgagattgaagacaaagaaaatagtgaatctactacacaaggtggcaatgtcaacttagataacaccgctgttggcaaagctgctgtagtcaagacttcttctagacagactgttttcttgcccatggtcggtttagtagatcctgataaacttaagccaaatgacctggtaggtgtgaataaagactcgtatttgattttggatactttaccctctgaatttgattctcgtgtaaaagctatggaggtagatgaaaaacccacagaaacttactcggacgtgggtgggttggataaacagattgaagagctggtggaggccattgtgttacctatgaaacgtgcagataaattcaaagatatgggaattagagcgcccaagggtgccctaatgtacgggcctccgggtacaggtaaaactttattagctcgtgcttgcgcagctcagacgaatgctacttttttgaagctggcagcacctcaattggtacaaatgtatatcggtgaaggtgctaaactagtgcgcgatgcttttgcactggccaaggaaaaggcaccaactattattttcattgacgaattggatgccattggtactaagagatttgattctgaaaaatccggtgatagggaagtgcaaagaaccatgctggaattattgaatcaattggatggctttagctccgatgatcgtgtcaaagtcttggcggctaccaatagagttgatgttttagatcctgctttgttaagatcaggaagattggatagaaaaattgaattcccactcccatccgaagactcgagagctcaaattttacaaattcattccagaaaaatgaccactgatgatgatattaactggcaagaacttgccaggtctactgatgagtttaatggtgcccagttaaaggcggtaactgtggaggcaggtatgattgccttaaggaatgggcaatcttccgttaaacacgaagatttcgttgagggtataagtgaagttcaagcaagaaaatcgaaatcggtatccttttatgcataa

SEQ ID NO: 5072 - protein, 434 aa, Saccharomyces cerevisiae
MATLEELDAQTLPGDDELDQEILNLSTQELQTRAKLLDNEIRIFRSELQRLSHENNVMLEKIKDNKEKIKNNRQLPYLVANVVEVMDMNEIEDKENSESTTQGGNVNLDNTAVGKAAVVKTSSRQTVFLPMVGLVDPDKLKPNDLVGVNKDSYLILDTLPSEFDSRVKAMEVDEKPTETYSDVGGLDKQIEELVEAIVLPMKRADKFKDMGIRAPKGALMYGPPGTGKTLLARACAAQTNATFLKLAAPQLVQMYIGEGAKLVRDAFALAKEKAPTIIFIDELDAIGTKRFDSEKSGDREVQRTMLELLNQLDGFSSDDRVKVLAATNRVDVLDPALLRSGRLDRKIEFPLPSEDSRAQILQIHSRKMTTDDDINWQELARSTDEFNGAQLKAVTVEAGMIALRNGQSSVKHEDFVEGISEVQARKSKSVSFYA

SEQ ID NO: 5073 - DNA, 1227 bp, Arabidopsis thaliana
  CDS (1)..(1227)
atggcttccgcggctgttgcatcgatggttcttgaccctaaagcatcaccggccttgatggatctatccaccgcagacgaagaagatctctatggccgcctcaaatcgcttgaacgacaactagagttcaccgatatccaagaagaatatgtgaaagacgagcaaaagaatctcaaacgagagctgttacgagcacaagaagaggtcaaacgaattcaatccgtgcctttggtgataggtcagttcatggagatggtagatcagaacaacggcatcgtcggatctactactggctccaattactatgtcagaattctcagcacaatcaatagagaactcttaaagccttctgcttccgtcgctcttcaccgtcactccaacgcccttgttgatgttttgcctccggaggctgattctagcatctcccttctcagccaatctgagaagcctgacgtctcctacaatgatattggaggatgcgatattcagaaacaggaaattcgtgaggctgttgaattgcctcttacccaccacgagctttacaaacagattggtattgacccacctcgtggagtcttgctctatggacctcctggtactggaaagactatgttggctaaggctgttgccaatcacacaactgctgccttcattagggttgttggatccgagtttgtgcaaaagtatctcggcgagggacctcgtatggttcgtgatgtcttccgtcttgccaaggaaaatgctccagctatcatcttcattgatgaggtagatgccatcgctactgctaggtttgatgctcaaacaggagccgatagggaagttcagcgtattctcatggagcttcttaatcagatggatggatttgaccagaccgtgaatgtcaaggtcataatggcaacaaacagggcagacactctagatcctgctctcttacgtcctggaagacttgatcgtaagattgagttcccccttcctgatagacgtcaaaagaggcttgttttccaggtatgcacctccaaaatgaaccttagcgatgaggttgacttggaagactatgtttcacggcctgataaaattagcgctgctgagatagcagcaatttgccaggaagctggtatgcatgcggtgcgaaagaacagatatgtgatactacctaaggatttcgagaagggctaccgcgcaaatgttaagaagccagacacggactttgagttttacaagtga

SEQ ID NO: 5074 - protein, 408 aa, Arabidopsis thaliana
MASAAVASMVLDPKASPALMDLSTADEEDLYGRLKSLERQLEFTDIQEEYVKDEQKNLKRELLRAQEEVKRIQSVPLVIGQFMEMVDQNNGIVGSTTGSNYYVRILSTINRELLKPSASVALHRHSNALVDVLPPEADSSISLLSQSEKPDVSYNDIGGCDIQKQEIREAVELPLTHHELYKQIGIDPPRGVLLYGPPGTGKTMLAKAVANHTTAAFIRVVGSEFVQKYLGEGPRMVRDVFRLAKENAPAIIFIDEVDAIATARFDAQTGADREVQRILMELLNQMDGFDQTVNVKVIMATNRADTLDPALLRPGRLDRKIEFPLPDRRQKRLVFQVCTSKMNLSDEVDLEDYVSRPDKISAAEIAAICQEAGMHAVRKNRYVILPKDFEKGYRANVKKPDTDFEFYK

SEQ ID NO: 5075 - DNA, 1272 bp, Aspergillus niger
  CDS (1)..(1272)
atgggagacgtcgccgtcgagaccccggcgaacaacgtcacgcctctcaccaaggcagctccattggacacgatccccaacatagactcgctcgagggcacaggaaacgatgggagcgatgaatacgccacactgaagagattgcagagacacctagagtacattcagcttcaggaggagtacatcaaggatgagcaaaggagcttgaagagagaacttgttcgtgcgcaggaagagatcaagcggatacagagtgtgcctttggttatcggccagttcatggaggcgatcgatcagaataccggtattgtgcagtcgtcgaccggttcgaattatgtcgtccgtatcctgtccacgctcgaccgcgagaagctcaagccttcgtcctcggtcgcactccaccgtcactccaacgcccttgtcgatatcttacctccggaggctgactcctccatcgctatgctgggcgagaatgagaagcctgatgtgacctatgcggatgttggtggtcttgacatgcagaagcaggagatcagggaagcagtcgagctgcccttgacgcaatttgacctttacaagcagatcggtatcgaccctcctcgcggggttctcctttacggccctcccggtacgggtaagaccatgctggtcaaggcggtggcaaacagcacaaccgccagctttatccgtgtaaacggctcggaattcgttcagaaatacctgggtgaaggacctcgcatggttcgtgatgttttcagaatggcgcgggagaactccccggccatcattttcatcgatgagattgatgccatcgccacgaagcgtttcgacgcccagaccggtgcagaccgtgaggtgcagcgtattctgctggagcttctcaaccagatggatggattcgagcagtcgagcaatgtcaaggttatcatggccaccaacagagccgatactctggatccggccttgctacgtccgggtcgtttggaccggaagatcgagtttccgtctttgcgcgaccggcgtgagcgccggttgattttctctacgatagcatccaagatgtcgctttcgccggaagttgacctggactcgctgattgtgcgcaatgagcccctctcgggtgcggtcattgccgcgatcatgcaagaggcgggtctccgtgctgtccggaagaaccgttacaacatcatccctaggtctgatctcgaggatgcttacgccgcccaggtgaagaccggacaggaagcggatagactcgaattctaccggtaa

SEQ ID NO: 5076 - protein, 423 aa, Aspergillus niger
MGDVAVETPANNVTPLTKAAPLDTIPNIDSLEGTGNDGSDEYATLKRLQRHLEYIQLQEEYIKDEQRSLKRELVRAQEEIKRIQSVPLVIGQFMEAIDQNTGIVQSSTGSNYVVRILSTLDREKLKPSSSVALHRHSNALVDILPPEADSSIAMLGENEKPDVTYADVGGLDMQKQEIREAVELPLTQFDLYKQIGIDPPRGVLLYGPPGTGKTMLVKAVANSTTASFIRVNGSEFVQKYLGEGPRMVRDVFRMARENSPAIIFIDEIDAIATKRFDAQTGADREVQRILLELLNQMDGFEQSSNVKVIMATNRADTLDPALLRPGRLDRKIEFPSLRDRRERRLIFSTIASKMSLSPEVDLDSLIVRNEPLSGAVIAAIMQEAGLRAVRKNRYNIIPRSDLEDAYAAQVKTGQEADRLEFYR

SEQ ID NO: 5077 - DNA, 1164 bp, Encephalitozoon cuniculi
  CDS (1)..(1164)
atgtctgcaaggctcaagggcggtctgtttgtcagatacaaacaaatggaaaggaagctcaggctcctggagataagagaggggtatgtgcgcaaggagatcgagactctcaagagggaggagaggcacagcagggaggagcttgaccgggtcaagagtgttccgctgataatggggcagtttcttgagccgattgacagctcgacggcgattgtggggtcgactgcgggaagcaactttgttgtcaggattctgtcgactgtggacagggagctgctgaagccaaacaccactgttgcgctgcacaggcactcgagcgcgattgtcggggtgctcccgccggaggtcgacagcacgattccagtgatgggggagtccgagaagccctctgtgacgtacggagatgtggggggccttgatgtgcagaagcaagagataaaggagactgtggagctcccgctgttgcagtctgacctgtacaggcagattggaattgaccctccgcagggcgttctgctctatgggccgcccggaacggggaagacgatgcttgtgaaggctgtggcgaaccacacgaaggccacgtttatcagggtgaacgggtcagagttcgtgcagaagtatcttggagagggcccgcggatggtcagggatgtgttccggctggcaagggaaaaggcgccgtcgattgtgtttatcgacgaggtggactcgattgcaacgaagaggtttgatgcatcgacctcggcagacagagaggtccagcgtgtgctgatagagctgctgaaccagatggacgggttcgacccggcggcaaatgtcaaggtgattatggccacgaacagggcggacacgattgaccctgcactcctcaggcctgggaggctggacagaaagatagagtttccgctccccgacaggaggcagaagagacttgtgttcaatgcgattacatcgaagatgagcctgaatgactctgtggacattgaaagccttgtgtgcaggcccgagaagataagctgtgcagacatcaactcgatctgccaggaggcggggatgcttgctgttcgggccagcagatacatggttacgcagagggactttgaggaggcatactcgaaggttgttgagaggagcggcacacagcctgcattctataattaa

SEQ ID NO: 5078 - protein, 387 aa, Encephalitozoon cuniculi
MSARLKGGLFVRYKQMERKLRLLEIREGYVRKEIETLKREERHSREELDRVKSVPLIMGQFLEPIDSSTAIVGSTAGSNFVVRILSTVDRELLKPNTTVALHRHSSAIVGVLPPEVDSTIPVMGESEKPSVTYGDVGGLDVQKQEIKETVELPLLQSDLYRQIGIDPPQGVLLYGPPGTGKTMLVKAVANHTKATFIRVNGSEFVQKYLGEGPRMVRDVFRLAREKAPSIVFIDEVDSIATKRFDASTSADREVQRVLIELLNQMDGFDPAANVKVIMATNRADTIDPALLRPGRLDRKIEFPLPDRRQKRLVFNAITSKMSLNDSVDIESLVCRPEKISCADINSICQEAGMLAVRASRYMVTQRDFEEAYSKVVERSGTQPAFYN

SEQ ID NO: 5079 - DNA, 1248 bp, Manduca sexta
  CDS (1)..(1248)
atggaagaaatcggcattattttacctgaaaaggatgatcaagtcactgatgccaaaggtcttccatttgcgggtccccaaactttcgatgagctggaatctgaggatttatacacaaaatataagaaactccaacgtatgctggagttcttagaagtacaggaagagtacataaaagatgagcaaaggaatctcaaaaaagaatacctacatgctcaagaggaagtgaaacgcatacagtctgtaccacttgtcattggccagttccttgaagctgtagaccaaaatactggcatagtgggcagcacaactggatctaactactatgtgaggattctgtcaacaattgacagagagctacttaaaccctcagcatctgtggcactccacaaacattcaaatgctctagtggatgtcctgccaccagaagctgatagctctatttctatgttacaagctgatgaaaagcctgatgtccagtattcggatattggtggcatggacacacagaaacaagagatacgagaggctgtagagctgcctctcactcatgtggagctgtacaggcagattggtattgagccaccacgtggtgtactcatgtacggcccacctggttgtggcaagaccatgttggcaaatgccgttgctcatcacactacagcggcgttcatccgtgtcgtgggatcggaattcgtccaaaagtacttgggtgaaggccctcgtatggttcgagatgtgttccgtctcgcaaaggaaaacagtccagctattatcttcattgatgaaattgacgctatcgctactaaaagatttgatgcccaaactggtgctgacagagaggtgcaaagaatcttattagagttgcttaaccagatggatggctttgatcaaacaaccaatgttaaagtaattatggccacaaatcgtgctgataccttagatcccgctctacttagacctggacgtttggataggaaaattgagttccctctacctgacagacgtcaaaagcgattgatcttctcaactataacagcaaaaatgaatctgtctgaagaagtagacttagaggagtttgtagcgcggcccgaccgtgtctccggggctgatatcaacgccatctgccaagaggccggcatgaacgcagtccgtgagaatagatatatcgtcttgcctaaagacttcgaaaagggctacaaaaataatatcaagaaggatgaaagtgaatatgaattctacaagtaa

SEQ ID NO: 5080 - protein, 415 aa, Manduca sexta
MEEIGIILPEKDDQVTDAKGLPFAGPQTFDELESEDLYTKYKKLQRMLEFLEVQEEYIKDEQRNLKKEYLHAQEEVKRIQSVPLVIGQFLEAVDQNTGIVGSTTGSNYYVRILSTIDRELLKPSASVALHKHSNALVDVLPPEADSSISMLQADEKPDVQYSDIGGMDTQKQEIREAVELPLTHVELYRQIGIEPPRGVLMYGPPGCGKTMLANAVAHHTTAAFIRVVGSEFVQKYLGEGPRMVRDVFRLAKENSPAIIFIDEIDAIATKRFDAQTGADREVQRILLELLNQMDGFDQTTNVKVIMATNRADTLDPALLRPGRLDRKIEFPLPDRRQKRLIFSTITAKMNLSEEVDLEEFVARPDRVSGADINAICQEAGMNAVRENRYIVLPKDFEKGYKNNIKKDESEYEFYK

SEQ ID NO: 5081 - DNA, 1170 bp, Schizosaccharomyces pombe
  CDS (1)..(1170)
atgaatagtacagaggaaattgatttgtacaatcgctggaaagcgctagagcgccaattagaaatgctggatttacaagaaggattcatcaaagaagactgtaaatcactcaagcgagaattaataagagcacaagaagaagtgaaacgaatacaatctgtgcctctagtaatcggacaattcttggaggccattgatcaaaatactgctattgtaggaagtacaactggatctaattatgtcgttcgtattttaagtacacttgatcgagagcttttaaaaccttcagcaagtgtcgctcttcaacgacactcaaacgctttagtcgacattttaccaccagaagcagattcatctatttctatgcttcgtccagatgaaagacctgatgtttcttatgctgatgttggtggtttagatgttcaaaagcaagaagttcgtgaagccgttgaattacctctaacacaaggcgatctttatcgtcagattggtattgatcctcctagaggcgttttactttacggtcctccaggtaccggtaaaacaatgcttgtaaaagctgtggccaactcaacagctgccaactttattcgtgttgttggatctgaatttgttcaaaaataccttggtgagggtccacgtatggttcgagatgtatttagaatggcacgtgaaaatgctcctgctattatttttattgatgaaattgatgctattgctacaaagcgttttgatgcccaaaccggtgctgatcgtgaagtccaacgtattttgattgaacttttaacccagatggatggttttgatcaaggtgctaatgttaaagtaatcatggctactaatcgtgccgacactctagatcctgctcttcttcgtcctggccgtttagatcgaaaaattgaatttccttcctaccgcgatcgtcgccaacgtcgacttgttttccaaaccatcacagctaaaatgttgctttctcccgaggttgacttggatacatttattatgcgaccagatgcatctagtggtgctcaaattgctgccatcatgcaagatgcaggtcttttagctgtgcgaaagagtcgtggcgtcatccttcaaagcgacattgaagaggcttatgctcgtgccgttaagcctacagatatggaacagtttgctttctataaataa

SEQ ID NO: 5082 - protein, 389 aa, Schizosaccharomyces pombe
MNSTEEIDLYNRWKALERQLEMLDLQEGFIKEDCKSLKRELIRAQEEVKRIQSVPLVIGQFLEAIDQNTAIVGSTTGSNYVVRILSTLDRELLKPSASVALQRHSNALVDILPPEADSSISMLRPDERPDVSYADVGGLDVQKQEVREAVELPLTQGDLYRQIGIDPPRGVLLYGPPGTGKTMLVKAVANSTAANFIRVVGSEFVQKYLGEGPRMVRDVFRMARENAPAIIFIDEIDAIATKRFDAQTGADREVQRILIELLTQMDGFDQGANVKVIMATNRADTLDPALLRPGRLDRKIEFPSYRDRRQRRLVFQTITAKMLLSPEVDLDTFIMRPDASSGAQIAAIMQDAGLLAVRKSRGVILQSDIEEAYARAVKPTDMEQFAFYK

SEQ ID NO: 5083 - DNA, 1242 bp, Solanum tuberosum
  CDS (1)..(1242)
atggcaacagcgatggttctcgacccgaaacccgccgagaaacttccggcaacccggccggaaacctccatcaccgacgttccttccgatggagaagatgacctatacgctcgcctgaaatcacttcaacggcaactcgaattcatcgagatccaagaggaatatgttaaggacgagctcaaaaacctccgacgagaacatttacgggcacaggaagaagtcaaacggatccagtcggtgccgttagtaattggacagttcatggagatgattgatcagaataacgctattgtaggttcaactacgggttctaattactatgttaggatactaagtacgattaatcgagagcttcttaagccgtcggcttctgtgggtttggatcgccattcaaatgcgcttgttgatgttttgccacctgaggctgattccagtatttcgctgcttagccaatcggagaagcctgatgttacttacaatgatattggaggttgcgacatacaaaagcaggaaattcgtgaagctgttgaattacctctaactcatcatgagttgtacaagcagatcggtatagatcctccccggggtgtgttgctctatggtccaccaggcactgggaaaactatgcttgcaaaggctgtagcacatcataccaccgcagccttcataagggtggttggctcagaatttgttcagaagtacttgggcgagggtccacgaatggttcgtgatgtcttccgccttgccaaagaaaatgctccagcaatcatttttattgatgaggttgatgcaattgctactgctaggtttgatgctcagactggagctgatagagaggtccagcgtatcctcatggagctactaaatcagatggatgggtttgaccaaacagtgaatgtgaaagttattatggcaaccaatagagccgacacactggaccctgcacttttacgtcctggaaggcttgatcgtaagattgaatttccgttgcctgatagacgtcaaaaaaggctcgtttttcaggtatgcacggctaagatgaacttaggtgatgaggttgacttggaagattatgtttctcgccctgataaaatcagtgctgctgagattacggctatctgtcaagaagctggtatgcatgcagtgcgcaagaatcgatatgtcatccttccaaaggactttgaaaagggttacaggacaaacgtgaagaagcctgacactgactttgaattctacaagtga

SEQ ID NO: 5084 - protein, 413 aa, Solanum tuberosum
MATAMVLDPKPAEKLPATRPETSITDVPSDGEDDLYARLKSLQRQLEFIEIQEEYVKDELKNLRREHLRAQEEVKRIQSVPLVIGQFMEMIDQNNAIVGSTTGSNYYVRILSTINRELLKPSASVGLDRHSNALVDVLPPEADSSISLLSQSEKPDVTYNDIGGCDIQKQEIREAVELPLTHHELYKQIGIDPPRGVLLYGPPGTGKTMLAKAVAHHTTAAFIRVVGSEFVQKYLGEGPRMVRDVFRLAKENAPAIIFIDEVDAIATARFDAQTGADREVQRILMELLNQMDGFDQTVNVKVIMATNRADTLDPALLRPGRLDRKIEFPLPDRRQKRLVFQVCTAKMNLGDEVDLEDYVSRPDKISAAEITAICQEAGMHAVRKNRYVILPKDFEKGYRTNVKKPDTDFEFYK

SEQ ID NO: 5085 - DNA, 1287 bp, Saccharomyces cerevisiae
  CDS (1)..(1287)
atggaggaactaggtattgtgacacctgtcgaaaaggcagtcgaagaaaaaccagccgtcaaatcatacgcatcattgttggctcaactcaatggtacagtcaacaataacagtgccctgtctaatgtgaattctgatatatatttcaaattgaagaaattagaaaaagagtatgaactgctgactttgcaagaagactatattaaggacgaacaacgccatttgaaacgtgaattgaagagagctcaagaagaagtaaagagaatccagtcggttccattagttatcgggcaattcttagaacctattgatcagaacacaggtattgtttctagtaccacaggtatgagttatgtcgttagaatattatcaaccctagaccgtgaactattaaagccatctatgtctgtagctttacatcgtcattcaaatgctttagttgacatcctaccacctgattccgactctagcatatccgtaatgggcgaaaacgaaaaacctgacgtcacttatgcagatgttggtgggttagatatgcaaaagcaagaaatcagggaagccgtagagctgccattagttcaggctgatctatacgagcaaatcggtattgaccctcctaggggtgttctattatatggtccaccaggtaccggtaagacgatgcttgttaaagccgtcgccaatagtacaaaagctgcattcataagagttaacggctccgaatttgttcacaaatatcttggtgaaggtccaagaatggttcgtgacgtctttagactcgccagggaaaatgctccatccattatattcatagatgaggtagattccattgccacaaagcgttttgatgctcaaacgggttccgatcgtgaagtacagcgtatcctgattgagttgttgacacaaatggatggtttcgatcaatccaccaacgttaaagtcatcatggctacaaacagggcagacacattggacccagctttgctgagaccaggcagattagatagaaagattgagtttccctaccttcgtgataggcgtgaacgtcgtttgattttcggtaccattgccagtaagatgtcccttgccccagaagcggacttagactcgcttattattcgtaacgactctctatcaggtgctgttattgcagcgatcatgcaggaagctggtttaagagcagtgaggaaaaacagatatgtcatcttacaaagcgatctggaagaagcttacgccactcaagtcaagacagataataccgtcgataaattcgacttctacaaatga

SEQ ID NO: 5086 - protein, 428 aa, Saccharomyces cerevisiae
MEELGIVTPVEKAVEEKPAVKSYASLLAQLNGTVNNNSALSNVNSDIYFKLKKLEKEYELLTLQEDYIKDEQRHLKRELKRAQEEVKRIQSVPLVIGQFLEPIDQNTGIVSSTTGMSYVVRILSTLDRELLKPSMSVALHRHSNALVDILPPDSDSSISVMGENEKPDVTYADVGGLDMQKQEIREAVELPLVQADLYEQIGIDPPRGVLLYGPPGTGKTMLVKAVANSTKAAFIRVNGSEFVHKYLGEGPRMVRDVFRLARENAPSIIFIDEVDSIATKRFDAQTGSDREVQRILIELLTQMDGFDQSTNVKVIMATNRADTLDPALLRPGRLDRKIEFPYLRDRRERRLIFGTIASKMSLAPEADLDSLIIRNDSLSGAVIAAIMQEAGLRAVRKNRYVILQSDLEEAYATQVKTDNTVDKFDFYK

SEQ ID NO: 5087 - DNA, 1281 bp, Arabidopsis thaliana
  CDS (1)..(1281)
atggtgagagatattgaagatgagattagagacgagaagaatcctcgtcctcttgatgaagatgatatcgctctcctcaagacttatgggttagggccttactctgcacctatcaagaaagtggagaaagaaattaaggatctcgccaagaagatcaacgatctatgtggtatcaaggagtctgatactggtttagctcctcccagtcaatgggatcttgtatctgataagcaaatgatgcaagaagagcaacctctgcaggttgcgagatgcacaaagattataagtccaaacactgaagacgccaaatacgtcataaatgtcaaacaaattgctaagtttgttgttggacttggcgataaagtttctcccactgatattgaggaaggcatgcgtgttggagttgatcggaataaatatcagattcagattcctctacctcccaaaatcgatcctagcgtgaccatgatgactgtcgaagagaaacctgatgtaacttacaatgatgttggtggatgcaaggagcagattgagaagatgcgagaggttgttgaactgccaatgcttcatccagagaaatttgtgaagcttggaatagatcctcccaagggtgttctctgctacggacctcctggtactggtaaaactcttctggctagagctgtggccaacagaaccgatgcttgctttatcagggttattggaagtgagcttgttcagaagtatgttggtgaaggagctaggatggttcgtgaactgtttcagatggcacggtccaagaaagcctgcattgtgttctttgacgaagttgatgccattggtggtgcaagatttgatgatggtgttggtggtgataacgaagtccaacgtactatgcttgagattgtgaatcagcttgatgggtttgacgcacgtggtaacatcaaggttcttatggcaacaaacaggcctgacacactagacccagctcttttacgtcctggacgtcttgaccgtaaggttgagtttggtctacctgacctggagagcagaacacagatcttcaagattcacacaagaaccatgaactgcgaaagagacatccgtttcgaactccttgctcgcctctgcccaaactcaacgggagctgatattcgaagtgtatgcactgaagcaggaatgtacgcaatcagagctaggagaaagactgtgactgagaaagactttctagacgcagtgaacaaagtcattaaaggttaccaaaagttcagtgccactcccaagtatatggtctacaattag

SEQ ID NO: 5088 - protein, 426 aa, Arabidopsis thaliana
MVRDIEDEIRDEKNPRPLDEDDIALLKTYGLGPYSAPIKKVEKEIKDLAKKINDLCGIKESDTGLAPPSQWDLVSDKQMMQEEQPLQVARCTKIISPNTEDAKYVINVKQIAKFVVGLGDKVSPTDIEEGMRVGVDRNKYQIQIPLPPKIDPSVTMMTVEEKPDVTYNDVGGCKEQIEKMREVVELPMLHPEKFVKLGIDPPKGVLCYGPPGTGKTLLARAVANRTDACFIRVIGSELVQKYVGEGARMVRELFQMARSKKACIVFFDEVDAIGGARFDDGVGGDNEVQRTMLEIVNQLDGFDARGNIKVLMATNRPDTLDPALLRPGRLDRKVEFGLPDLESRTQIFKIHTRTMNCERDIRFELLARLCPNSTGADIRSVCTEAGMYAIRARRKTVTEKDFLDAVNKVIKGYQKFSATPKYMVYN

SEQ ID NO: 5089 - DNA, 1278 bp, Prunus persica
  CDS (1)..(1278)
atggcgccagaacctgaagacatcaaggacgagaagaaccctagaccgcttgacgaggacgacatcgccctcctcaagacctatgggttagggccttattcaacacatattaagaaagccgagaaggaagtcaaggatttggctaagaaggtcaatgatttgtgtggtattaaggagtctgatactggcttagctgcacccagccagtgggatcttgtttctgacaagcaaatgatgcaggaggagcagcctcttcaggttgcaagatgtacgaagataatcaatcccaattctgaggatgctaaatacgtcattaatgtcaagcaaattgcaaagtttgttgttgggctgggtgacaaggtttctccaactgatatagaagaaggcatgcgtgtgggggttgacaggaacaagtatcaaattcagattcctttgcctccaaagatcgatccaagtgtgaccatgatgacggtggaagagaagccagatgtaacatataatgatgttggtggatgcaaggagcagattgaaaagatgcgagaagttgtggagctgccaatgcttcaccccgagaagtttgtgaagctcggaattgatcctccaaagggtgtcctctgttatggtcctccaggaaccggtaaaacacttctagctagggctgtcgctaatagaactgatgcttgcttcattcgtgttattgggagtgagcttgttcagaaatatgtcggtgagggcgctaggatggttcgtgagctctttcagatggcacgctcaaaaaaggcctgtattgtatttttcgatgaagttgatgccataggaggagctcgctttgatgatggtgtgggtggagacaatgaggttcagcgtacaatgcttgaaattgtgaatcaacttgatgggtttgatgctcgtggaaacatcaaagttttaatggcaacaaacaggcccgacacactagacccagcactgttacgtccgggacgattggatcgtaaggttgagtttggcctccctgatttggagagtagaactcagatatttaagatccatacacgaacaatgaactgtgaaagagatattaggtttgaactactggctcggctctgcccaaattcaactggggctgatataagaagcgtgtgcactgaagctggaatgtacgccatccgtgcacgaaggaagacagtaacagagaaggatttccttgatgctgtgaacaaagtgattaaggggtaccagaagttcagtgcaacaccgaagtatatggtttacaactga

SEQ ID NO: 5090 - protein, 425 aa, Prunus persica
MAPEPEDIKDEKNPRPLDEDDIALLKTYGLGPYSTHIKKAEKEVKDLAKKVNDLCGIKESDTGLAAPSQWDLVSDKQMMQEEQPLQVARCTKIINPNSEDAKYVINVKQIAKFVVGLGDKVSPTDIEEGMRVGVDRNKYQIQIPLPPKIDPSVTMMTVEEKPDVTYNDVGGCKEQIEKMREVVELPMLHPEKFVKLGIDPPKGVLCYGPPGTGKTLLARAVANRTDACFIRVIGSELVQKYVGEGARMVRELFQMARSKKACIVFFDEVDAIGGARFDDGVGGDNEVQRTMLEIVNQLDGFDARGNIKVLMATNRPDTLDPALLRPGRLDRKVEFGLPDLESRTQIFKIHTRTMNCERDIRFELLARLCPNSTGADIRSVCTEAGMYAIRARRKTVTEKDFLDAVNKVIKGYQKFSATPKYMVYN

SEQ ID NO: 5091 - DNA, 1317 bp, Schizosaccharomyces pombe
  CDS (1)..(1317)
atgccacctaaagaagattgggagaaataccaaaagccagttgatacggaagaagaaaatgataaaaatccaccacctttagacgaaggagacatcgagctcttaaaaagctacgctacaggcccatatgctagagaattagcagctattaaagaagatacagaggctgtgttaaaaagaattaatgatactgttggaattaaggagtctgacactggtctagcaccaatttcattttgggacgttgctgcggaccgccaaaggatgagtgaagaacaacctttacaggttgccagatgtaccaaaattattgagaatgaacaatctgcggagaaaaatgcatatgtcattaatttgaaacagattgcaaaatttgttgtcagtttaggtgaacgagttagtcccaccgatattgaagaagggatgcgtgtcggttgtgatcgtaacaaatatgctattcagcttcctcttcctcccaaaattgatccttcagttactatgatgcaagttgaagaaaagccagatgttacttacggagatgtgggtggttgtaaagaacaaatagaaagacttcgcgaagtcgtcgagcttcctttactatctcccgaaagatttgttaagcttggtattgaccctcccaagggtattatgctttatggaccaccagggactggtaagacactatgtgctcgtgctgttgccaatcggactgatgcaacttttattcgtgtaatcggttccgagttggttcaaaaatatgtcggtgaaggtgctcgtatggttagagaattatttgaaatggcacgaactaaaaaagcatgtattatcttttttgacgaaattgacgctattggcggggctcgctttgatgatggagcaggtggtgataatgaagttcaaagaacaatgcttgaattaattacccagttggatggattcgaccctcgtggtaacattaaagttctgtttgcgaccaacagaccaaataccttggatgaagctttgatgcgtcccggtcgtatagatcgtaaagttgagtttggtttacctgatttagaaggtcgtgctcatattttacgcatccacgctaaaagtatggcgattgacaaggatattcgttgggaattaattgcacggttatgcccttcacaaactggtgcagagcttcgttctgtatgcactgaggctggaatgtttgcgattcgtgctagaagaagagttgctaccgaaaaggatttccttgacgccgttcaaaaggttgtaaaaggtaaccaaaagtttagcagtactgctgattatatgaacatgagctcttag

SEQ ID NO: 5092 - protein, 438 aa, Schizosaccharomyces pombe
MPPKEDWEKYQKPVDTEEENDKNPPPLDEGDIELLKSYATGPYARELAAIKEDTEAVLKRINDTVGIKESDTGLAPISFWDVAADRQRMSEEQPLQVARCTKIIENEQSAEKNAYVINLKQIAKFVVSLGERVSPTDIEEGMRVGCDRNKYAIQLPLPPKIDPSVTMMQVEEKPDVTYGDVGGCKEQIERLREVVELPLLSPERFVKLGIDPPKGIMLYGPPGTGKTLCARAVANRTDATFIRVIGSELVQKYVGEGARMVRELFEMARTKKACIIFFDEIDAIGGARFDDGAGGDNEVQRTMLELITQLDGFDPRGNIKVLFATNRPNTLDEALMRPGRIDRKVEFGLPDLEGRAHILRIHAKSMAIDKDIRWELIARLCPSQTGAELRSVCTEAGMFAIRARRRVATEKDFLDAVQKVVKGNQKFSSTADYMNMSS

SEQ ID NO: 5093 - DNA, 1281 bp, Spinacia oleracea
  CDS (1)..(1281)
atggcgattgagcacgaagacgatctcaaggacgagaagaatcctcgtcctcttgacgaggatgacattgctcttctcaaaacctatggattgggaccttactctgccagcatcaagaaggtggagaaggaaatcaaggatatgtcaaagaaagttaatgacttaattggtatcaaggaatctgatactggattagcagctcctagccaatgggatctcgtctctgacaagcaaatgatgcaggaggagcagccactccaggttgcaagatgcaccaagataatcaatccaaacactgaagatgctaagtatgtgattaatgtgaagcagattgcaaagtttgttgttgggctgggagataaagtttctccaacagatattgaagaaggcatgcgtgttggtgttgatagaaacaagtaccagattcagattcccttgccaccaaagattgaccccagtgtgaccatgatgactgtggaagagaagccagatgtgacatataacgatgttggtggatgcaaagagcaaattgaaaagatgcgagaagttgttgaattacccatgcttcacccagagaaatttgttaagcttggaattgatcctcctaagggtgtattgtgctatggtcctcctggtactggaaaaacacttttggccagagctgttgctaatcggactgatgcatgcttcattcgtgttatcgggagtgagcttgtccaaaagtatgttggtgagggtgcccgaatggttcgtgagctatttcagatggcaaggtcaaagaaggcatgtattgttttctttgatgaagttgatgctattggaggtgcacgttttgatgatggtgtgggaggagacaacgaggttcaacgtactatgcttgaaattgtaaaccaacttgatggttttgatgctcgtggaaacatcaaggttcttatggcgacaaacagacccgacactctcgacccagctctcttgcgtcctggacggttagacaggaaggttgagtttggtcttccagatctggagggtaggacacaaatattcaagatccataccaggaccatgaactgtgaaagggatatccgatttgagcttcttgcgcgcctttgcccaaactccacaggtgccgacattaggagtgtgtgcactgaagctggtatgtacgcaattcgagctcggaggaagaccgtcactgagaaagatttcctcgatgctgtgaacaaggtcattaagggataccagaagttcagtgcaacccccaagtatatggtctacaactaa

SEQ ID NO: 5094 - protein, 426 aa, Spinacia oleracea
MAIEHEDDLKDEKNPRPLDEDDIALLKTYGLGPYSASIKKVEKEIKDMSKKVNDLIGIKESDTGLAAPSQWDLVSDKQMMQEEQPLQVARCTKIINPNTEDAKYVINVKQIAKFVVGLGDKVSPTDIEEGMRVGVDRNKYQIQIPLPPKIDPSVTMMTVEEKPDVTYNDVGGCKEQIEKMREVVELPMLHPEKFVKLGIDPPKGVLCYGPPGTGKTLLARAVANRTDACFIRVIGSELVQKYVGEGARMVRELFQMARSKKACIVFFDEVDAIGGARFDDGVGGDNEVQRTMLEIVNQLDGFDARGNIKVLMATNRPDTLDPALLRPGRLDRKVEFGLPDLEGRTQIFKIHTRTMNCERDIRFELLARLCPNSTGADIRSVCTEAGMYAIRARRKTVTEKDFLDAVNKVIKGYQKFSATPKYMVYN

SEQ ID NO: 5095 - DNA, 1404 bp, Saccharomyces cerevisiae
  CDS (1)..(1404)
atgccaccaaaagaagactgggaaaaatacaaggcacctttggaagacgatgataaaaaacctgatgatgacaagatcgtacccttaacagaaggtgacattcaagtcttaaaatcatacggtgcagctccatacgcagccaaattaaagcaaactgagaatgacttaaaagacattgaagcgagaatcaaagaaaaggccggtgtgaaagaaagcgatacagggttagcaccctcccatctatgggatattatgggtgataggcagagactgggcgaagaacatcccttacaagttgctcgttgcacgaagatcattaaggggaatggtgaaagtgacgaaactacgacagataataataacagcggcaatagcaatagtaatagcaatcaacagtctactgatgcagacgaagacgatgaagatgccaagtacgtgataaatcttaagcaaattgccaaatttgtcgtcggattaggtgaacgtgtttctccaacagatatagaagaaggtatgcgtgtaggtgtcgataggtcgaaatataatattgaacttccattgcctccaaggattgacccatcagttactatgatgaccgttgaagaaaagcctgacgttacttatagcgatgtcggtggctgtaaagaccaaattgaaaagctgagagaagttgtcgagctgcccttattatctccagaaagatttgctactcttggtattgatccaccaaagggtatcttattatatgggccacctggtactggtaagacattatgtgctcgtgctgttgctaatagaactgatgcaacttttattagggtcattgggtctgagctagtgcaaaaatatgtcggtgaaggtgctcgtatggttagagaattatttgaaatggctcgtaccaaaaaggcttgcattatattcttcgatgaaatcgacgctgttggtggtgctcgttttgatgatggtgctggtggtgataatgaagttcaaagaactatgttagaactgattacacagttagacgggtttgaccctcgtggtaacattaaagtgatgtttgccaccaataggcccaacactttagatccagctttattgagacccggtagaattgatcgtaaggtagagttttcattacctgacttggaaggtcgtgcaaatatcttccgtattcactctaaatcaatgagtgtggaacgtggcatcagatgggaacttatctccagactgtgtccaaactctaccggtgcagaattaagatctgtttgcacagaagccggtatgtttgccattagagcaagaagaaaggtggctactgaaaaggatttcctgaaggctgttgataaagttattagcggatacaagaagtttagttccacatcgcgttatatgcaatataattga

SEQ ID NO: 5096 - protein, 467 aa, Saccharomyces cerevisiae
MPPKEDWEKYKAPLEDDDKKPDDDKIVPLTEGDIQVLKSYGAAPYAAKLKQTENDLKDIEARIKEKAGVKESDTGLAPSHLWDIMGDRQRLGEEHPLQVARCTKIIKGNGESDETTTDNNNSGNSNSNSNQQSTDADEDDEDAKYVINLKQIAKFVVGLGERVSPTDIEEGMRVGVDRSKYNIELPLPPRIDPSVTMMTVEEKPDVTYSDVGGCKDQIEKLREVVELPLLSPERFATLGIDPPKGILLYGPPGTGKTLCARAVANRTDATFIRVIGSELVQKYVGEGARMVRELFEMARTKKACIIFFDEIDAVGGARFDDGAGGDNEVQRTMLELITQLDGFDPRGNIKVMFATNRPNTLDPALLRPGRIDRKVEFSLPDLEGRANIFRIHSKSMSVERGIRWELISRLCPNSTGAELRSVCTEAGMFAIRARRKVATEKDFLKAVDKVISGYKKFSSTSRYMQYN

SEQ ID NO: 5097 - DNA, 1218 bp, Drosophila melanogaster
  CDS (1)..(1218)
atgacggtgacgaatcggatggaaatcgagtcggcctaccataaaggcgagggattccggtcctactacatccaaaagatcgaggaactgcagctggtggtggccgagaagcaccagaatttgagacgactgcaggcccagcgcaatgagctcaatgctaaagttcggatgctgcgggaggagctgcagctgctccaggaacagggtagctatgtgggcgaggttgtgaagcccatggacaagaagaaagtgctggtcaaggtgcatcccgagggcaagttcgtcgtcgatctggacaaaaacatagatatcaacgacgtaacccccaattgccgcgtggccctgcgcaatgagagctatacgctgcacaagattctgcccaataaggtggatccgctggtctcgcttatgatggttgaaaaagttcctgactccacatacgaaatggttggcggcctggacaaacagattaaagagatcaaggaggtgattgagttgcccgtaaagcatccagagctgtttgatgccttgggtattgcccagccgaagggagtgctcctttatggacctccaggtacaggaaagactttgctggccagggccgttgcccatcacaccgagtgcaccttcattcgcgtctctggctcagagctggtccagaaattcatcggcgagggttcgcgcatggttcgagaactctttgtaatggcccgggaacatgcaccatcaattattttcatggacgaaatcgattccattggctcgtcgcgtattgagtcaggttccggcggcgattccgaggtgcagcgtactatgctggagctacttaaccagctggacggctttgaggccaccaagaacatcaaggtgatcatggccaccaatcgcattgacatcctggatcccgctctgctgcgtcccggccgtattgatcgcaagatcgagttcccgccaccaaacgaggaggcgcgtctggacatcttgaagatccactcccgtaagatgaacctcacgcgtggcattaatctgcgcaagatcgccgagctaatgccaggcgcatcaggtgcggaagtcaagggcgtctgcacggaggccggcatgtatgcgctgcgcgaacgacgcgtccatgtcacccaggaggacttcgagatggctgtggccaaggtgatgcagaaggactcggagaagaacatgtctatcaagaagctgtggaagtag

SEQ ID NO: 5098 - protein, 405 aa, Drosophila melanogaster
MTVTNRMEIESAYHKGEGFRSYYIQKIEELQLVVAEKHQNLRRLQAQRNELNAKVRMLREELQLLQEQGSYVGEVVKPMDKKKVLVKVHPEGKFVVDLDKNIDINDVTPNCRVALRNESYTLHKILPNKVDPLVSLMMVEKVPDSTYEMVGGLDKQIKEIKEVIELPVKHPELFDALGIAQPKGVLLYGPPGTGKTLLARAVAHHTECTFIRVSGSELVQKFIGEGSRMVRELFVMAREHAPSIIFMDEIDSIGSSRIESGSGGDSEVQRTMLELLNQLDGFEATKNIKVIMATNRIDILDPALLRPGRIDRKIEFPPPNEEARLDILKIHSRKMNLTRGINLRKIAELMPGASGAEVKGVCTEAGMYALRERRVHVTQEDFEMAVAKVMQKDSEKNMSIKKLWK

SEQ ID NO: 5099 - DNA, 1209 bp, Manduca sexta
  CDS (1)..(1209)
atgactctcacaaaaatggaggtagactccaccaaaggcgagggattccggccgtactacattacgaagatcgaagaattacaactcattgttgccgaaaaatctcaaaaccttcgtcgtctgcaagcccagcgtaatgagctcaacgctaaagtccgtatgctgcgcgaagaactgcaactgctgcaggaacaaggctcgtacgtcggagaagttgtcaaacccatggacaagaaaaaagtgttggtaaaagtccacccagaaggtaaattcgttgtagatctcgacaagaacgttgatatcaatgatgtcactgccaattgccgcgtcgcccttcgcaatgaaagttatactttgcacaaaatcctgcctaacaaagtcgatcctttggtatctcttatgatggtcgaaaaggtcccagattccacttacgagatggttggaggtttggacaaacagattaaggagataaaggaggttatcgagttgccggtgaagcatccagagttgtttgacgctcttggtattgcgcagcctaaaggtgtgctgctatacgggcctccaggtactggaaagaccttattggctcgtgctgtcgcccaccacaccgagtgtaccttcatccgtgtctctggttcagagttggtccagaaattcattggcgagggcagccgtatggtgcgagaactgttcgtaatggccagggagcatgcaccatccattatcttcatggatgaaattgattctattggttcctctcgtattgaatctggcagtggcggtgactctgaagtacaaagaaccatgttggagctcttaaatcagctggacggttttgaagcaaccaaaaacatcaaagtcatcatggctaccaaccgaattgatatccttgacccagctctgctcagacctggacgtatcgacaggaagattgagttccccccaccaaacgaggaggcacgtttggacatcctaaaaatccattctcgtaaaatgaacttgactagaggaattaacctgcgtaagattgcagaactgatgcctggagcatctggtgcggaggtcaagggagtgtgcaccgaggctggaatgtacgctttgcgtgaacgtagagtgcatgtcactcaagaggacttcgagatggctgtagctaaggtcatgcagaaggactccgaaaagaacatgtctatcaagaaattgtggaagtaa

SEQ ID NO: 5100 - protein, 402 aa, Manduca sexta
MTLTKMEVDSTKGEGFRPYYITKIEELQLIVAEKSQNLRRLQAQRNELNAKVRMLREELQLLQEQGSYVGEVVKPMDKKKVLVKVHPEGKFVVDLDKNVDINDVTANCRVALRNESYTLHKILPNKVDPLVSLMMVEKVPDSTYEMVGGLDKQIKEIKEVIELPVKHPELFDALGIAQPKGVLLYGPPGTGKTLLARAVAHHTECTFIRVSGSELVQKFIGEGSRMVRELFVMAREHAPSIIFMDEIDSIGSSRIESGSGGDSEVQRTMLELLNQLDGFEATKNIKVIMATNRIDILDPALLRPGRIDRKIEFPPPNEEARLDILKIHSRKMNLTRGINLRKIAELMPGASGAEVKGVCTEAGMYALRERRVHVTQEDFEMAVAKVMQKDSEKNMSIKKLWK

SEQ ID NO: 5101 - DNA, 1212 bp, Schizosaccharomyces pombe
  CDS (1)..(1212)
atgacggaggtgctgaagactaacgttttacagagtaatgagaacatagttcagtattatacccaaaaaattcaagatgctgaacttgctattctccaaaagacacaaaatttacgacgattagaggctcaaagaaacggactaaatgcaagagttcgccttctaagagaggagattcagttgcttcaggaacccggaagttatgtcggtgaagtgattaagacaatgggaaagaacaaagttctagtcaaagtccatcctgaaggcaaatatgtcgttgatattagtccagatattgatattaaggagattaaacctaatattcgtgtagccttgaggaacgattcataccaattaattaaaatcctccccaacaaggttgatccacttgtctctctcatgatggtcgaaaaaattcctgactccacttatgagatggttggtggtcttgaaaagcaaatcaaagaaattaaagaagttatcgaattaccagtgaagcatccagaactttttgaaagcttaggtattcctcagcctaaaggtattcttctttatggtcccccgggaaccggtaaaaccttgttagctagagcagttgcccaccataccgattgcaaattcatccgtgtcagtggatcagaacttgttcaaaagtatattggcgaaggtagtcgtatggttcgtgaactatttgttatggctcgtgagcatgctccttctattattttcatggatgagatcgactccatcggctcttcacgatctgattctagtggtggaagtggcgatagcgaagttcagaggaccatgttagagctgttgaatcagcttgatggatttgaagcaaccaaaaatatcaaggtcattatggccactaaccgtatcgacatcttggatcctgctcttcttcgtccaggtcgtattgatcgtaaaattgaattcccacctccatctgctgaggcacgtgccgaaattttgagaatccattcgaggtccatgaatttaacacgtggcattgatttgaagagtatagcggagaaaatgaacggtgctagtggtgccgagctaaaaggtgtttgtactgaagccggtatgtttgcattgagagaaagacgtgttcatgttactcaagaagattttgaattagctgttgctaaagtattaaacaagggcgattctggagaaatgagtttacaaaagcttttcaagtag

SEQ ID NO: 5102 - protein, 403 aa, Schizosaccharomyces pombe
MTEVLKTNVLQSNENIVQYYTQKIQDAELAILQKTQNLRRLEAQRNGLNARVRLLREEIQLLQEPGSYVGEVIKTMGKNKVLVKVHPEGKYVVDISPDIDIKEIKPNIRVALRNDSYQLIKILPNKVDPLVSLMMVEKIPDSTYEMVGGLEKQIKEIKEVIELPVKHPELFESLGIPQPKGILLYGPPGTGKTLLARAVAHHTDCKFIRVSGSELVQKYIGEGSRMVRELFVMAREHAPSIIFMDEIDSIGSSRSDSSGGSGDSEVQRTMLELLNQLDGFEATKNIKVIMATNRIDILDPALLRPGRIDRKIEFPPPSAEARAEILRIHSRSMNLTRGIDLKSIAEKMNGASGAELKGVCTEAGMFALRERRVHVTQEDFELAVAKVLNKGDSGEMSLQKLFK

SEQ ID NO: 5103 - DNA, 1218 bp, Saccharomyces cerevisiae
  CDS (1)..(1218)
atgacagctgctgtaacatcctccaatatagtattagaaacccacgaaagtggtatcaaaccatattttgaacagaagatccaagaaacagaattaaagatccgctccaaaacagaaaatgttcgcagactggaagctcaaaggaatgcattgaatgacaaagtacgttttatcaaggacgaactgcgtctattacaggaacctggatcttatgtgggtgaagttataaagatcgtgtctgacaaaaaagttctcgttaaagtgcaacctgagggaaaatacatcgtggatgttgcaaaagatataaacgtgaaggacttaaaggcatctcaaagagtttgtctaaggagtgactcttatatgttgcataaagttcttgagaataaggctgacccactagtttcgttgatgatggtggaaaaagttcctgattccacatacgatatggttggtggtttgacaaagcaaataaaggagattaaagaagttattgaattgcccgtaaaacatcctgaactttttgaaagtttgggtattgcgcaaccaaagggtgtcatcttatatggcccccctggtacagggaaaaccttattggcaagagctgtcgcacatcacactgattgtaaattcatcagggtcagtggtgcggaactggtacaaaagtatatcggcgaaggttcccgtatggtccgtgagctgtttgtgatggctagagaacatgctccctcaattatctttatggatgaaatcgattccattggctctactcgtgtagaaggttctggtggtggtgattcagaagttcaaagaacaatgttagaactactaaaccaattggacgggtttgaaacttctaaaaatatcaagatcataatggccacgaatagactagatattctagatccagcacttttgagacccggtagaatagataggaagattgaatttccacctccaagtgtcgcagctagagctgaaattttaagaatccattccagaaaaatgaatctaactcgtggtatcaacttgagaaaggttgctgaaaagatgaacggttgttctggtgccgatgtcaaaggtgtctgtacagaagctggtatgtatgctttaagagaaagaagaatacacgttactcaagaagacttcgaactcgctgtgggtaaggttatgaacaagaaccaagaaacggccatttctgtcgccaagctgttcaagtga

SEQ ID NO: 5104 - protein, 405 aa, Saccharomyces cerevisiae
MTAAVTSSNIVLETHESGIKPYFEQKIQETELKIRSKTENVRRLEAQRNALNDKVRFIKDELRLLQEPGSYVGEVIKIVSDKKVLVKVQPEGKYIVDVAKDINVKDLKASQRVCLRSDSYMLHKVLENKADPLVSLMMVEKVPDSTYDMVGGLTKQIKEIKEVIELPVKHPELFESLGIAQPKGVILYGPPGTGKTLLARAVAHHTDCKFIRVSGAELVQKYIGEGSRMVRELFVMAREHAPSIIFMDEIDSIGSTRVEGSGGGDSEVQRTMLELLNQLDGFETSKNIKIIMATNRLDILDPALLRPGRIDRKIEFPPPSVAARAEILRIHSRKMNLTRGINLRKVAEKMNGCSGADVKGVCTEAGMYALRERRIHVTQEDFELAVGKVMNKNQETAISVAKLFK

SEQ ID NO: 5105 - DNA, 1236 bp, Halobacterium salinarium
  CDS (1)..(1236): transl_table=11
atgtcgcgtagcccctcattgccggaccggccgacgctcgacgtcgatcccgagtcgacgccggcggaacgcctcaacgcgctccaagaccactacgtggatatcgtggcggtcaacggagagctgcaggcgcaactcgacgatgtcgaagcccgccgcgaagaactccgcgaggaggtcaaccgcctccagcgcgagaacgagacgctgaaaacggcgtcgctgtacctggcgaccgtcgaagacctgcccgaagacggcagcgccgtgatcaaacagcacggcaacaaccaggaggtcctcaccgagctgtcgccgcgactcgcggacaccctggaggtcggcgaccgggtcgcgatcaacgactcgttcagcgtgcagcgcgtgctcgacgacgagaccgacgcccgcgcgcaggccatggaagtcgacgagtcgccgtcggtcacgtacgctgacatcggcggcctcgacgaccagctccgggaagtccgggaagccgtcgaggacccgctggtcaaccccgagaagttcgacgcggtcggcgtcgaacccccgagtggggtgttgttgcacgggccgcccggcaccggcaagacgatgctcgcgaaagccgtcgcgaaccagacggacgccagcttcatcaagatggccggcagcgagctcgtgcggaagttcatcggcgagggctcccggctggtccgggatctcttcgagctcgccgaacagaaagaccccgcgatcatcttcatcgacgagatcgacgccgtcgccgccaagcgcacggattcgaagaccagcggggacgccgaggtccagcgcacgatgatgcagttgctctcggagatggacggcttcgacgagcgcggcgacatccgcatcatcgccgccaccaaccgcttcgacatgctggactccgcgatcctgcggcccggccgcttcgaccgcctcatcgaagtccccaacccgaacccggacgcccgcgagcgcatcctggagatccacgccggcgagatgaacgtcgccgacagcgtcgacttctcggatctcgccgccgacaccgcggagttctccggtgcgcagctcgccagcctcgccacggaagccgggatgttcgccatccgcgacgaccgcgacgaggtccaccgccaggacttcgacgacgcctacgagaaactcgtcgccgagggggacaccgagtccagcggcccgcggtacccgagctacattcagtaa

SEQ ID NO: 5106 - protein, 411 aa, Halobacterium salinarium
MSRSPSLPDRPTLDVDPESTPAERLNALQDHYVDIVAVNGELQAQLDDVEARREELREEVNRLQRENETLKTASLYLATVEDLPEDGSAVIKQHGNNQEVLTELSPRLADTLEVGDRVAINDSFSVQRVLDDETDARAQAMEVDESPSVTYADIGGLDDQLREVREAVEDPLVNPEKFDAVGVEPPSGVLLHGPPGTGKTMLAKAVANQTDASFIKMAGSELVRKFIGEGSRLVRDLFELAEQKDPAIIFIDEIDAVAAKRTDSKTSGDAEVQRTMMQLLSEMDGFDERGDIRIIAATNRFDMLDSAILRPGRFDRLIEVPNPNPDARERILEIHAGEMNVADSVDFSDLAADTAEFSGAQLASLATEAGMFAIRDDRDEVHRQDFDDAYEKLVAEGDTESSGPRYPSYIQ

SEQ ID NO: 5107 - DNA, 1230 bp, Aeropyrum pernix
  CDS (1)..(1230): transl_table=11
atgacgttaagcagtgcggggggtagcaggagccacaggcataacggcgggcacagcgagagggacgttgagatcaggattctaaaggataaggtgcgcagcctgaccaaggagaagataagcctgcagaaggaactcgagtactataaaaacgagatcaccaagctcctctcgccaccctacatcgaggccgtggtactggaagtcatagacgataacagggttgtcgtgaagagcagcacaggccccaacctcatagttaacgttgcagcgggcgtcgacgccaggtccctgaagcccggggcgatagtggccctcaacaaccggggctccacaattgttgacgtgctgccgggcaggtacgaccccctggttaaggctatggaggttgaggagaggcctaaggtgttcttcaaggacgtcgggggcctcgaggagcagattagggagatatacgaggctgtggtgctgcctataaagaacccccacctctttagggagctcgggatagacccgcctaagggggttctactccacggccccccggggacggggaagaccctcctggctaaggccgtggcgggggagacagaggccacgttcataagggttgtgggcagcgagctcgtcaacaagttcatcggggagggcgccaggcttgtgagggagatattcaggcttgcgagggagaaggccccctcaatactattcatcgacgagatagacgccatcgcatccaagagggtcgacataggaaccagcggggacagggaggtgcagaggaccatgctccagcttctcgcggagctcgacggcttcgaccccctggacaacgtgaaggtcatagcagccactaacaggctagacctcatagacccagccgtcctcaggcccggcaggttcgacaggataatagaggtgcccctgccaagcctccgggggaggctggagatactgggcatccacacaaggaaggcgaagatggcgcccgacgtcgaccttgaggcgatagccaagctcacagaaggcttcagcggcgccgacctcaaggctgtggttgtagaggctggctacaacgccataagacggggatccagggtcataactatggacgacatgataaaggcggtggaaaaggttaaggcggccttggataagaggggcggcggagacccgttcataagagcccagcagaagagcggggacgacacgatagccaccgtgatatag

SEQ ID NO: 5108 - protein, 409 aa, Aeropyrum pernix
MTLSSAGGSRSHRHNGGHSERDVEIRILKDKVRSLTKEKISLQKELEYYKNEITKLLSPPYIEAVVLEVIDDNRVVVKSSTGPNLIVNVAAGVDARSLKPGAIVALNNRGSTIVDVLPGRYDPLVKAMEVEERPKVFFKDVGGLEEQIREIYEAVVLPIKNPHLFRELGIDPPKGVLLHGPPGTGKTLLAKAVAGETEATFIRVVGSELVNKFIGEGARLVREIFRLAREKAPSILFIDEIDAIASKRVDIGTSGDREVQRTMLQLLAELDGFDPLDNVKVIAATNRLDLIDPAVLRPGRFDRIIEVPLPSLRGRLEILGIHTRKAKMAPDVDLEAIAKLTEGFSGADLKAVVVEAGYNAIRRGSRVITMDDMIKAVEKVKAALDKRGGGDPFIRAQQKSGDDTIATVI

SEQ ID NO: 5109 - DNA, 1197 bp, Archaeoglobus fulgidus
  CDS (1)..(1197): transl_table=11
atgggcgatagcgaaatacaatacctcctggaaaagttgaagaagctggaggaggattactacaagcttagagagctttatcgcagattggaagacgagaagaagtttatcgaaagcgaaagaataaggtatgaaagagaagtaagaaggctgagaagtgaagttgaaagattacgctcaccgccattactcgtaggtgttgtttcagacatacttgaagacggaagagttgttgtgaagagctcaaccggaccgaagttcgttgtcaacacctcgcagtacatcaatgaggaagaactcaagccgggtgcgagagtcgctttaaaccagcagacgctggcaatagtgaatgtccttccaacatccaaagacccaatggtttacggctttgaggtggaggagaagccagaagttagctacgaggacataggaggtcttgatgtacagattgaggaaatcagagaggctgttgagctgccgctgctgaaaccggagcttttcgcggaagttggcatagagccgcccaagggtgtgctgctctacggtccgccgggtacgggtaaaaccttgctggccaaagcggtcgcaaaccagacgagggcaacgttcatacgtgtggttggcagcgagttcgttcagaagtacatcggagagggagcaaggctggtcagagaggtgttccagctcgcaaaggagaaggcaccttcaataatattcatagatgagcttgatgcaatagctgcgagaaggacaaacagcgataccagcggtgacagggaggttcagaggacgatgatgcagctcttagctgagcttgacggcttcgacccgagaggggatgtgaaggtcatcggtgcgacgaacaggatcgacatactcgacccagcaatccttcgacctggaaggtttgacagaataatagaggttccgctaccaacgttcgaggggaggatacagattttcaagatacacacgaggaagatgaagcttgcggaggacgttgacttcaaggagcttgcgagaatcacggagggtgcgagtggagcggacatcaaggcgatatgcaccgaggcagggatgtttgccatcagagaggagagggcgaaggttacaatgctggacttcaccaaggcgatagagaaggtgctcaagaagacgactccgatacccgatttgaagggagtgatgttcgtttaa

SEQ ID NO: 5110 - protein, 398 aa, Archaeoglobus fulgidus
MGDSEIQYLLEKLKKLEEDYYKLRELYRRLEDEKKFIESERIRYEREVRRLRSEVERLRSPPLLVGVVSDILEDGRVVVKSSTGPKFVVNTSQYINEEELKPGARVALNQQTLAIVNVLPTSKDPMVYGFEVEEKPEVSYEDIGGLDVQIEEIREAVELPLLKPELFAEVGIEPPKGVLLYGPPGTGKTLLAKAVANQTRATFIRVVGSEFVQKYIGEGARLVREVFQLAKEKAPSIIFIDELDAIAARRTNSDTSGDREVQRTMMQLLAELDGFDPRGDVKVIGATNRIDILDPAILRPGRFDRIIEVPLPTFEGRIQIFKIHTRKMKLAEDVDFKELARITEGASGADIKAICTEAGMFAIREERAKVTMLDFTKAIEKVLKKTTPIPDLKGVMFV

SEQ ID NO: 5111 - DNA, 1326 bp, Methanosarcina acetivorans; identical to SEQ ID NO: 4801
  CDS (61)..(1326): transl_table=11

SEQ ID NO: 5112 - protein, 421 aa, Methanosarcina acetivorans
MRSHLVKPGSVYDGIEPGELGESTESVQDRVRQLESRNSFLEEQCSQIESEKRYLENQKIKYEREIRKLQSELDRMKTSPLIIGTVIDVIKNDRIIVRSSNGPQFLVNVSQYIDEKKLLPGAKVALNQHTLAIAEVIPSTEEPFVAAMEVIESIEVDYDQIGGLDEQIQELQEAVELPLIEPERFARIGIEPPKGVLLYGLPGTGKTLLAKAVAHRTNATFIRVVGSELVQKYIGDGSKLVREIFEMARKKAPSIIFIDELDSIAARRLNETTGADREVQRTLMQLLAEMDGFDKRKNIRIIAATNRPDVLDPAILRPGRFDRLVHVPMPGIEARGKILKIHCGKMTLAGDIDFKKLAKVTEGMSGADLKAIATEAGMFAVRKDKALVEMEDFLEAVEKVSMAADTQKMMPGNLPETTMFV

SEQ ID NO: 5113 - DNA, 1293 bp, Methanocaldococcus jannaschii
  CDS (1)..(1293): transl_table=11
atggtttttgaagaatttatttcaactgaattgaagaaagaaaagaaagcatttactgaagaatttaaagaagaaaaggaaataaacgataattctaacttaaaaaatgatttacttaaagaggaactccaagaaaaggcaagaattgcagaattagaaagtagaatcctaaaattagaattagagaaaaaagagcttgaaagagagaatttacagttaatgaaagaaaatgagattttaagaagagaattagatagaatgagagtccctccattgatagttggaactgtagttgataaagtaggagagagaaaagtagttgtcaaaagctcaacaggcccaagtttcttagttaatgtctctcactttgtaaatccagatgatttagcccctggaaagagagtctgtttaaatcagcaaacattaacagttgttgatgtattgccagaaaataaagactacagagctaaagcaatggaagttgatgaaagaccaaatgttagatatgaagatattggtggattagagaaacaaatgcaagaaattagagaagttgttgaactcccattgaaacatccagaattgtttgaaaaggttggaattgaaccaccaaaaggtattctgctttacggaccaccaggaactggaaagacattattagctaaagctgttgctacagaaacaaatgctacctttataagagttgttggttctgaattggttaagaagtttattggagagggggcttcgttagttaaagatatattcaaattggctaaagaaaaagctccttcaatcatattcatagatgagattgatgctattgcagcaaagagaacagacgctttaactggtggagatagggaagttcagagaacattaatgcagttgttggcagagatggatggattcgatgcaaggggagatgttaagataattggggccacaaacagacctgacattttagaccctgcaatattaagacctggaagatttgatagaatcatagaagtcccagctcctgatgagaagggtagattggagatattgaagattcatacaagaaagatgaatttagcggaagatgtcaatttagaagaaatagctaagatgactgaaggatgtgtaggggctgagttaaaggcaatctgcacagaggcagggatgaatgcaattagggagttaagggactatgtaacaatggatgactttagaaaggcagttgagaagattatggagaaaaagaaagttaaagttaaggaaccagcacacttggatgttctctacagataa

SEQ ID NO: 5114 - protein, 430 aa, Methanocaldococcus jannaschii
MVFEEFISTELKKEKKAFTEEFKEEKEINDNSNLKNDLLKEELQEKARIAELESRILKLELEKKELERENLQLMKENEILRRELDRMRVPPLIVGTVVDKVGERKVVVKSSTGPSFLVNVSHFVNPDDLAPGKRVCLNQQTLTVVDVLPENKDYRAKAMEVDERPNVRYEDIGGLEKQMQEIREVVELPLKHPELFEKVGIEPPKGILLYGPPGTGKTLLAKAVATETNATFIRVVGSELVKKFIGEGASLVKDIFKLAKEKAPSIIFIDEIDAIAAKRTDALTGGDREVQRTLMQLLAEMDGFDARGDVKIIGATNRPDILDPAILRPGRFDRIIEVPAPDEKGRLEILKIHTRKMNLAEDVNLEEIAKMTEGCVGAELKAICTEAGMNAIRELRDYVTMDDFRKAVEKIMEKKKVKVKEPAHLDVLYR

SEQ ID NO: 5115 - DNA, 1311 bp, Methanopyrus kandleri
  CDS (1)..(1311): transl_table=11
atggaagaaacaggcgtgaaagacgtgagggatctctgcgagaagtttctggacttcaagcgtgaaaaggagcggttggaagagctcctcaaggagtacttcaagcggttggaggagttggagcggaagctgcgagcccacgaggagaagcttcgcatcgaggcccgtcgtcgtaagactctggagaaggagttggagatggagcgcgacgagaaggccgagctgcgggaggagctacggcgtaaagaagtcatgatcgagaagctccgtagcgacctgcagcggatgaagaagcccccgctcatcgtgggtaccgtcgaagagatcctcgacgacggtcgcgtgatagtgaagagttccacgggtccgaagttcgtctcgaacgtgagcccgaccgtagacagaaacgagctcgagccgggtgctaacgtggccctcaaccagcagagcatggccgtggtggacgtgttaccgtcggagaaagactcacgtgtactggcgatggaggtggacgagtcacccgatgtgtcgtacgacgatatcggcggtctggacgagcagatccgcgagatccgagaagtcgtggagaagccgctcaaggagcccgagctgttcgagaaggtcggtgtcgaaccgccgaagggtgtcctactgtacggtccaccgggcaccggtaagaccctgctggccaaagccgtggcgaaccacgccgacgccaccttcatccggctcgccgcgccggaattggtccagaagttcatcggcgaaggtgctagactggtgcgggagctgttcgaactcgcacgcgagaaggctccgagtattatcttcatcgacgagatcgacgcgatcggtgcccggcgaatgcgggacgcgacgagcggagaccgcgaggtccagcgcacgctcacccagctgctcgcggagatggacggcttcgatccgctcgacgacatcaaggtcatcgcggccacgaaccggaaggacatcctggacccggccttgctgcgaccgggtcggttcgacaggcacattaagatcccgctaccggacgaggagggccggtacgagatcttcaagatccacacgcgcgacatgaacttggccgaggacgtcgatctccagaagctggcgaagatcaccgagggtgcctcaggtgcggacatcaaggccatatgtaccgaggctggtatgatggctatacgcgaggaccgtgacattgtcaccatggatgacttcctgaaggccgtggacagggtcatgggtaagaaggaagaagagagcggagagttcaagcgcgcgtaccactga

SEQ ID NO: 5116 - protein, 436 aa, Methanopyrus kandleri
MEETGVKDVRDLCEKFLDFKREKERLEELLKEYFKRLEELERKLRAHEEKLRIEARRRKTLEKELEMERDEKAELREELRRKEVMIEKLRSDLQRMKKPPLIVGTVEEILDDGRVIVKSSTGPKFVSNVSPTVDRNELEPGANVALNQQSMAVVDVLPSEKDSRVLAMEVDESPDVSYDDIGGLDEQIREIREVVEKPLKEPELFEKVGVEPPKGVLLYGPPGTGKTLLAKAVANHADATFIRLAAPELVQKFIGEGARLVRELFELAREKAPSIIFIDEIDAIGARRMRDATSGDREVQRTLTQLLAEMDGFDPLDDIKVIAATNRKDILDPALLRPGRFDRHIKIPLPDEEGRYEIFKIHTRDMNLAEDVDLQKLAKITEGASGADIKAICTEAGMMAIREDRDIVTMDDFLKAVDRVMGKKEEESGEFKRAYH

SEQ ID NO: 5117 - DNA, 1323 bp, Methanosarcina mazei; identical to SEQ ID NO: 4803
  CDS (61)..(1323): transl_table=11

SEQ ID NO: 5118 - protein, 420 aa, Methanosarcina mazei
MRSHLVKPGSVYDGIEPGELGETTESVQDRVRQLESRNSFLEEQCSQIESEKRYLENQKIKYEREIRKLQSELDRMKTSPLIIGTVIDVIKNDRIIVRSSNGPQFLVNVSQYIDEKKLLPGAKVALNQHTLAIAEVIPSTEEPFVAAMEVIESVEVDYDQIGGLDEQIQELQEAVELPLTSPERFARIGIEPPKGVLLYGLPGTGKTLLAKAVAHRTNATFIRVVGSELVQKYIGDGSKLVREIFEMARKKAPSIIFIDELDSIAARRLNETTGADREVQRTLMQLLAEMDGFDKRKNIRIIAATNRPDVLDPAILRPGRFDRLVHVPMPGIEARGKILKIHCEKMTLAEDIDFKKLAKATEGMSGADLKAIATEAGMFAVRRDKELVEMEEFLEAVEKVSMAADTQKMMPSNLPETMFV

SEQ ID NO: 5119 - DNA, 1224 bp, Methanococcus maripaludis
  CDS (1)..(1224): transl_table=11
atgagttacccagatgattattccacagatatagaaaaaaataaaatggatttaaaagaatttaaagaaaaaactcagatcgcagagttagaaagtaaagtattgagattggaattaaaaaataaagatattaatagagagaatgtacaaattaaaaaagaaaatgaaatattaaagcgagaacttgataaattaagaattccaccactcatacttggtacaatacttgataaagtaaatgaaagaaaagcggttgttaaaagttctacaggaccaaacttccttgtaaacctttcacaattcgtagatcctgaagacattgttccaggagcaagagtttgtttaaaccagcagactttagcaatcgttgaagtactgcctaaagaaaaagattaccgagctatggcaatggaaattgaggaaaaaccagacatttcctttgaagatatcggtggtttaaacaaccagattagagacattaaagaagtagttgaacttcctcttaaaaacccagaattattcgaaaaagtaggtattgttccaccaaaaggagtattactctacggtccgccaggaactggaaaaactttgcttgcaaaagctgttgcatacgaaaccaatgcatcatttgttagagttgtcggctcagaactcgtcaaaaaattcattggagaaggtgcaaaacttgtaagagatgttttcaaacttgcaaaagaaaagtcaccttgcattatatttattgatgaaatcgatgcagttgcaagcaaaagaactgaatcattaactggtggagacagagaagttcaaagaactttaatgcagcttcttgcagaaatggatggttttgattcgagaggcgatgtaaaaatcattgctgcaacaaacaggcctgacattttagatcctgcaatactcaggcctggaagattcgatagaatcattgaaatttcaatgcctgatgaagatggaagactcgaaatcttaaaaatccacactgaaaaaatgaaccttaaaggcgtggacttaagagaagttgcaaaaattgcagaaaacatggttggtgctgacttaaaagcagtttgtactgaagctggtatgtttgcaataagagaagaaagagaattcatcaaaatggatgacttcagagaagctatctcgaaaattacaggtaaaaaagaaaaatgcagttacgacatgccacaattaaccgtaatgtacggataa

SEQ ID NO: 5120 - protein, 407 aa, Methanococcus maripaludis
MSYPDDYSTDIEKNKMDLKEFKEKTQIAELESKVLRLELKNKDINRENVQIKKENEILKRELDKLRIPPLILGTILDKVNERKAVVKSSTGPNFLVNLSQFVDPEDIVPGARVCLNQQTLAIVEVLPKEKDYRAMAMEIEEKPDISFEDIGGLNNQIRDIKEVVELPLKNPELFEKVGIVPPKGVLLYGPPGTGKTLLAKAVAYETNASFVRVVGSELVKKFIGEGAKLVRDVFKLAKEKSPCIIFIDEIDAVASKRTESLTGGDREVQRTLMQLLAEMDGFDSRGDVKIIAATNRPDILDPAILRPGRFDRIIEISMPDEDGRLEILKIHTEKMNLKGVDLREVAKIAENMVGADLKAVCTEAGMFAIREEREFIKMDDFREAISKITGKKEKCSYDMPQLTVMYG

SEQ ID NO: 5121 - DNA, 1233 bp, Methanobacterium thermoautotrophicum
  CDS (1)..(1233): transl_table=11
atggaaaataactcccagaatgtattaaaaaagattgaggacctcaaaaaagaagttagaatgcttaaagaggaaaactccaagacaaaaagaaatctgatgtggaaaatcagaaaacttgagaaggacaaacttttaattgaaaatgagaggacaaggcttgacagggaagttaaatcccttcgtggtgaaatcgaaaggttcagaacccctccactggtcatagccacagtaacagaggttcttgatgatcacagggtcgcagttaagagtacaaccggaccccacttcgtaataaattattcaagattcatagatagaaagcagctggagcccggtgcaagggttgcactgaaccagcagaccttcagcatagtggatgtacttccatctgagaaggaccccgttgtgacgggcatggaagtcgaggaaaaaccagatgtctcctatgagcagataggtggccttgaggaacaggtacgcgaggtcaaggagacagttgaattaccgctcaaaaaaccggaactctttgaaaagataggtatagagccacccaagggcgtactcctctatggaccacctggtacaggtaaaacactcctggcaaaggccgtcgcccatgagaccaatgcaacattcataaagatagttgcatcagagttcgtcaggaaatacataggtgagggcgcaaggctcgtgaggggagtctttgagctggccaaggagaaatccccgagcataatattcatagacgaaattgacgccgtggcagccaagaggcttaagagttcaacaagcggtgacagggaggttcagaggacactcatgcagctccttgcagagcttgatggattcgaatcaaggggtaatgtcggtatagttgcagcaaccaacagaccagacatacttgacccggcactcctccgtccaggaagatttgacaggttcattgaggtacctctaccaaatgaggatggtagaagggagatactcaagatacacacctcaggaatggcccttgcagaggaggtcgatattgaactccttgcaaggataaccgatggggcatcaggcgcagacctcaaggcaatatgtaccgaggcaggtatgtttgcaatcagggatgagcgtgatgaggtcacaatggctgacttcatggatgccgttgataagataatgggtgttgagaaggaggaggaatacaaacaggaaaccggcgtgatgttcggttaa

SEQ ID NO: 5122 - protein, 410 aa, Methanobacterium thermoautotrophicum
MENNSQNVLKKIEDLKKEVRMLKEENSKTKRNLMWKIRKLEKDKLLIENERTRLDREVKSLRGEIERFRTPPLVIATVTEVLDDHRVAVKSTTGPHFVINYSRFIDRKQLEPGARVALNQQTFSIVDVLPSEKDPVVTGMEVEEKPDVSYEQIGGLEEQVREVKETVELPLKKPELFEKIGIEPPKGVLLYGPPGTGKTLLAKAVAHETNATFIKIVASEFVRKYIGEGARLVRGVFELAKEKSPSIIFIDEIDAVAAKRLKSSTSGDREVQRTLMQLLAELDGFESRGNVGIVAATNRPDILDPALLRPGRFDRFIEVPLPNEDGRREILKIHTSGMALAEEVDIELLARITDGASGADLKAICTEAGMFAIRDERDEVTMADFMDAVDKIMGVEKEEEYKQETGVMFG

SEQ ID NO: 5123 - DNA, 1200 bp, Pyrococcus abyssi
  CDS (1)..(1200): transl_table=11
gtgaatataatgagcggtgacgaagttcaattccacgaaaattacgatgattacataacttacctcaagaggagaataaggcagcttgaactccaagtgagaatgcttgaagctgacaaggagagactcgagagggaattatcgaggcttagatccgaaatgtcgcgattaaggcaaccaccggcattcgctggaaccgtgatagaggtacttgacgatgacagggccatagttcagaactacaacgggccaaggttcgtggttaggatagcgccatggatagagagggacaagcttagaccaggggctagagttgccctggatcagaggacaatggcaatcatagagttgctaccaagctccaaggacccaaccgtcctaggatttgaggttatagagaggcccaatgttacttacaacgacataggcggcctaaagaagcaactgcaagagctaagggaagcgatagagttgccacttaagcacccagagctctttgaggaagtcggtattgatccgccaaagggcgttctcctctatggcccacctggatgtgggaagacattgatggcgaaagctttagcgcatgaggtgaatgcaacgttcataagggtcgtcggaagcgagctggtcagaaagtacataggcgaaggtgctaggctagtccacgagctctttgaattggccaaagaaaaagctccaactataatattcatagacgaaattgatgcaataggtgccaagagaatggatgagaccacaggaggagaaagggaagttaatagaacattaatgcaacttctagccgagatggatggcttcgatcccaggggaaacgttaaggttatagccgcaactaacagacccgatatattggatccagcacttcttaggccaggcaggtttgacagactcatcgaggttccgttgccagacttcgaaggtaggcttgaaatactcaaggttcatacgaggaggatgaagcttaagaacgttgatctaagggtcattgcagagataacagagggggcaagtggagcggacttaaaggccatagctacggaagcgggtatgtttgccataagggagaggagaacgtacgtaacccaggaagactttctaaaagcagtcgataaggttcttggtaacgagaggaagttactgcaacagataacttcccatgagataatatacggttaa

SEQ ID NO: 5124 - protein, 399 aa, Pyrococcus abyssi
MNIMSGDEVQFHENYDDYITYLKRRIRQLELQVRMLEADKERLERELSRLRSEMSRLRQPPAFAGTVIEVLDDDRAIVQNYNGPRFVVRIAPWIERDKLRPGARVALDQRTMAIIELLPSSKDPTVLGFEVIERPNVTYNDIGGLKKQLQELREAIELPLKHPELFEEVGIDPPKGVLLYGPPGCGKTLMAKALAHEVNATFIRVVGSELVRKYIGEGARLVHELFELAKEKAPTIIFIDEIDAIGAKRMDETTGGEREVNRTLMQLLAEMDGFDPRGNVKVIAATNRPDILDPALLRPGRFDRLIEVPLPDFEGRLEILKVHTRRMKLKNVDLRVIAEITEGASGADLKAIATEAGMFAIRERRTYVTQEDFLKAVDKVLGNERKLLQQITSHEIIYG

SEQ ID NO: 5125 - DNA, 1191 bp, Pyrococcus furiosus
  CDS (1)..(1191): transl_table=11
atgagtgaggacgaagctcaatttcacggtaattatgatgattacgtcacttatctaaagagaagaataagacagctagaacttcaagtgagaatgcttgaggcagacaaagaaaggctagagagggagctctcaaggttaaggagtgaaatgtcaagactaagacaaccaccagctttcgcaggaagtgtcatagaagttttagacgatgatagagcaatagtacaaaattataacggacccaggtttgtcgttagaattgcaccatggatagataagagcaaactaaggccaggaacaagggtagcccttgaccaaagaacaatggcaataatagaaatactaccagcttcaaaagacccagcagtcctgggatttgaagttgtagagaggcccaatgtaacgtataacgacattggaggactcaagaaacaactccaggaacttagggaagcaatagaattaccattaaagcatccagaactgtttgaagaagttggaattgatcctccaaagggagttctgctctatggaccacctggatgtggaaaaactttaatggctaaggcaatagctcatgaagttaatgctacattcattagggttgtgggaagcgagctcgttaggaagtacattggagaaggtgccaggctagtccatgagctatttgaattggcaaaagaaaaagctccaacaataatattcattgacgaaattgacgcaatcggcgccaaaaggttagatgagaccacaggtggagaaagagaagtaaatagaacactaatgcaactcttagctgaaatggacgggtttgatccaagaggaaatgtaaaagtaatagcagctactaacaggccagacatcctcgatcctgctcttctcagaccaggtagatttgacaggcttattgaggttccattaccagactttgaaggaagactggaaatcctaaaagtccacacaagaaggatgaagctaagaggagtagatctaagacttatagcagagctaacagagggggcaagtggagcggatctaaaggccatagctacagaggctggtatgtttgcaataagagaaagaagaacttatgtaactcaggaagacttcttaaaagccatagacaaagtgttaggcaatgaaaagaagatcattcagcagataatgtcacatgaagtcatttacggctga

SEQ ID NO: 5126 - protein, 396 aa, Pyrococcus furiosus
MSEDEAQFHGNYDDYVTYLKRRIRQLELQVRMLEADKERLERELSRLRSEMSRLRQPPAFAGSVIEVLDDDRAIVQNYNGPRFVVRIAPWIDKSKLRPGTRVALDQRTMAIIEILPASKDPAVLGFEVVERPNVTYNDIGGLKKQLQELREAIELPLKHPELFEEVGIDPPKGVLLYGPPGCGKTLMAKAIAHEVNATFIRVVGSELVRKYIGEGARLVHELFELAKEKAPTIIFIDEIDAIGAKRLDETTGGEREVNRTLMQLLAEMDGFDPRGNVKVIAATNRPDILDPALLRPGRFDRLIEVPLPDFEGRLEILKVHTRRMKLRGVDLRLIAELTEGASGADLKAIATEAGMFAIRERRTYVTQEDFLKAIDKVLGNEKKIIQQIMSHEVIYG

SEQ ID NO: 5127 - DNA, 1200 bp, Pyrococcus horikoshii
  CDS (1)..(1200): transl_table=11
gtgagtgtaatgagtggtgacgaagttcaatttcaaggggattacgatgattatataacgtacctcaagagaaggataagacaacttgaacttcaggtgaggatgcttgaagctgacaaagagagactagagagggagttatctaggctaagaagtgagatgtcaagactaagacaacctccagcttttgcaggaacggtcatagaggtcctagatgaggatagggccatagtccaaaactacaatggcccaaggttcgtagttagaatagccccctggatagacaggaaaaagctgagaccaggaactagggttgcacttgatcaaaggacaatggccgtggtggagatactccccacatctaaagatcccacagtactgggatttgaggtcatagaaagaccaaatgtaacgtacaacgatattggaggcttgaaaaagcaactacaggagttaagggaagccatagagctgcccctcaaacatccagagctctttgaagaagttggtattgatcctccaaagggtgttcttttatacggccccccaggttgcggaaaaacgttaatggcaaaggccctcgcccatgaggttaacgcaacgttcattagagttgtgggaagcgagctcgttagaaagtacattggagagggtgcaaggctcgttcatgagttattcgaacttgcaaaggagaaggccccaacaataatattcatagatgagattgatgcaataggagcaaagagaatggatgaaaccacaggaggagaaagggaggttaacaggacactcatgcaactactcgctgaaatggatggattcgatccaagaggaaacgtaaaggttatagccgcaactaataggccagatatactagatccagccctactaaggccgggaagattcgatagactaattgaggttccacttccagacttcgagggaaggcttgaaatcttaaaagttcacacgagaagaatgaaactcaaaggcgttgacttaagagccatagcagaaatgacagagggagcaagcggagcagatttaaaagccatagctactgaagctggaatgtttgcaattagggagagaaggacatacgtaactcaggaggatttccttaaagcagtagataaggttctaggaaatgaaagaaagctattacaacagataacgtcccatgaagttatctacggctga

SEQ ID NO: 5128 - protein, 399 aa, Pyrococcus horikoshii
MSVMSGDEVQFQGDYDDYITYLKRRIRQLELQVRMLEADKERLERELSRLRSEMSRLRQPPAFAGTVIEVLDEDRAIVQNYNGPRFVVRIAPWIDRKKLRPGTRVALDQRTMAVVEILPTSKDPTVLGFEVIERPNVTYNDIGGLKKQLQELREAIELPLKHPELFEEVGIDPPKGVLLYGPPGCGKTLMAKALAHEVNATFIRVVGSELVRKYIGEGARLVHELFELAKEKAPTIIFIDEIDAIGAKRMDETTGGEREVNRTLMQLLAEMDGFDPRGNVKVIAATNRPDILDPALLRPGRFDRLIEVPLPDFEGRLEILKVHTRRMKLKGVDLRAIAEMTEGASGADLKAIATEAGMFAIRERRTYVTQEDFLKAVDKVLGNERKLLQQITSHEVIYG

SEQ ID NO: 5129 - DNA, 1194 bp, Pyrococcus kodakaraensis
  CDS (1)..(1194): transl_table=11
atgagtattgagaacactgacgttcacccggagggttacgatgactacgtcactttcctcaaaaggagaatcaggcagctggagttacaggtgagaacgctggaggcagacaaggagagacttgagagggagctttcaaggctgagaatggaaatgtcaaggctcagacagccgccggcctttgcggggaacgtcatagaggtgctcgacgacgaaagggctatcgttcagaactacaacgggccgcgcttcgttgtcaggatagcgccttggatagagagggacaagctcaagccaggagccagggtggcactcgaccagaggacgatggcgatagtcgagctcctgccgagcgagaaagacccgagtgtcctcggtttcgaagtcattgaaaggcccaaggtcacctacaacgacataggcggacttgagaagcagctccaggaactcagggaggcaatagagctcccgctcaagcaccctgagctgtttgaacaggtcggcatcgagccgccgaagggagttctcctctacggcccgccgggctgtggaaagaccctgatggcaaaggcagttgccaatcacgtcaacgccactttcatccgcgtcgtcggaagcgagctggtaaggaagttcatcggagagggtgccagactggtccacgaactctttgagcttgccaaggagaaggcacccacgataatattcatagacgaaatagacgccataggcgcaaagaggatggacgaaaccaccggcggcgagagggaagtcaacagaaccctcatgcagctcctcgctgagatggacggcttcgacccgaggggcaacgtgaaggtcatagcggcaaccaacaggcccgatatactcgatccagcattactcaggccgggcaggttcgacaggctcatagaggttccgctcccggactaccagggcaggctcgagatactcaaggttcacacgagaaagatgaacctcaagggcgttgacctgcgcgttatagcggagataaccgagggggcgagcggagcagatctcaaggccatagctaccgaggcaggcatgttcgccatcagggacaggaggacgtacgttacgcaggacgacttcctcaaggccgtggataaagtcattggctcggagaagaggctggcacagcagatagctatgcacgaggtaatgtacggctga

SEQ ID NO: 5130 - protein, 397 aa, Pyrococcus kodakaraensis
MSIENTDVHPEGYDDYVTFLKRRIRQLELQVRTLEADKERLERELSRLRMEMSRLRQPPAFAGNVIEVLDDERAIVQNYNGPRFVVRIAPWIERDKLKPGARVALDQRTMAIVELLPSEKDPSVLGFEVIERPKVTYNDIGGLEKQLQELREAIELPLKHPELFEQVGIEPPKGVLLYGPPGCGKTLMAKAVANHVNATFIRVVGSELVRKFIGEGARLVHELFELAKEKAPTIIFIDEIDAIGAKRMDETTGGEREVNRTLMQLLAEMDGFDPRGNVKVIAATNRPDILDPALLRPGRFDRLIEVPLPDYQGRLEILKVHTRKMNLKGVDLRVIAEITEGASGADLKAIATEAGMFAIRDRRTYVTQDDFLKAVDKVIGSEKRLAQQIAMHEVMYG

SEQ ID NO: 5131 - DNA, 1182 bp, Sulfolobus solfataricus
  CDS (1)..(1182): transl_table=11
ttgtcaggggatttcgacacaataagggatgcttcttctccggatgaagttcaattagttagattattagaagaaaaaatcaagtcattgcaaattgaaattgaaaatctaagaaaagaactaaattattataaagcagaaatggaaaaaatgttaagtcctccgctaatagaggcagttgtattggacgttttaccagacggtagagttctagttagaagttcgtcagggccaaatttggtagtaaatatagctagtcatattgatcaaaaattaataaagcctggaatatctgttgccttaaatcaaagaggatctactatactggaggttttaccacagaaggaagatccaattgtaaagacaatggaaattattgaaagacctaacgtaacttattctgagatcggtggattagaagagcaaataagggagttaagggaggtcgtggaattacctttaaagaatcctgagatatttagggagataggagtagagccaccaaagggagttttactatatggtccgcccggtacagggaagactatgttggcaaaggcagtagccactgagagtaatgctgtgtttattcatgttgttgcttcagagtttgcacaaaaatttgtgggggaaggcgctaggatagttagagagctatttgagatggctaaaagaaaggcgccatcaataatcttcattgatgaaattgatgctataggtgctaagaggatagatataggaactagtggagaaagagagatacaaaggacgctaatgcagctcttggccgaacttgatgggtttgatccattggataatgttaagatcatagcagctaccaataggatagatatattagatcctgcgttattgaggcctggtagatttgataggataatagaggttcctttacctgattttaaagggagaactgagatatttaatatatatttaaagaaaatgaaaatcgaagacaatataaaccttgagctattatctcagcttacagaagggtttagtggtgcagatattaaaaacgtttgtgttgaagctgcatatatggcaattagggacggtaggaataaggtaacgatgaacgatttagttgaggctataaacaagattaatgttaaaaggaataaaatggaaagcatgaaagagaggcgagagaagtatagctaa

SEQ ID NO: 5132 - protein, 393 aa, Sulfolobus solfataricus
MSGDFDTIRDASSPDEVQLVRLLEEKIKSLQIEIENLRKELNYYKAEMEKMLSPPLIEAVVLDVLPDGRVLVRSSSGPNLVVNIASHIDQKLIKPGISVALNQRGSTILEVLPQKEDPIVKTMEIIERPNVTYSEIGGLEEQIRELREVVELPLKNPEIFREIGVEPPKGVLLYGPPGTGKTMLAKAVATESNAVFIHVVASEFAQKFVGEGARIVRELFEMAKRKAPSIIFIDEIDAIGAKRIDIGTSGEREIQRTLMQLLAELDGFDPLDNVKIIAATNRIDILDPALLRPGRFDRIIEVPLPDFKGRTEIFNIYLKKMKIEDNINLELLSQLTEGFSGADIKNVCVEAAYMAIRDGRNKVTMNDLVEAINKINVKRNKMESMKERREKYS

SEQ ID NO: 5133 - DNA, 1203 bp, Oryza sativa
  CDS (1)..(1203)
atggccgacggggaggacgccgccgccgcccgccgccgcgcctccgtgacggagtaccggaagaagctgctcaactgcagggagctcgagtcgcgcgtcagcaccgtgagggaaaacctaaaaaatgctaagaaggactttacaaagaccgaagatgacttaaaatccctgcaaagtgttgggcagatcatcggagaggttctccgccctcttgataatgaacgttttattgttaaggctagcagtggtcccagatatgtggttggttgccggagcaaagtggacaaggagaaattgacttcgggaactcgtgttgttcttgacatgacaacactgacaatcatgcgcacacttccacgtgaggtggaccctgtggtttacaacatgcttcatgaagaccctggtaatgtcagttactctgctgttggtggtctgtctgatcagattagagagctcagggagtccatcgaattgcccttaatgaaccctgagctctttcttcgtgttgggatcaagccccccaagggtgttctactctatggtccaccaggaactggtaagacactattggcgagggctattgccagtaacatcgatgccaactttttgaagattgtttcaagtgctataattgacaagtacattggagagagtgcccgcttgattagggaaatgtttggctatgcacgtgatcatcaaccatgcataatcttcatggacgaaatcgatgccattggtgggcggcggttcagtgaaggaactagtgctgatcgcgagatccagcgcacactgatggaactgctaaatcagttagatggatttgatgaacttggaaaggtgaaaatgatcatggctaccaatagacctgatgttctggaccctgcgctactgcgtcctggacgtctagacaggaagattgagattccgctaccaaatgagcaagcaagaatggaagttcttaaaatccatgctgctggtattgccaagcatggagaaattgattatgaggcagttgttaaactggctgagggcttcaatggggctgatcttcgcaacgtctgcactgaagcgggtatggctgcaattcgtgctgaacgggactacgttgtccatgaggacttcatgaaggctgtcaggaagctgaacgacgccaagaagctggaatccagcgcccactacagtgcagacttcggcaaagagtaa

SEQ ID NO: 5134 - protein, 400 aa, Oryza sativa
MADGEDAAAARRRASVTEYRKKLLNCRELESRVSTVRENLKNAKKDFTKTEDDLKSLQSVGQIIGEVLRPLDNERFIVKASSGPRYVVGCRSKVDKEKLTSGTRVVLDMTTLTIMRTLPREVDPVVYNMLHEDPGNVSYSAVGGLSDQIRELRESIELPLMNPELFLRVGIKPPKGVLLYGPPGTGKTLLARAIASNIDANFLKIVSSAIIDKYIGESARLIREMFGYARDHQPCIIFMDEIDAIGGRRFSEGTSADREIQRTLMELLNQLDGFDELGKVKMIMATNRPDVLDPALLRPGRLDRKIEIPLPNEQARMEVLKIHAAGIAKHGEIDYEAVVKLAEGFNGADLRNVCTEAGMAAIRAERDYVVHEDFMKAVRKLNDAKKLESSAHYSADFGKE

SEQ ID NO: 5135 - DNA, 1275 bp, Oryza sativa
  CDS (1)..(1275)
atggccacggtggcgatggacatctccaagccccctcccgcggcgggcggcgacgaggctgcggcggcgaaggggaggggcggcgccggaggaggaggtggggaggggctgcggcagtactacctgcagcacatccacgacctgcagctccagatccggcagaagacgcacaacctcaaccgcctcgaggcccagcgcaacgacctcaactcccgagttagaatgctcagggaagagctgcagttgcttcaagaacctggctcgtatgttggtgaggtggtgaaggtcatgggtaaatcaaaggttctagtgaaggtacatccagaaggcaaatatgtggtggatattgataaaagcattgatattacaaagatcacaccttcaacaagagttgctcttcgaaatgatagctatatgcttcatttgatcctgccaagcaaagttgatccgttggtcaatcttatgaaagttgagaaggttcctgattctacttatgatatgattggaggtcttgatcagcaaatcaaagagatcaaagaggtcattgaacttcctatcaaacatccagagctatttgagagtcttggaattgcccaaccaaagggtgtccttctctatggccctccaggcacaggaaaaacattgttggcacgtgcagttgctcatcacactgactgcaccttcatcagggtgtctggttccgagttagttcagaagtacattggtgagggttctcggatggtccgtgaactctttgttatggccagggaacatgcaccatccattattttcatggatgaaatagactccattggatctgctaggatggagtctggaactggcaacggtgacagtgaagtccagcgaaccatgcttgagcttctgaaccaacttgatggttttgaagcatcaaacaaaataaaggttctgatggcaacaaataggatagacatcttggatcaggcccttctgaggcctggtcgcatagacaggaaaattgaatttcctaatcctaatgaggattcacgctttgatatcttgaagattcattcaagaaaaatgaacttgatgcgtggtattgatctgaaaaagatcgctgaaaagatgaatggggcttcaggagccgagctcaaggcggtctgcacagaagctggaatgtttgctcttcgtgagagaagggtgcatgtaacacaagaggactttgagatggcagtggcgaaggtgatgaagaaagacacggaaaagaacatgtccctacggaagctctggaagtga

SEQ ID NO: 5136 - protein, 424 aa, Oryza sativa
MATVAMDISKPPPAAGGDEAAAAKGRGGAGGGGGEGLRQYYLQHIHDLQLQIRQKTHNLNRLEAQRNDLNSRVRMLREELQLLQEPGSYVGEVVKVMGKSKVLVKVHPEGKYVVDIDKSIDITKITPSTRVALRNDSYMLHLILPSKVDPLVNLMKVEKVPDSTYDMIGGLDQQIKEIKEVIELPIKHPELFESLGIAQPKGVLLYGPPGTGKTLLARAVAHHTDCTFIRVSGSELVQKYIGEGSRMVRELFVMAREHAPSIIFMDEIDSIGSARMESGTGNGDSEVQRTMLELLNQLDGFEASNKIKVLMATNRIDILDQALLRPGRIDRKIEFPNPNEDSRFDILKIHSRKMNLMRGIDLKKIAEKMNGASGAELKAVCTEAGMFALRERRVHVTQEDFEMAVAKVMKKDTEKNMSLRKLWK

SEQ ID NO: 5137 - DNA, 1260 bp, Oryza sativa
  CDS (1)..(1260)
atgtcgaccgccgccaccgccccgccgcccgccgcggtcctcccggcggctcccccgccgtcctaccccgccacctccgcgccctccgcctccgcggccgccgccgaggacgacgacgacctctacggccgcctcaagtcgctccagcgccacatggagttcgtcgagatacaggaggagtacgtcaaggacgagcagaagaacctgaagcgcgagctgctgcgcgcgcaggaggaggtgaagcggatccagtccgttcccctcgtgatcggccagttcatggagatggtcgacggcaacaacggaatcgtcggatccaccaccgggagcaactattatgtgcggatcctgagcaccatcaaccgcgagctgctcaagccctcggcgtccgtggcgctgcaccgccactcgaatgcgctcgtcgacgtgctgccgcccgaggcggactccagcatctctctgctcggatcatcggagaagcccaacgtcacttatacggatattggaggatgtgacatccaaaaacaagaaattcgggaggctgttgaattaccgctgacacatcatgagctgtacaagcagattggtattgatcctccaagaggtgtgcttctgtatggtccacctggaactggcaaaactatgctcgccaaagctgtggcacaccacactactgctgcatttatcagagttgttggttcagagtttgtgcagaagtacctgggtgagggacctaggatggttcgagatgtattccgtttggctaaagagaatgccccagctatcatattcatcgatgaggttgatgctatagcaactgctcgttttgatgctcagactggtgctgaccgagaagttcagcgtattcttatggaactactcaatcagatggatggatttgatcaaacagtgaatgtgaaggttataatggcgaccaacagggcggataccctagaccctgctctgttacgtccaggtagattggacaggaaaatcgagttccctcttccagatcgtcggcagaagaggcttgttttccaagtctgtactgctaaaatgaacttgagtgatgaggttgatttggaagattatgtttccagaccagataaaattagtgctgctgatattgctgctatctgtcaagaagctggtatgcatgctgtgcgcaaaaatcggtatgttatcctccccaaggacttcgagaagggttaccgaaccaatgtcaagaagcctgagactgactttgacttctacaaatga

SEQ ID NO: 5138 - protein, 419 aa, Oryza sativa
MSTAATAPPPAAVLPAAPPPSYPATSAPSASAAAAEDDDDLYGRLKSLQRHMEFVEIQEEYVKDEQKNLKRELLRAQEEVKRIQSVPLVIGQFMEMVDGNNGIVGSTTGSNYYVRILSTINRELLKPSASVALHRHSNALVDVLPPEADSSISLLGSSEKPNVTYTDIGGCDIQKQEIREAVELPLTHHELYKQIGIDPPRGVLLYGPPGTGKTMLAKAVAHHTTAAFIRVVGSEFVQKYLGEGPRMVRDVFRLAKENAPAIIFIDEVDAIATARFDAQTGADREVQRILMELLNQMDGFDQTVNVKVIMATNRADTLDPALLRPGRLDRKIEFPLPDRRQKRLVFQVCTAKMNLSDEVDLEDYVSRPDKISAADIAAICQEAGMHAVRKNRYVILPKDFEKGYRTNVKKPETDFDFYK

SEQ ID NO: 5139 - DNA, 1290 bp, Oryza sativa
  CDS (1)..(1290)
atgtcgtcgccgccgcccgccgccgccgccgcgatggccgtcgacgacgccgacgacgaccagctcgcctccatgtccacggaggacatcgtcagggcaacccgcctcctcgacaacgagacccgcgtcctcaaggatgagctgcagcggacgaaccttgaggtggaatcctacaaggagaagatcaaggagaaccaggagaagatcaaactcaacaagcagctgccttaccttgtcggcaacatcgtcgagatattggaaatgaaccccgaggatgaggctgaagaggatggtgcgaacatcgatctggattcacaaaggaaaggaaaatgcgttgttttgaagacatccacaagacaaacaatattccttcctgtaatcgggcttgttgaccctgaaaagctcaagcctggggatttggttggagtcaacaaagacagctacttgatactagacacgctaccttcagaatatgattcacgggttaaggcaatggaggtagatgaaaagcctacagaggattacaatgacattggtggccttgagaaacagattcaagagcttgttgaagcaatagtattgcccatgactcacaaggaccggtttcagaagttgggaattcgccccccgaaaggtgttcttttgtacggaccacctggcactggaaagaccctaatggctcgtgcatgtgctgcccaaactaacgccacatttctgaaacttgctggtccacagcttgtccagatgttcatcggtgatggtgcaaagcttgtccgtgatgcctttcagcttgcaaaggagaaatccccctgcatcatttttattgatgaaattgacgcaattggaacaaagcgttttgatagtgaagttagtggtgacagagaagtgcagcgcacaatgttggagttgctgaatcagctagatggattcagtagtgacgagaggataaaggtgatagctgcaactaatcgcgcggacattcttgatcctgctttgatgaggtctggtaggctggaccgaaaaattgagttccctcatccatccgaagaagcacgagctagaattttgcaaatccattcaagaaaaatgaatgtaaaccctgatgtcaactttgaagagttggcacgatctacggacgacttcaatggtgcacaactgaaggccgtttgtgtagaagcaggcatgcttgccctacgccgagatgctacagaggtgacacacgaggatttcaatgaagggatcatacaagtgcaagccaaaaagaagtccagtttaaattattacgcttaa

SEQ ID NO: 5140 - protein, 429 aa, Oryza sativa
MSSPPPAAAAAMAVDDADDDQLASMSTEDIVRATRLLDNETRVLKDELQRTNLEVESYKEKIKENQEKIKLNKQLPYLVGNIVEILEMNPEDEAEEDGANIDLDSQRKGKCVVLKTSTRQTIFLPVIGLVDPEKLKPGDLVGVNKDSYLILDTLPSEYDSRVKAMEVDEKPTEDYNDIGGLEKQIQELVEAIVLPMTHKDRFQKLGIRPPKGVLLYGPPGTGKTLMARACAAQTNATFLKLAGPQLVQMFIGDGAKLVRDAFQLAKEKSPCIIFIDEIDAIGTKRFDSEVSGDREVQRTMLELLNQLDGFSSDERIKVIAATNRADILDPALMRSGRLDRKIEFPHPSEEARARILQIHSRKMNVNPDVNFEELARSTDDFNGAQLKAVCVEAGMLALRRDATEVTHEDFNEGIIQVQAKKKSSLNYYA

SEQ ID NO: 5141 - DNA, 1230 bp, Oryza sativa
  CDS (1)..(1230)
atgtcgtcgccgccgcccgccgccgccgccgcgatggccgtcgacgacgccgacgacgaccagctcgcctccatgtccacggaggacatcgtcagggcaacccgcctcctcgacaacgagacccgcgtcctcaaggatgagctgcagcggacgaaccttgaggtggaatcctacaaggagaagatcaaggagaaccaggagaagatcaaactcaacaagcagctgccttaccttgtcggcaacatcgtcgagatattggaaatgaaccccgaggatgaggctgaagaggatggtgcgaacatcgatctggattcacaaaggaaaggaaaatgcgttgttttgaagacatccacaagacaaacaatattccttcctgtaatcgggcttgttgaccctgaaaagctcaagcctggggatttggttggagtcaacaaagacagctacttgatactagacacgctaccttcagaatatgattcacgggttaaggcaatggaggtagatgaaaagcctacagaggattacaatgacattggtggccttgagaaacagattcaagagcttgttgaagcaatagtattgcccatgactcacaaggaccggtttcagaagttgggaattcgccccccgaaaggtgttcttttgtacggaccacctggcactggaaagaccctaatggctcgtgcatgtgctgcccaaactaacgccacatttctgaaacttgctggtccacagcttgtccagatgttcatcggtgatggtgcaaagcttgtccgtgatgcctttcagcttgcaaaggagaaatccccctgcatcatttttattgatgaaattgacgcaattggaacaaagcgttttgatagtgaagttagtggtgacagagaagtgcagcgcacaatgttggagttgctgaatcagctagatggattcagtagtgacgagaggataaaggtgatagctgcaactaatcgcgcggacattcttgatcctgctttgatgaggtctggtaggctggaccgaaaaattgagttccctcatccatccgaagaagcacgagctagaattttgcaaatccattcaagaaaaatgaatgtaaaccctgatgtcaactttgaagagttggcacgatctacggacgacttcaatggtgcacaactgaaggccgtttgtgtagaagcaggcatgcttgccctacgccgagatgctacagaggtttgtgttacattctga

SEQ ID NO: 5142 - protein, 409 aa, Oryza sativa
MSSPPPAAAAAMAVDDADDDQLASMSTEDIVRATRLLDNETRVLKDELQRTNLEVESYKEKIKENQEKIKLNKQLPYLVGNIVEILEMNPEDEAEEDGANIDLDSQRKGKCVVLKTSTRQTIFLPVIGLVDPEKLKPGDLVGVNKDSYLILDTLPSEYDSRVKAMEVDEKPTEDYNDIGGLEKQIQELVEAIVLPMTHKDRFQKLGIRPPKGVLLYGPPGTGKTLMARACAAQTNATFLKLAGPQLVQMFIGDGAKLVRDAFQLAKEKSPCIIFIDEIDAIGTKRFDSEVSGDREVQRTMLELLNQLDGFSSDERIKVIAATNRADILDPALMRSGRLDRKIEFPHPSEEARARILQIHSRKMNVNPDVNFEELARSTDDFNGAQLKAVCVEAGMLALRRDATEVCVTF

SEQ ID NO: 5143 - DNA, 1353 bp, Oryza sativa
  CDS (1)..(1353)
atggggcagggcactcccggcgggatggggaagcagggcggcctccccggcgatcgcaagccgggcgacggcggcgccggcgacaagaaggaccgcaagttcgagccccccgccgcgccgtcccgcgtcggccggaagcagcggaagcagaaggggcccgaggcggcggcgcgcctgcccgccgtggcgccgctctccaagtgccgcctccgcttgctcaagctggagcgggtcaaggactacctcctcatggaggaggagttcgtcgtcagccaggagcggctgcgacccagcgaggacaagacggaggaggaccgatccaaggtcgatgacctccggggcacccccatgagcgttggctcgcttgaggagatcatcgatgagagccacgccatcgtctcgtcgtccgtcgggccggaatactatgttggcatattatcattcgtcgacaaggaccagctcgagccagggtgtgccattctgatgcataacaaggttctctctgtggttggaattttgcaagatgaggttgaccctatggtttctgtcatgaaagttgaaaaggcacctttggagtcttatgcggacatcggtggtctggatgcccaaattcaagagattaaagaggctgttgagcttcccttgactcatcctgagctatatgaggacattggaataaggcctcccaagggagtaatattatatggggaacctggcacaggcaaaactctacttgcaaaggcggttgctaattctacatcagcaacatttttgcgtgttgttgggagtgagttgatccaaaagtaccttggtgatggccccaagcttgtaagagaattgtttagggtggctgatgatctttctccgtcaattgtctttattgacgagattgatgcagtcggaacaaagaggtatgatgctcattcgggtggagagcgtgaaattcagagaaccatgttggagttgcttaatcagctggatggttttgattcaaggggagatgttaaagttattttagcaacaaatcgcattgaaagtcttgacccagctttgcttcgacctggtcggatagacagaaagattgaatttccgttaccagatattaaaaccaggaggcggatcttccagatacacacatctaagatgacattggcagatgatgttaacctagaagagtttgtgatgaccaaggatgagttttctggtgctgacatcaaagcaatatgtacggaggccggattgctcgctttaagggagcgcagaatgaaggtgacacatgccgatttcaagaaggccaaagagaaggtcatgttcaagaagaaggaaggtgtaccggaagggctttatatgtga

SEQ ID NO: 5144 - protein, 450 aa, Oryza sativa
MGQGTPGGMGKQGGLPGDRKPGDGGAGDKKDRKFEPPAAPSRVGRKQRKQKGPEAAARLPAVAPLSKCRLRLLKLERVKDYLLMEEEFVVSQERLRPSEDKTEEDRSKVDDLRGTPMSVGSLEEIIDESHAIVSSSVGPEYYVGILSFVDKDQLEPGCAILMHNKVLSVVGILQDEVDPMVSVMKVEKAPLESYADIGGLDAQIQEIKEAVELPLTHPELYEDIGIRPPKGVILYGEPGTGKTLLAKAVANSTSATFLRVVGSELIQKYLGDGPKLVRELFRVADDLSPSIVFIDEIDAVGTKRYDAHSGGEREIQRTMLELLNQLDGFDSRGDVKVILATNRIESLDPALLRPGRIDRKIEFPLPDIKTRRRIFQIHTSKMTLADDVNLEEFVMTKDEFSGADIKAICTEAGLLALRERRMKVTHADFKKAKEKVMFKKKEGVPEGLYM

SEQ ID NO: 5145 - DNA, 1290 bp, Oryza sativa
  CDS (1)..(1290)
atgacgtcatccggcgctcccccgccggcggcgatggccgtggacgacgcggaggacgaccagctcgcctccatgtccacggaggacatcgtccgtgcctcccgcctactcgacaacgagatccgcgtcctcaaggatgagctgcagcggaccaacttggagctggaatcgttcaaggagaagattaaggagaaccaggagaagattaagctcaacaagcagcttccctacctcgtcggcaacatcgttgagattctggaaatgaaccctgaggatgaagctgaggaggatggtgctaatattgatttagactcacaaaggaaaggaaaatgtgttgttctgaagacttccacaagacaaactatattccttcctgtggttgggctagttgaccctgataaactcaagcctggtgatttggttggagtaaacaaagacagctaccttatactggacacactgccatcagagtatgattcacgagtaaaggcaatggaggtggatgaaaaacccacagaggactacaatgatattggaggtcttgaaaagcagattcaagagcttgtggaggcaattgttttgccaatgacacacaaagatcggttccaaaagttgggcattcgcccccccaaaggagttcttttgtatggaccacctggaactgggaagacattgatggctcgtgcatgtgctgcacagacaaatgcgacgttcctgaaattagctggtccacaattagtccagatgtttatcggtgatggagcaaagctggttcgggatgcttttcagcttgctaaggagaaagctccctgcatcattttcattgatgagattgatgccattgggactaagaggtttgacagtgaggttagtggtgacagagaagttcagaggactatgttggaattgctgaaccaactcgatggatttagtagtgacgagcggataaaggtcatagcggcaacgaatcgtgctgacattcttgatcctgctttgatgcgatctggtcgtttggaccgaaagattgagtttcctcatccatctgaagaagcaagagctagaatcttgcaaattcactcaagaaaaatgaatgtaaacccagatgtgaattttgaagagctggctcgctcaacagatgacttcaatggagcgcaactgaaagctgtttgtgtcgaagctggtatgcttgcactgcggcgagatgctacagaggtgactcatgaggacttcaacgaaggcataatacaggtgcaggctaagaagaagtctagcctaaattattacgcttaa

SEQ ID NO: 5146 - protein, 429 aa, Oryza sativa
MTSSGAPPPAAMAVDDAEDDQLASMSTEDIVRASRLLDNEIRVLKDELQRTNLELESFKEKIKENQEKIKLNKQLPYLVGNIVEILEMNPEDEAEEDGANIDLDSQRKGKCVVLKTSTRQTIFLPVVGLVDPDKLKPGDLVGVNKDSYLILDTLPSEYDSRVKAMEVDEKPTEDYNDIGGLEKQIQELVEAIVLPMTHKDRFQKLGIRPPKGVLLYGPPGTGKTLMARACAAQTNATFLKLAGPQLVQMFIGDGAKLVRDAFQLAKEKAPCIIFIDEIDAIGTKRFDSEVSGDREVQRTMLELLNQLDGFSSDERIKVIAATNRADILDPALMRSGRLDRKIEFPHPSEEARARILQIHSRKMNVNPDVNFEELARSTDDFNGAQLKAVCVEAGMLALRRDATEVTHEDFNEGIIQVQAKKKSSLNYYA

SEQ ID NO: 5147 - DNA, 1281 bp, Oryza sativa
  CDS (1)..(1281)
atggcgccggagcccgaggacgacatcatgaacgagaagaacccgcgcccgctcgacgaggacgacatcgccctcctcaagacctacggtcttggaccttactcgaccagcattaagaaggttgagaaggaaatcaaagagatggcgaagaagataaatgatctctgtggaattaaagagtctgacactggattggctccacctagccagtgggaccttgtatccgataagcagatgatgcaggaggagcaacccctgcaggttgcaagatgcacaaagatcatcagccctaacacggacgatgctaaatatgtcatcaatgtcaagcaaattgcgaagtttgtggttgggttgggcgacaaggtctcccccactgatatcgaggaaggaatgcgggttggagttgatcgaaacaagtaccaaattcaaattcctttgccaccaaagattgatcccagcgttaccatgatgactgtggaagaaaaaccagatgtgacttacaatgatgttggtggatgcaaggagcagattgagaagatgcgtgaggtggttgagcttcctatgcttcacccagaaaagtttgtcaaacttggtatcgatcctcctaagggagtactgtgttatggccctcctggaactgggaaaacacttcttgctagggcagtggccaaccgcacggatgcttgctttattcgagtcataggaagtgagctagttcagaagtatgttggtgagggggcccgcatggttcgggaactcttccaaatggcacgatcgaagaaggcttgcattgtcttctttgatgaagtcgatgccatcggtggtgctcgctttgacgatggtgttggtggtgacaatgaggtccagcgcactatgcttgagattgttaatcagcttgatggatttgatgccaggggaaacatcaaggtcctcatggccaccaacaggcccgataccttggaccctgcattactacgtccagggcgtctggacaggaaagttgagtttggcctgccagacctggagggccggacccagatcttcaagatccacactcgcaccatgaactgcgagcgggacatccggtttgagctgctcgctcgcctctgccccaactccactggggccgacatacggagtgtgtgcacggaggctggcatgtacgccatccgcgctcgcaggaagacggtgacagagaaggatttcttggacgcggtgaataaggtgatcaagggttaccaaaagttcagcgcaacgcccaagtatatggtgtacaactag

SEQ ID NO: 5148 - protein, 426 aa, Oryza sativa
MAPEPEDDIMNEKNPRPLDEDDIALLKTYGLGPYSTSIKKVEKEIKEMAKKINDLCGIKESDTGLAPPSQWDLVSDKQMMQEEQPLQVARCTKIISPNTDDAKYVINVKQIAKFVVGLGDKVSPTDIEEGMRVGVDRNKYQIQIPLPPKIDPSVTMMTVEEKPDVTYNDVGGCKEQIEKMREVVELPMLHPEKFVKLGIDPPKGVLCYGPPGTGKTLLARAVANRTDACFIRVIGSELVQKYVGEGARMVRELFQMARSKKACIVFFDEVDAIGGARFDDGVGGDNEVQRTMLEIVNQLDGFDARGNIKVLMATNRPDTLDPALLRPGRLDRKVEFGLPDLEGRTQIFKIHTRTMNCERDIRFELLARLCPNSTGADIRSVCTEAGMYAIRARRKTVTEKDFLDAVNKVIKGYQKFSATPKYMVYN

SEQ ID NO: 5149 - DNA, 1272 bp, Oryza sativa
  CDS (1)..(1272)
atggcgacggcggacgtctcgcggccctcctcctccgcgccgacggcggcggctgcgggggcagacggccacggggcgaaggggagcgccttccgcggcgacgggctgcggccgtactaccagtcgcgcatccacgacctgcagctccagatccgccaagggacggacaacctcagccgcctcgaggcccagcggaacgtcctcaattcccaagttataacgctgggggaagagttgaaggtgctccatgaaccgggctcatatgttggtgaggttgtcaaggttatgggcaagtccaaggttctagtgaaggtgcacccagaaggaaaatatgttgttgatgtcgataaaagtattgatattacaaagctctcgccttcaacaagagttgctcttcgaaatgacagctatatgcttcatcttatcctgcccagcaaagttgatccattggttaatcttatgaaggttgagaaggttcctgattctacttatgatatgattggcggccttgatcagcagattaaggagatcaaagaggttattgagcttcccattaagcatcctgagctgtttgaaagtcttggaattgcccagccaaagggtgtccttctttacgggcctccgggtacaggaaaaacgctactagctcgggcagttgctcatcacaccgactgtacctttattagggtgtcaggttccgagttggttcagaagtatattggagagggttccagaatggttcgtgaactatttgtgatggccagagagcatgcaccatccataatctttatggatgaaatagactccattggatctgctagaatgcagtcaggatctgggggtggtgatagtgaggttcaacgcactatgcttgagcttctgaatcaacttgatggctttgaagcatcaaacaaaattaaggttcttatggcgacaaataggatggatattttggatcaagctctcctgaggcctggtcgcattgataggaagattgaatttccaaatccgaatgaagattcccgctttgatatcttgaagattcattcaagaaaaatgaacttgatgcgtggcattgatctgaaaaagattgcagagaagatgaatggggcatctggagcagagcttaaggcggtctgcacggaagcaggaatgtttgcccttcgcgagagaagggttcatgtcaaccaggaggatttcttgatggcggtggcgaaggtgatgaagaaggataccgaaaagaacatgtccctgcgcaagctctggaagtga

SEQ ID NO: 5150 - protein, 423 aa, Oryza sativa
MATADVSRPSSSAPTAAAAGADGHGAKGSAFRGDGLRPYYQSRIHDLQLQIRQGTDNLSRLEAQRNVLNSQVITLGEELKVLHEPGSYVGEVVKVMGKSKVLVKVHPEGKYVVDVDKSIDITKLSPSTRVALRNDSYMLHLILPSKVDPLVNLMKVEKVPDSTYDMIGGLDQQIKEIKEVIELPIKHPELFESLGIAQPKGVLLYGPPGTGKTLLARAVAHHTDCTFIRVSGSELVQKYIGEGSRMVRELFVMAREHAPSIIFMDEIDSIGSARMQSGSGGGDSEVQRTMLELLNQLDGFEASNKIKVLMATNRMDILDQALLRPGRIDRKIEFPNPNEDSRFDILKIHSRKMNLMRGIDLKKIAEKMNGASGAELKAVCTEAGMFALRERRVHVNQEDFLMAVAKVMKKDTEKNMSLRKLWK

SEQ ID NO: 5151 - DNA, 1206 bp, Oryza sativa
  CDS (1)..(1206)
atggcggcggagggggaggacgcggcggccgcgcgacgccgcgcggcggccaccgactacaggaagaagctcctcacctgcagggagctcgaggcgcgcgcccgcacggcaagggacaacctgaaaaatgcaaagaaagattttgggaaaaccgaggatgacttgaagtcattgcaaagtgtaggccaaataattggtgaagtacttcgaccattggatagtgaacgattcatcgtcaaagccagcagtgggccccgctatgttgttggctgccgaagtaaagttgacaaagaaaagttgattgctggaacgagggttgttcttgacatgacaacccttaccatcatgcgcacactgccacgagaggttgatccagtggtatataacatgctacatgaagaccctggcaacgtcagttactcagctgtgggtggattgtcggatcaaataagggaacttagggagtccattgaacttcccctgatgaatccaaaattgtttcttcgtgtagggattaaaccgccaaagggtgttctgctctatggtccacctggaactgggaagacactacttgctagagctattgccagtaacattgatgcaaactttttaaagattgtgtcaagtgctatcattgacaagtacataggtgaaagtgcacgtctcataagagagatgttttcctatgcacgggagcatcaaccatgcatcattttcatggatgaaattgatgccatcggtggccgaaggttcagtgaaggaaccagtgctgaccgggaaattcagagaacactaatggagctcttaaaccagttagatggatttgatgagcttggaaaggtaaaaatgatcatggcgactaatcgtcctgatgttttggaccctgcactccttcgtcctgggcggttggacaggaagattgaaattccactgccaaatgagcagtcgaggatggaagtcctcaaaattcacgcagctggtattgctaaacatggtgaaatcgattatgaagctgtcgtgaagctagctgaaggcttcaatggtgccgatctgcgcaatgtctgcactgaggctggcatggctgctattcgagcagagcgcgactatgtcattcatgaagatttcatgaaggcggtgcgcaagctgaacgacgccaagaagctcgagtctagtgcgcactacagcgcggactttggcaaggaatga

SEQ ID NO: 5152 - protein, 401 aa, Oryza sativa
MAAEGEDAAAARRRAAATDYRKKLLTCRELEARARTARDNLKNAKKDFGKTEDDLKSLQSVGQIIGEVLRPLDSERFIVKASSGPRYVVGCRSKVDKEKLIAGTRVVLDMTTLTIMRTLPREVDPVVYNMLHEDPGNVSYSAVGGLSDQIRELRESIELPLMNPKLFLRVGIKPPKGVLLYGPPGTGKTLLARAIASNIDANFLKIVSSAIIDKYIGESARLIREMFSYAREHQPCIIFMDEIDAIGGRRFSEGTSADREIQRTLMELLNQLDGFDELGKVKMIMATNRPDVLDPALLRPGRLDRKIEIPLPNEQSRMEVLKIHAAGIAKHGEIDYEAVVKLAEGFNGADLRNVCTEAGMAAIRAERDYVIHEDFMKAVRKLNDAKKLESSAHYSADFGKE

SEQ ID NO: 5153 - DNA, 1347 bp, Oryza sativa
  CDS (1)..(1347)
atggggcagggcaccccgggaggcatgggcaagcagggcggcgcccccggcgaccgcaagcctggcggcgacggcgacaagaaggaccgcaagttcgagccccccgccgccccctcccgcgtcggccgcaagcagcgcaagcagaagggccccgaggcggccgctcgcctccccaacgtcgcccctctctccaagtgccgcctccgcctcctcaagctcgagcgggtcaaggactacctcctcatggaggaggagttcgtcgccgcccaggagcgcctccgccccaccgaggacaagaccgaggaggaccgatccaaggtcgacgacctccgcggcacccccatgagcgtcggatccctcgaggagatcatcgacgagagccatgccatcgtctcctcctccgtcggccccgagtactacgtcggcatcctctccttcgtcgacaaggaccagctcgagcccggctgctccatcctcatgcacaacaaggttctgtctgtggtcggaattttgcaagatgaagttgatcctatggtttctgtgatgaaagtggagaaagctccgctggaatcctatgctgacattggtgggctagatgctcagatccaagaaatcaaagaggcagttgagcttcctttgacccatcctgagctatatgaagacattggcatcaggccacccaagggagtcatattatacggagaacctggaacagggaagacactacttgccaaggctgttgctaactccacatccgcaactttcttgcgtgttgttggaagtgagcttattcaaaagtatcttggtgatggtcccaaactagtcagggaactgttcagagttgctgatgagctttctccctcaatagtctttatcgatgagattgatgctgttggaacaaagaggtacgatgctcattcaggaggggagcgtgagattcagagaactatgttggagcttcttaaccagttagatggttttgactctcgtggtgatgtcaaagttatactagcaacaaatcgcatcgaaagtcttgatccagcattgctacgccctggtcgcatagatcggaagatagaatttcctctgccagatattaaaactaggcggcgcatcttccagatacacacatctaagatgacattggcagatgatgtgaacctggaagagtttgtcatgaccaaggatgagttttccggtgctgatatcaaagcaatatgtactgaagctggacttcttgctttgagagaacgccgaatgaaggtgacacatgctgacttcaagaaggcaaaggagaaggtgatgttcaagaagaaggaaggtgtgccggagggtctttacatgtga

SEQ ID NO: 5154 - protein, 448 aa, Oryza sativa
MGQGTPGGMGKQGGAPGDRKPGGDGDKKDRKFEPPAAPSRVGRKQRKQKGPEAAARLPNVAPLSKCRLRLLKLERVKDYLLMEEEFVAAQERLRPTEDKTEEDRSKVDDLRGTPMSVGSLEEIIDESHAIVSSSVGPEYYVGILSFVDKDQLEPGCSILMHNKVLSVVGILQDEVDPMVSVMKVEKAPLESYADIGGLDAQIQEIKEAVELPLTHPELYEDIGIRPPKGVILYGEPGTGKTLLAKAVANSTSATFLRVVGSELIQKYLGDGPKLVRELFRVADELSPSIVFIDEIDAVGTKRYDAHSGGEREIQRTMLELLNQLDGFDSRGDVKVILATNRIESLDPALLRPGRIDRKIEFPLPDIKTRRRIFQIHTSKMTLADDVNLEEFVMTKDEFSGADIKAICTEAGLLALRERRMKVTHADFKKAKEKVMFKKKEGVPEGLYM

SEQ ID NO: 5155 - DNA, 1347 bp, Oryza sativa
  CDS (1)..(1347)
atggcgctccgaccaccgcggccgtgtccggccggcgtgcagcagcggcagcacgacgtcgacggcgccggcaacgccaagacttccccggaacagaagctcgagttgctggacctgcaggaggaggacgacgagctcatcttcctcgacgccgacgacgaggagggacgccagctgcgcgagaagctggagtcgctggagcgggagttctgcctgctggatgagcagcgggacaacgcgctgttccagattcacgtgctggaagagacggtgcgcttccgcgaggagctcgtcaggcggctgacggcggtcacccccctcgtcgtcgcccagctcgacgaggtcgtcgacgagcaccacgccgtcgtgacgctgggcgacggatgcgagaggaagatgtgcgtcggcgtcgccggctcgctcgaccgcggcctcctcaagccctcggcgaacgtcgcgctgaacggccggtcgctcgcgctcgtcggcgtgcccccctccgacgtcgccgcctgctcggccgcgcggttcctcgtcgcggacgccgacaagccgggcgtcgcctacgacgacatcggcgggtgcgaggcgcagaagcgggaggtgcgcgaggccgtggagctgccgctgacgcacccggagctcttcgccgccgccggcgtcgacccgccgcgcggcgtgctcctgcacggcccgctgggcaccgggaagaccatgctcgccaaggccgtcgcgcgggagacctcggcggcgttcttccgcgtgaacgccgccgagctcgcgcggcacgacgggccgagggtggtgcgcgacctgttccggctcgccagggacatggcgccggccatcgtcttcatcgacgaggtggacgcgatcgcggcggcgcggcaaggcggcgacgacgacgacggcggtgccaggcgccacgtgcagcgcgtgctgattgagctgctcacccagatggacggcttcgacgagtccaccaacgtgcgggtgatcatggcgacgaaccgcgccgacgacctggacccggcgctgctccggccggggcggctggaccgcaaggtcgagttcacggcgcccgagagcccggaggagaagcggctggtgctgcagacgtgcacggcggggatgagcctggacggcgacgtcgacctcgacgccctggcggcgcggcgcgacaagctcagcgccgccgagatcgccgccgtgtgccgcaaggccggcatgcaggccgtgcgcgacaggcggggcgccgtgacggcggacgacttcgacaagggatacctcgccgtcgtcggcaagaagcccggcgacgccgccaccgagttccacttctacaactga

SEQ ID NO: 5156 - protein, 448 aa, Oryza sativa
MALRPPRPCPAGVQQRQHDVDGAGNAKTSPEQKLELLDLQEEDDELIFLDADDEEGRQLREKLESLEREFCLLDEQRDNALFQIHVLEETVRFREELVRRLTAVTPLVVAQLDEVVDEHHAVVTLGDGCERKMCVGVAGSLDRGLLKPSANVALNGRSLALVGVPPSDVAACSAARFLVADADKPGVAYDDIGGCEAQKREVREAVELPLTHPELFAAAGVDPPRGVLLHGPLGTGKTMLAKAVARETSAAFFRVNAAELARHDGPRVVRDLFRLARDMAPAIVFIDEVDAIAAARQGGDDDDGGARRHVQRVLIELLTQMDGFDESTNVRVIMATNRADDLDPALLRPGRLDRKVEFTAPESPEEKRLVLQTCTAGMSLDGDVDLDALAARRDKLSAAEIAAVCRKAGMQAVRDRRGAVTADDFDKGYLAVVGKKPGDAATEFHFYN

SEQ ID NO: 5157 - DNA, 1275 bp, Brassica napus
  CDS (1)..(1275)
atggcaacccccatggtagaagacacgtcaaccttcgaagaggatcagctcgcatccatgtccaccgaagacatcgtcagagctactcgcctcctcgacaacgagattcgaatcctcaaggaagatgcacaaagaacgaatcttgagtgtgattcgtacaaggagaagataaaggagaatcaggagaagattaaactcaacaagcagcttccttacttggttggcaacattgttgagatcttggagatgaatccggaagatgatgctgaggaagacggtgctaatattgatcttgactctcaacgcaaggggaagtgcgttgtgttgaaaacctctacacgacagactatctttctaccagttgttggccttgtggaccctgatagcttgaagcctggggacttggttggagttaataaagacagttacttgattttggataccttgccgtctgagtatgactctagagttaaagccatggaggtcgatgagaaacctaccgaagattacaatgacattggaggactggagaagcagatccaagagcttgtagaggctattgtgctccccatgacgcacaaggagcgtttcgagaagctaggtgttcgaccaccaaagggagtgctcctgtatggtcctccagggactggtaaaactctaatggctcgtgcttgtgcagcacagaccaatgccaccttcctcaaattggcaggccctcaattggtccagatgtttattggagacggagcaaaacttgtgcgtgatgcctttcaactagcaaaagagaaagctccatgcatcatcttcattgatgaaatcgatgcaattggtacaaagcgttttgacagtgaagtaagtggagacagggaagtgcaaaggactatgttggagctgctcaatcagcttgatggattcagtagcgatgagcgtattaaggtgattgcagcaactaaccgtgcagatattttggacccagcactgatgcgttctggtcgtctagacaggaagattgagttcccacatccaacagaagaagctagagccagaatcttgcagattcactcgaggaagatgaatgttcacccagacgtcaactttgaggagcttgcaagatcaactgatgatttcaatggtgctcagctgaaagcagtttgtgtagaggctggcatgttagctcttcgccgcgatgccacagaggtgaaccatgaggacttcaatgaaggtatcatccaagtccaggccaagaagaaagcaagcttgaactactacgcttaa

SEQ ID NO: 5158 - protein, 424 aa, Brassica napus
MATPMVEDTSTFEEDQLASMSTEDIVRATRLLDNEIRILKEDAQRTNLECDSYKEKIKENQEKIKLNKQLPYLVGNIVEILEMNPEDDAEEDGANIDLDSQRKGKCVVLKTSTRQTIFLPVVGLVDPDSLKPGDLVGVNKDSYLILDTLPSEYDSRVKAMEVDEKPTEDYNDIGGLEKQIQELVEAIVLPMTHKERFEKLGVRPPKGVLLYGPPGTGKTLMARACAAQTNATFLKLAGPQLVQMFIGDGAKLVRDAFQLAKEKAPCIIFIDEIDAIGTKRFDSEVSGDREVQRTMLELLNQLDGFSSDERIKVIAATNRADILDPALMRSGRLDRKIEFPHPTEEARARILQIHSRKMNVHPDVNFEELARSTDDFNGAQLKAVCVEAGMLALRRDATEVNHEDFNEGIIQVQAKKKASLNYYA

SEQ ID NO: 5159 - DNA, 1275 bp, Brassica napus
  CDS (1)..(1275)
atggcaactccgatggtagaagacacgtcaagcttcgaagaggatcagctcgcttccatgtccaccgaagatatcgtcagagctactcgcctcctcgagaacgagattcgaatcctcaaggaagacgctcagaggacaaatcttgaatgcgattcttacaaggagaagattaaagagaatcaggagaagattaaactcaacaagcagcttccttacttggttggcaacattgttgagatcttggagatgaatcccgaagatgatgctgaagaagacggtgctaatattgaccttgactctcaacggaaaggaaagtgtgttgtcttgaaaacctctacacgtcagactatctttctaccagttgttggtctcgtggaccctgatagcttgaagcctggggacttggttggagtaaacaaagacagttaccttattttggataccttgccatcagagtatgactctagagttaaagccatggaggtcgatgagaaaccaaccgaagattacaatgacattggaggactggagaagcagatccaagagcttgtagaagctattgtgctccccatgacgcacaaggagcgtttcgagaagcttggtgttcgtccaccaaagggagtgctcttgtatggtcctccagggactggtaaaactttgatggctcgtgcctgtgcagcacagaccaatgccactttcctcaaattggcaggccctcaattggtccagatgtttattggagacggagcaaaacttgttcgtgatgcctttcaactagcgaaagataaagctccgtgtatcatcttcattgatgagatcgatgcaattggtacaaagcgttttgacagtgaagtaagcggagacagggaagtgcagaggactatgttggagctactcaatcagcttgatggattcagtagtgatgagcgtattaaggtgattgcagctactaaccgagcagatattctggacccagcacttatgcgttctggtcggctagacaggaagattgagttcccacatccaacagaagaagcaagagccagaatcttacagatccactcgaggaagatgaatgtccacccagacgtcaactttgaggagcttgcgagatcaacagatgatttcaatggtgctcaactgaaagcagtatgtgtagaggctggtatgttagctcttcgtcgtgatgccacagaggtgaaccatgaggacttcaatgaaggtatcatccaagtccaggccaagaagaaagcaagcttgaactactacgcctaa

SEQ ID NO: 5160 - protein, 424 aa, Brassica napus
MATPMVEDTSSFEEDQLASMSTEDIVRATRLLENEIRILKEDAQRTNLECDSYKEKIKENQEKIKLNKQLPYLVGNIVEILEMNPEDDAEEDGANIDLDSQRKGKCVVLKTSTRQTIFLPVVGLVDPDSLKPGDLVGVNKDSYLILDTLPSEYDSRVKAMEVDEKPTEDYNDIGGLEKQIQELVEAIVLPMTHKERFEKLGVRPPKGVLLYGPPGTGKTLMARACAAQTNATFLKLAGPQLVQMFIGDGAKLVRDAFQLAKDKAPCIIFIDEIDAIGTKRFDSEVSGDREVQRTMLELLNQLDGFSSDERIKVIAATNRADILDPALMRSGRLDRKIEFPHPTEEARARILQIHSRKMNVHPDVNFEELARSTDDFNGAQLKAVCVEAGMLALRRDATEVNHEDFNEGIIQVQAKKKASLNYYA

SEQ ID NO: 5161 - DNA, 1281 bp, Brassica napus
  CDS (1)..(1281)
atgacgagagatatcgaagatgagatcagagacgagaagaaccctcgcccccttgacgaagacgacatcgctctcctcaagacttacgggttaagtccttactctgcagctaacaagaaagttgagaaagaaatcaaggagctcgccaagaggatcaacgatctctgtggcatcaaggagtctgatactggtttagctcttcctagtcaatgggatctcgtttctgataagcagatgatgcaagaggagcaacctcttcaggttgctagatgcacgaagatcattagtccaaacactgaagatgccaagtacgtcatcaatgtcaaacagatagccaagtttgtcgttggccttggagataaagtttctcccactgacattgaagaaggcatgcgcgtaggagttgataggaccaagtatcagatacagattcctctgcctccaaagatcgatcctagtgtcaccatgatgactgttgaagagaagcctgatgttacttacaatgatgttggtggctgcaaggagcagattgagaagatgagagaggtggttgagctgccaatgcttcatccagagaagtttgtgaagcttggaatagatcctcccaagggagttctctgctacggtcctcctggtaccggcaaaacccttttggccagagctgttgctaacagaaccgatgcttgctttatcagggttatcggcagcgagcttgttcagaagtatgtcggtgagggagctaggatggttcgtgaactgttccagatggcacggtccaaaaaggcttgcattgtgttctttgatgaagttgatgccattggtggtgcaagatttgatgacggtgtaggaggtgataacgaagtccagcgtactatgcttgagattgtgaatcagcttgatgggttcgatgcacgtggtaacatcaaggttctcatggcaacaaacaggcctgacacactggaccctgctcttctacgtcctggacgtcttgaccgtaaggttgagtttggattgcctgatctggagagcagaacacagatcttcaagattcacacacgaaccatgaactgcgagagagacatccgtttcgaactccttgctcgcctctgcccaaactcaactggagctgatatcaggagtgtatgcactgaggctggaatgtatgcaatcagagctaggaggaagactgtgactgagaaagactttctggatgcagtgaacaaagtcatcaaaggttatcagaagttcagtgctactcccaaatacatggtctacaattag

SEQ ID NO: 5162 - protein, 426 aa, Brassica napus
MTRDIEDEIRDEKNPRPLDEDDIALLKTYGLSPYSAANKKVEKEIKELAKRINDLCGIKESDTGLALPSQWDLVSDKQMMQEEQPLQVARCTKIISPNTEDAKYVINVKQIAKFVVGLGDKVSPTDIEEGMRVGVDRTKYQIQIPLPPKIDPSVTMMTVEEKPDVTYNDVGGCKEQIEKMREVVELPMLHPEKFVKLGIDPPKGVLCYGPPGTGKTLLARAVANRTDACFIRVIGSELVQKYVGEGARMVRELFQMARSKKACIVFFDEVDAIGGARFDDGVGGDNEVQRTMLEIVNQLDGFDARGNIKVLMATNRPDTLDPALLRPGRLDRKVEFGLPDLESRTQIFKIHTRTMNCERDIRFELLARLCPNSTGADIRSVCTEAGMYAIRARRKTVTEKDFLDAVNKVIKGYQKFSATPKYMVYN

SEQ ID NO: 5163 - DNA, 1203 bp, Zea mays
  CDS (1)..(1203)
atggccgacggggaggacgccgccgccgcgcgccgccgggccgccatcacagactaccgcaagaagctgctcaactgcagggagctagagtcgcgcgtcggcaccgtgagagaaagccttaaaactgcaaagaaggattttaccaagactgaggacgacttaaagtctctgcagagtgtggggcaaataattggagaagtactccgacctcttgataatgaacgctttatcgtgaaggccagcagtggtccccgatacgtggtcggttgccgaagtaaagtggacaaggagaagttgacatctggtactcgtgttgtacttgacatgacgaccttgacaataatgcgcactcttccacgggaggtggatcctgtggtatataacatgcttcatgaagatccaggaaatgtcagttactctgctgtaggtggtctgtctgatcagattagagagctcagggagtccattgagttaccacttatgaatcctgaactctttcttcgggtgggaattaagcctcctaagggtgttctactctacggtcctccaggaactgggaagaccctattggcaagggctatcgcaagtaacatcgatgccaactttttgaagattgtttcaagtgctattatcgacaaatacattggagaaagtgctcgtttgattagagaaatgtttggctatgcacgtgaccaccaaccatgcatcatcttcatggatgaaattgatgctattggtggtcgaagatttagtgagggaactagtgctgatcgtgagattcagcggacgttgatggagctccttaaccaattagatggatttgatgagctaggaaaggtaaaaatgatcatggccacaaatcgacctgatgttctggacccggcgctcctgcgtcctggacgtttagataggaagattgaaattccgctacccaacgagcaatcaagaatggaagttctaaaaatccatgcagccggtatcgccaagcatggggagattgattatgaagcagtcgtgaaactagctgaaggtttcaatggggctgatcttcggaacgtgtgcaccgaagctggcatggctgcaattcgtgcagagagagattacgtagtccacgaagacttcatgaaggctgtgaggaaactaaatgatgcaaaaaagctggaatcgagtgcgcattacagtgcagattttggcaaagagtaa

SEQ ID NO: 5164 - protein, 400 aa, Zea mays
MADGEDAAAARRRAAITDYRKKLLNCRELESRVGTVRESLKTAKKDFTKTEDDLKSLQSVGQIIGEVLRPLDNERFIVKASSGPRYVVGCRSKVDKEKLTSGTRVVLDMTTLTIMRTLPREVDPVVYNMLHEDPGNVSYSAVGGLSDQIRELRESIELPLMNPELFLRVGIKPPKGVLLYGPPGTGKTLLARAIASNIDANFLKIVSSAIIDKYIGESARLIREMFGYARDHQPCIIFMDEIDAIGGRRFSEGTSADREIQRTLMELLNQLDGFDELGKVKMIMATNRPDVLDPALLRPGRLDRKIEIPLPNEQSRMEVLKIHAAGIAKHGEIDYEAVVKLAEGFNGADLRNVCTEAGMAAIRAERDYVVHEDFMKAVRKLNDAKKLESSAHYSADFGKE

SEQ ID NO: 5165 - DNA, 1287 bp, Zea mays
  CDS (1)..(1287)
atgtcgtcgtcggcgcccgcaccggccgccatggccgtggacgacgcggaggacgaccagctcgcctccatgtccacggaggagatcaccagggcctcccgtctcctcgacaacgagatccgcgtccacaaggacgagctgcagcggtcgaacctggagctggagtctatcaaggagaagaccaaggagaaccaggagaagattaagctcaacaagcagctgccgtacctcgtcggcaacatcgtcgagattttggaaatgaaccctgaggatgaggctgaagaagatggtgctaacatcgatctggactcacaaaggaaaggaaaatgtgttgttctgaagacatccaccagacaaaccatattccttcctgtaattgggttagttgaccccgataagctgaagcctggcgatttagttggagttaacaaagacagctacttgatattagatacattgccttcagagtatgactcacgggttaaggcaatggaagtagatgagaaacctactgaggattacaatgacatcggcggacttgagaaacagattcaagagcttgtggaagcaatagtgttaccaatgacacacaaggaccgatttcaaaaattgggcattcgtccccccaaaggggttcttttgtatggaccccctgggaccgggaaaacgctcatggctcgtgcatgcgctgcacagactaatgcaacatttctgaaattggctggtccacaacttgtccagatgttcattggtgatggagctaagcttgttagagatgcttttcagcttgctaaggagaaagccccgtgcatcatctttattgatgaaattgatgccattggaacaaagcgttttgacagtgaagttagtggcgatagagaagtgcaaaggacaatgttggaattgctgaatcagcttgatggatttagcagcgatgagaggataaaggtgatagctgcaacaaatcgtgctgatattcttgatcctgctctgatgagatctggtcgtctggaccgtaagattgagttccctcatccatcagaggaagcaagagctagaatcctgcagatccactcgaggaaaatgaatgtgaatccagatgtcaactttgaagagttggcgcgttcaaccgatgatttcaatggcgctcagctaaaggctgtttgcgtagaggctggcatgctcgctctacgccgagatgctacagaggttacccacgaggatttcaacgaggggatcatccaagtgcaggcaaagaagaagtccagcttgaattactacgcgtaa

SEQ ID NO: 5166 - protein, 428 aa, Zea mays
MSSSAPAPAAMAVDDAEDDQLASMSTEEITRASRLLDNEIRVHKDELQRSNLELESIKEKTKENQEKIKLNKQLPYLVGNIVEILEMNPEDEAEEDGANIDLDSQRKGKCVVLKTSTRQTIFLPVIGLVDPDKLKPGDLVGVNKDSYLILDTLPSEYDSRVKAMEVDEKPTEDYNDIGGLEKQIQELVEAIVLPMTHKDRFQKLGIRPPKGVLLYGPPGTGKTLMARACAAQTNATFLKLAGPQLVQMFIGDGAKLVRDAFQLAKEKAPCIIFIDEIDAIGTKRFDSEVSGDREVQRTMLELLNQLDGFSSDERIKVIAATNRADILDPALMRSGRLDRKIEFPHPSEEARARILQIHSRKMNVNPDVNFEELARSTDDFNGAQLKAVCVEAGMLALRRDATEVTHEDFNEGIIQVQAKKKSSLNYYA

SEQ ID NO: 5167 - DNA, 1281 bp, Brassica napus
  CDS (1)..(1281)
atgacgagagacattgaagatgagattcgagacgagaagaatcctcgccccctcgacgaagacgatatcgctctcctcaagacttacgggttagggccttactctgcgccgataaagaaagttgagaaagagatcaaggagcttgccaaaaagatcaacgatctctgtggtatcaaggagtctgatactggtttagctcctcccagccagtgggatctcgtttctgataaacagatgatgcaagaggagcaacctctccaggttgctagatgcaccaagatcattagtcccaacactgaagacgccaagtacgtcattaacgtcaaacagattgcgaagtttgtcgttggtcttggtgataaagtttctcctactgatattgaagaaggcatgcgcgttggagttgataggaataagtatcagattcagattcctctacctccaaagatcgatcctagtgtcaccatgatgactgtcgaagagaaacctgatgttacttacaatgacgttggtggctgcaaggagcagatcgagaagatgcgggaggtcgttgaactgccaatgcttcacccagagaagtttgtgaagcttggaatagatcctcccaagggagttctctgctacggtcctcctggtaccggtaaaaccctgttggctagagctgttgccaacagaaccgatgcttgctttatcagggttattggcagtgagcttgttcagaagtatgtcggtgaaggagctaggatggttcgtgaactgtttcagatggcacggtccaaaaaagcttgcattgtgttctttgatgaagttgatgccattggtggtgcaagatttgatgacggtgtaggaggtgacaacgaagtccagcgtactatgcttgagattgtgaatcagcttgatgggtttgacgcacgtggtaacatcaaggttcttatggcaacaaacaggcctgacacgctggaccctgctcttctacgtcctggacgtcttgaccgtaaggttgagtttggtttgcctgatctggagagcagaacacagatcttcaagattcacacaagaaccatgaactgcgagagagacatccgttttgaactccttgctcgcctctgcccaaactcaaccggagctgatatcagaagtgtgtgcactgaagctggaatgtatgcaatcagagctaggcgaaagacagtaactgagaaagactttctggatgcagtgaacaaagtcatcaagggttatcagaagttcagtgcaactcccaagtacatggtctacaactag

SEQ ID NO: 5168 - protein, 426 aa, Brassica napus
MTRDIEDEIRDEKNPRPLDEDDIALLKTYGLGPYSAPIKKVEKEIKELAKKINDLCGIKESDTGLAPPSQWDLVSDKQMMQEEQPLQVARCTKIISPNTEDAKYVINVKQIAKFVVGLGDKVSPTDIEEGMRVGVDRNKYQIQIPLPPKIDPSVTMMTVEEKPDVTYNDVGGCKEQIEKMREVVELPMLHPEKFVKLGIDPPKGVLCYGPPGTGKTLLARAVANRTDACFIRVIGSELVQKYVGEGARMVRELFQMARSKKACIVFFDEVDAIGGARFDDGVGGDNEVQRTMLEIVNQLDGFDARGNIKVLMATNRPDTLDPALLRPGRLDRKVEFGLPDLESRTQIFKIHTRTMNCERDIRFELLARLCPNSTGADIRSVCTEAGMYAIRARRKTVTEKDFLDAVNKVIKGYQKFSATPKYMVYN

SEQ ID NO: 5169 - DNA, 1215 bp, Brassica napus
  CDS (1)..(1215)
atggctgcagcgatggttctcgaccccaaagcatctcctccgctgatggatctctccacagccgacgaggaagatccctactcccgcctcaaatcgctcgaacggcaactggagttcaccgacatccaagaggaatacgtgaaagacgagcagaagaatctcaaacgcgagctcttacgcgctcaagaagaggtcaagcgaatccaatccgtgcctctagtgattggccagttcatggagatggttgatcagaacaacggcatcgttggatccaccacgggctccaattactatgtgaggattctcagcaccatcaacagagaagacttaaagccttctgcttccgtcgcccttcaccgtcactccaacgccctcgttgatgtgttgccgcctgaggctgattctagcatctctcttctcagtcaatctgagaagcctgacgtctcctacaatgatattggaggatgtgatattcagaaacaggagattcgtgaggctgttgagttgccacttacacaccacgagctttacaagcagattggtattgaccctccacgaggtgtcttgctctatggaccccctggtactgggaagactatgttggctaaggctgttgctaaccatacaacagctgctttcattagggttgttggctccgagtttgtgcagaagtacctcggcgagggacctcgtatggttcgtgatgtcttccgtcttgccaaggagaatgctccagctatcatctttattgatgaggtagatgccatcgctactgctaggttcgatgctcaaactggagctgatagggaagttcagcgtattctcatggaactacttaatcagatggatggatttgaccagaccgtgaatgtcaaggtcataatggcaaccaacagggcagacactcttgatcctgctctcttacgtcctgggagacttgatcgtaagattgagttcccccttcctgatagacgtcaaaagaggcttgttttccaggtatgcaccgccaaaatgaacctcagcgatgaggttgacttggaagactatgtttcacggcctgataaaattagcgctgctgagatagcagcaatctgccaggaagctggaatgcatgcggtgcgtaagaacagatatgtgatactgcccaaggacttcgagaagggttaccgctcaaatgtgaagaagccagacacggactttgagttctacaagtga

SEQ ID NO: 5170 - protein, 404 aa, Brassica napus
MAAAMVLDPKASPPLMDLSTADEEDPYSRLKSLERQLEFTDIQEEYVKDEQKNLKRELLRAQEEVKRIQSVPLVIGQFMEMVDQNNGIVGSTTGSNYYVRILSTINREDLKPSASVALHRHSNALVDVLPPEADSSISLLSQSEKPDVSYNDIGGCDIQKQEIREAVELPLTHHELYKQIGIDPPRGVLLYGPPGTGKTMLAKAVANHTTAAFIRVVGSEFVQKYLGEGPRMVRDVFRLAKENAPAIIFIDEVDAIATARFDAQTGADREVQRILMELLNQMDGFDQTVNVKVIMATNRADTLDPALLRPGRLDRKIEFPLPDRRQKRLVFQVCTAKMNLSDEVDLEDYVSRPDKISAAEIAAICQEAGMHAVRKNRYVILPKDFEKGYRSNVKKPDTDFEFYK

SEQ ID NO: 5171 - DNA, 1275 bp, Brassica napus
  CDS (1)..(1275)
atggcaacccccatggtagaagacacgtcgagcttcgaagaggatcagctcgcatccatgtccacagaagatatcatcagagctactcgcctcctcgacaacgagattcgaatcctcaaggaagatgcacaaagaacgaatcttgagtgtgattcttacaaggagaagataaaggagaaccaggagaagattaaactcaacaagcagcttccttacttggttggcaacattgttgagatcttggagatgaatccagaagatgatgctgaggaagacggtgctaatattgaccttgactctcaacggaaggggaagtgtgttgttttgaaaacctctacacgacagactatctttctaccagttgttggccttgtggaccctgatagcttgaagcctggggacttggttggagttaataaagacagttacctgattctggataccttgccgtctgagtatgactctagggttaaagccatggaggtcgatgagaaacctaccgaagattacaatgacattggaggactggagaagcagatccaagagcttgtagaggctattgtgcttcccatgacgcacaaggagcgtttcgagaagcttggtgttcgtccaccaaagggagtgctcctgtatggtcctccagggactggtaaaactctaatggctcgtgcttgtgcagcacagaccaatgccaccttcctcaaattggcaggtcctcaattggtccagatgtttattggagacggagcaaaacttgtccgtgatgcctttcaactagcaaaagagaaagctccatgcatcatcttcattgatgaaatcgatgcaattggtacaaagcgttttgacagtgaagtaagcggagacagggaagtgcagaggactatgttggagctgctcaatcagcttgatggattcagtagcgatgagcgtattaaggtgattgcagccactaaccgagcagatattctggacccagcacttatgcgttctggtcgactagacaggaagattgagttcccacatccaacagaagaagcaagagccagaatcttacagattcactcgaggaagatgaatgtccacccagacgtcaactttgaggagcttgcgagatcaacagatgatttcaatggtgctcaactgaaagcagtatgtgtagaggctggtatgttagctcttcgtcgtgatgccacagaggtgaaccatgaggacttcaatgaaggtatcatccaagtccaggccaagaagaaagcaagcttgaactactacgcctaa

SEQ ID NO: 5172 - protein, 424 aa, Brassica napus
MATPMVEDTSSFEEDQLASMSTEDIIRATRLLDNEIRILKEDAQRTNLECDSYKEKIKENQEKIKLNKQLPYLVGNIVEILEMNPEDDAEEDGANIDLDSQRKGKCVVLKTSTRQTIFLPVVGLVDPDSLKPGDLVGVNKDSYLILDTLPSEYDSRVKAMEVDEKPTEDYNDIGGLEKQIQELVEAIVLPMTHKERFEKLGVRPPKGVLLYGPPGTGKTLMARACAAQTNATFLKLAGPQLVQMFIGDGAKLVRDAFQLAKEKAPCIIFIDEIDAIGTKRFDSEVSGDREVQRTMLELLNQLDGFSSDERIKVIAATNRADILDPALMRSGRLDRKIEFPHPTEEARARILQIHSRKMNVHPDVNFEELARSTDDFNGAQLKAVCVEAGMLALRRDATEVNHEDFNEGIIQVQAKKKASLNYYA

SEQ ID NO: 5173 - DNA, 1215 bp, Brassica napus
  CDS (1)..(1215)
atggccgcagcgatggttctcgaccctaaagcatctccgccactgatggatcaatccacaaccgacgaagaagatccctactcccgtctcaaatccctcgaacggcagctagagttcacggacatccaagaggaatacgttaaagacgagcaaaagaatctcaaacgagagctcttacgcgctcaagaggaggtcaagagaatccaatccgtgcctctagtgattggccagttcatggagatggtggatcagaacaacggcatcgtcggatccaccacaggctccaattactacgttcggattctcagcaccatcaacagagaagacctgaagccttctgcttccgtcgcccttcaccgtcactcgaacgccctcgtcgatgttttgccgcctgaggcggattctagcatctctcttcttagtcaatccgagaagcctgacgtctcctacaatgatattggaggatgtgatattcagaagcaggagattcgcgaggctgttgagttgccacttacccaccacgagctttacaaacagattggtattgacccaccacgaggtgtcttgctctatggacctcctgggactgggaagactatgttggctaaggctgttgctaatcacacaaccgctgctttcattagggttgttggctccgagtttgtgcagaagtacctcggcgagggacctcgtatggttcgtgatgtcttccgtcttgccaaggagaatgctccagctatcatctttattgatgaggtggatgccatcgctactgctaggttcgatgctcaaactggagctgatagggaagttcagcgtattctcatggaactacttaatcagatggatggatttgaccagaccgtgaatgtcaaggtcataatggcaaccaacagggcagacactcttgatcctgctctcttacgtcctgggagacttgatcgtaagattgagttcccccttcctgatagacgtcaaaagaggcttgttttccaggtatgcaccgccaaaatgaacctcagcgatgaggttgacttggaagactatgtttcacggcctgataaaattagcgctgctgagatagcagcaatctgccaggaagctggaatgcatgcggtgcgtaagaacagatatgtgatactgcccaaggatttcgagaagggttaccgctcgaatgtgaagaagccagacacggactttgagttctacaagtga

SEQ ID NO: 5174 - protein, 404 aa, Brassica napus
MAAAMVLDPKASPPLMDQSTTDEEDPYSRLKSLERQLEFTDIQEEYVKDEQKNLKRELLRAQEEVKRIQSVPLVIGQFMEMVDQNNGIVGSTTGSNYYVRILSTINREDLKPSASVALHRHSNALVDVLPPEADSSISLLSQSEKPDVSYNDIGGCDIQKQEIREAVELPLTHHELYKQIGIDPPRGVLLYGPPGTGKTMLAKAVANHTTAAFIRVVGSEFVQKYLGEGPRMVRDVFRLAKENAPAIIFIDEVDAIATARFDAQTGADREVQRILMELLNQMDGFDQTVNVKVIMATNRADTLDPALLRPGRLDRKIEFPLPDRRQKRLVFQVCTAKMNLSDEVDLEDYVSRPDKISAAEIAAICQEAGMHAVRKNRYVILPKDFEKGYRSNVKKPDTDFEFYK

SEQ ID NO: 5175 - DNA, 1200 bp, Brassica napus
  CDS (1)..(1200)
atgagcgacggagacgatgccgctagacgccgtaccgctgcagtggccgattaccggaaaaagctcctccaacataaggagctcgagtcccgagttcgaacagctagggagaacctgagaggatctaaaaaggaattcaacaaaactgaagatgatctcaagtctcttcaaagtgttggccagatcatcggagaagtccttcgacctctcgataatgaaagattgattgtcaaagcgagcagcggtcctcggtatgtggtaggctgccgtagcaaagtggataaggagaagctgacctcaggaactcgagttgttcttgatatgaccacacttactattatgagagcccttccccgagaagtcgatcccgttgtgtataacatgctgcacgaagaccctggcaacattagctactctgctgtgggaggattaggtgatcagatcagagaactcagggaatctattgagcttcctctcatgaatcctgaacttttcctccgagtaggaatcaaaccacccaagggagtccttctgtatggacctccaggtaccgggaaaactctgctagctagggctattgccagcaacatcgatgccaacttcttgaaggttgtgtcgagtgcaatcatagacaagtacattggagaaagtgctaggctgattcgggagatgtttaactatgcccgtgaacaccagccttgtatcattttcatggatgaaatcgatgcaatcggtgggcgtcgttttagcgagggaaccagtgctgatcgtgaaattcaaagaacacttatggagttgctcaatcagcttgatgggtttgacaacctcggaaaggtgaaaatgataatggcaacgaacagacctgatgtgcttgatcctgcgcttctccgtcctggtagattagatagaaagattgagatccctttgccaaatgagcaatcaagaatggatatcctcaagatccatgcagctggtatcgccaaacatggtgaaattgagtacgaggctattgtcaaacttgcagagggtttcaatggtgctgatctgcgtaacatatgcacggaggctggaatgtttgcaatccgagcagagcgggactatgtgatccaggaagatttcatgaaggcggtgagaaagctgagcgaggccaagaaacttgagtcgagttcacactacaatgcagatttcggaaaagagtga

SEQ ID NO: 5176 - protein, 399 aa, Brassica napus
MSDGDDAARRRTAAVADYRKKLLQHKELESRVRTARENLRGSKKEFNKTEDDLKSLQSVGQIIGEVLRPLDNERLIVKASSGPRYVVGCRSKVDKEKLTSGTRVVLDMTTLTIMRALPREVDPVVYNMLHEDPGNISYSAVGGLGDQIRELRESIELPLMNPELFLRVGIKPPKGVLLYGPPGTGKTLLARAIASNIDANFLKVVSSAIIDKYIGESARLIREMFNYAREHQPCIIFMDEIDAIGGRRFSEGTSADREIQRTLMELLNQLDGFDNLGKVKMIMATNRPDVLDPALLRPGRLDRKIEIPLPNEQSRMDILKIHAAGIAKHGEIEYEAIVKLAEGFNGADLRNICTEAGMFAIRAERDYVIQEDFMKAVRKLSEAKKLESSSHYNADFGKE

SEQ ID NO: 5177 - DNA, 1260 bp, Brassica napus
  CDS (1)..(1260)
atggcggccgtaggaatcgagacgaggcgtcctgagggtgcgatggaggaaacctgccacgtcaagggagcggtggcgaaacaaggagaggggcttaagcagtactatctccagcacatcgacgagctccagcgacttctccgccacaaaactaacaacctcaatcgcctcgaagctcagaggaacgatctcaactctcgagtacgaatgctgagagaagagttgcagctgcttcaggaacctgggtcctatgtgggtgaagtggtcaaagtgatgggaaaaaacaaggtcttggttaaggttcatccagaggggaagtatgttgttgatattgacaaaagtatagacataactaaacttaccccatctacaagagttgctctccgtaatgatagctatgttctccaccttgtcctgccaagtaaagttgatcccctggttaaccttatgaaagttgagaaggttcctgactccacttatgacatgattggtggtcttgaccagcaaattaaggaaattaaggaggtcattgagcttccaatcaagcatcctgaattgtttgagtctcttggaatcgctcagccaaagggtgtgttgttatatggtccacccggaactgggaagacacttttggctcgggctgtggcacatcacaccgactgtacgttcatcagagtttctggttccgagctggtccagaaatacattggagaaggttctagaatggtcagagaactttttgtgatggcaagggagcatgcaccatcaatcatcttcatggatgagatcgacagtatcgggtctgctcgtatggaatctggaagtggaaacggtgacagtgaggttcaacggactatgcttgagcttctcaatcaacttgacggattcgaagcatcaaacaaaatcaaggttctgatggcgacaaatcgtattgatattctggatcaagctcttctcaggccaggaaggattgataggaaaatcgaattccctaatcctaatgaagattcacgttgtgatatcttgaagattcactcgaggaaaatgaatttgatgcgtggaattgatctgaaaaagattgcagagaagatgaatggtgcttcaggtgctgaactgaaggctgtgtgcacggaggcgggcatgtttgctctgagggagaggagagtacacgtgacacaggaagactttgagatggcagtggcgaaggttatgaagaaagacacagagaagaacatgtctctgcgtaagctctggaagtag

SEQ ID NO: 5178 - protein, 419 aa, Brassica napus
MAAVGIETRRPEGAMEETCHVKGAVAKQGEGLKQYYLQHIDELQRLLRHKTNNLNRLEAQRNDLNSRVRMLREELQLLQEPGSYVGEVVKVMGKNKVLVKVHPEGKYVVDIDKSIDITKLTPSTRVALRNDSYVLHLVLPSKVDPLVNLMKVEKVPDSTYDMIGGLDQQIKEIKEVIELPIKHPELFESLGIAQPKGVLLYGPPGTGKTLLARAVAHHTDCTFIRVSGSELVQKYIGEGSRMVRELFVMAREHAPSIIFMDEIDSIGSARMESGSGNGDSEVQRTMLELLNQLDGFEASNKIKVLMATNRIDILDQALLRPGRIDRKIEFPNPNEDSRCDILKIHSRKMNLMRGIDLKKIAEKMNGASGAELKAVCTEAGMFALRERRVHVTQEDFEMAVAKVMKKDTEKNMSLRKLWK

SEQ ID NO: 5179 - DNA, 1332 bp, Brassica napus
  CDS (1)..(1332)
atgggtcaaggaccatccggaggtttgaatcgccaaggagacaagaagcccgatggcggcgataagaaagagaagaagttcgagccggcggctccgccgtcccgcgtcgggaggaagcagcgtcgccaaaaaggacccgaggcggcggcgaggctcccgacggtgactccttccactaagtgcaagctcaggctgctgaagatggagcggatcaaggactatctcctgatggaggaagagttcgtagcgaatcaggagaggctgaagcctcaggaggagaaggcggaggaagatagatctaaggtcgatgatctccgtgggacgccgatgagcgtcgggaacctcgaggagctgatcgatgagaatcacgcaatcgtttcgtcttccgtggggcctgagtattacgttgggatcttgtcgttcgttgataaagatcagctcgagcctgggtgctcgatcttgatgcataataaggttctgtctgttgttgggatactgcaagatgaagtggatccgatggtgtctgtgatgaaagttgagaaggcgcctttggagtcgtatgctgatattggaggtttagaagctcagattcaggagattaaggaagctgttgagttgcctttgactcatcctgagttgtatgaggatattggtattaagcctcccaagggtgtgattttgtatggtgagcctggaactgggaagactctgcttgctaaggcggtggcgaactctacatcagctactttcttgagagttgttggtagtgaactgattcagaagtatttgggagatggtcccaagcttgtgagggagcttttcagagttgctgatgacctttcaccatcaatcgtcttcatagacgagattgatgctgttggtaccaagcggtatgatgctaactcaggaggtgagcgtgagatccaaagaactatgttggaacttctgaaccagcttgatgggtttgattcaagaggagacgtaaaggtcatccttgcaacaaacagaatcgagagtcttgacccggcacttcttcgacctggacgtattgataggaagatcgagttcccacttccagatatcaaaacgagaagacgcatcttccagatacacacatcaaagatgactctgtcggaagatgtaaacttggaagagtttgtgatgacaaaagacgagttctcaggagctgatatcaaagctatttgcactgaggctggtctgcttgcgctcagggagcgtcgtatgaaggtgacgcatccggatttcaagaaagccaaggaaaaggttatgttcaagaagaaagaaggcgtccctgaaggcctttacatgtaa

SEQ ID NO: 5180 - protein, 443 aa, Brassica napus
MGQGPSGGLNRQGDKKPDGGDKKEKKFEPAAPPSRVGRKQRRQKGPEAAARLPTVTPSTKCKLRLLKMERIKDYLLMEEEFVANQERLKPQEEKAEEDRSKVDDLRGTPMSVGNLEELIDENHAIVSSSVGPEYYVGILSFVDKDQLEPGCSILMHNKVLSVVGILQDEVDPMVSVMKVEKAPLESYADIGGLEAQIQEIKEAVELPLTHPELYEDIGIKPPKGVILYGEPGTGKTLLAKAVANSTSATFLRVVGSELIQKYLGDGPKLVRELFRVADDLSPSIVFIDEIDAVGTKRYDANSGGEREIQRTMLELLNQLDGFDSRGDVKVILATNRIESLDPALLRPGRIDRKIEFPLPDIKTRRRIFQIHTSKMTLSEDVNLEEFVMTKDEFSGADIKAICTEAGLLALRERRMKVTHPDFKKAKEKVMFKKKEGVPEGLYM

SEQ ID NO: 5181 - DNA, 1251 bp, Brassica napus
  CDS (1)..(1251)
atggcggccgtaggaatcgagacgaggcgtcctgagggtgcgatggaggaaacctgcaacgtgaagggagcacaaggagaggggcttaagcagtactatctccagcacatcgacgagctccagcgacttctccgccagaaaactaacaacctcaatcgcctcgaagctcagaggaacgatctcaactctcgagtacgaatgctgagagaagagttgcagctgcttcaggaacctgggtcctatgtgggtgaagtggtcaaagttatgggaaaaaacaaggtcttggttaaggttcatccagaggggaagtatgttgttgatattgacaaaagtatagacataactaaacttaccccatctacaagagttgctctccgtaatgatagctatgttctccaccttgtcctgccaagtaaagttgatcccctggttaaccttatgaaagttgagaaggttcctgactccacttatgacatgattggtggtcttgaccagcaaattaaggaaattaaggaggtcattgagcttccaatcaagcatcctgaattgtttgagtctcttggaattgctcagccaaagggtgtgttgttatatggtccacccggaactgggaagacacttttggctcgggctgtggcacatcacaccgactgtacgttcatcagagtttctggttccgagctggtccagaaatacattggagaaggttctagaatggtcagagaactctttgtgatggcaagggagcatgcaccatcaatcatcttcatggatgaaatcgacagtattgggtctgctcgtatggaatctggaagtggaaacggtgacagtgaggttcaacggactatgcttgagcttctcaatcaacttgacggattcgaagcgtcaaacaaaatcaaggttctgatggcgacaaatcgtattgatattctggatcaagctcttctcaggccaggaaggattgataggaaaatcgaattccctaatcctaatgaagattcacgttgtgatatcttgaagattcactcgaggaaaatgaatttgatgcgtggaattgatctgaaaaagattgcagagaagatgaatggtgcttcaggtgctgaactgaaggctgtgtgcacggaggcgggcatgtttgctctgagggagaggagagtacacgtgacacaggaagactttgaaatggcagtggcgaaggtaatgaagaaagacacagagaagaacatgtctctgcgtaagctctggaagtag

SEQ ID NO: 5182 - protein, 416 aa, Brassica napus
MAAVGIETRRPEGAMEETCNVKGAQGEGLKQYYLQHIDELQRLLRQKTNNLNRLEAQRNDLNSRVRMLREELQLLQEPGSYVGEVVKVMGKNKVLVKVHPEGKYVVDIDKSIDITKLTPSTRVALRNDSYVLHLVLPSKVDPLVNLMKVEKVPDSTYDMIGGLDQQIKEIKEVIELPIKHPELFESLGIAQPKGVLLYGPPGTGKTLLARAVAHHTDCTFIRVSGSELVQKYIGEGSRMVRELFVMAREHAPSIIFMDEIDSIGSARMESGSGNGDSEVQRTMLELLNQLDGFEASNKIKVLMATNRIDILDQALLRPGRIDRKIEFPNPNEDSRCDILKIHSRKMNLMRGIDLKKIAEKMNGASGAELKAVCTEAGMFALRERRVHVTQEDFEMAVAKVMKKDTEKNMSLRKLWK

SEQ ID NO: 5183 - DNA, 1272 bp, Glycine max
  CDS (1)..(1272)
atggcgagcgcgatggtagaggacgcgaacttcgaagatgaccaactagccaatatgaccaccgacgacatcgtcagagcttctcgtcttctcgacaacgagattcgcatcctcaaggaagagttgcagaggaccaatttggaattggaatcgtacaaggacaagatcaaggagaatcaggagaagattaagctcaataagcagttgccctacctcgttggcaacattgttgagatattggaaatgaacccggaagacgaagctgaagaagatggtgccaatattgatcttgactcacaaaggaagggaaagtgtgttgtgctaaagacttctactcgacagacaatctttctacctgttgttgggcttgttgaccctgacaagttaaaacccggtgatctggttggtgttaacaaggatagttacttaatcttggataccctgccttccgagtatgattctagagttaaggccatggaagttgatgaaaagccaacagaggactacaatgacattggcggattagagaagcagattcaagaattagttgaagccattgttttgcccatgacccacaaggagcggttccaaaagttaggagttcgtcctcccaagggagtgctgttatatggacctccagggactgggaaaacattgatggcccgtgcctgtgcagcacagacaaatgccacttttctgaaattggcaggccctcaactggtccagatgttcataggagatggagcaaaacttgttcgtgatgcctttcaactagcaaaagagaagtcaccatgcattatttttatagatgaaattgatgcaattggtacaaagcgttttgatagtgaagtaagtggagacagagaggtacaacgaactatgttagaattgcttaatcagcttgatggttttagcagtgatgaccggatcaaggtgatagcagcaactaaccgtgcagatattcttgatcctgccctgatgcgttctggtcgtttggatcgtaaaattgagtttccacacccaagtgaagaagcaagagctcgaattctacagattcattcaaggaagatgaatgttcacccagatgtcaactttgaagaacttgcccggtccacagatgatttcaatggcgcacaactgaaggctgtctgtgttgaggctggcatgttggctctacgccgtgatgcaactgaggtgaaccacgaggattttaatgaaggtattattcaagtccaagcaaagaagaaagcaagtctgaactattatgcatag

SEQ ID NO: 5184 - protein, 423 aa, Glycine max
MASAMVEDANFEDDQLANMTTDDIVRASRLLDNEIRILKEELQRTNLELESYKDKIKENQEKIKLNKQLPYLVGNIVEILEMNPEDEAEEDGANIDLDSQRKGKCVVLKTSTRQTIFLPVVGLVDPDKLKPGDLVGVNKDSYLILDTLPSEYDSRVKAMEVDEKPTEDYNDIGGLEKQIQELVEAIVLPMTHKERFQKLGVRPPKGVLLYGPPGTGKTLMARACAAQTNATFLKLAGPQLVQMFIGDGAKLVRDAFQLAKEKSPCIIFIDEIDAIGTKRFDSEVSGDREVQRTMLELLNQLDGFSSDDRIKVIAATNRADILDPALMRSGRLDRKIEFPHPSEEARARILQIHSRKMNVHPDVNFEELARSTDDFNGAQLKAVCVEAGMLALRRDATEVNHEDFNEGIIQVQAKKKASLNYYA

SEQ ID NO: 5185 - DNA, 1278 bp, Glycine max
  CDS (1)..(1278)
atggcgagcgccatgttaggggatgctaccacgagctttgaagatggtaagttggcgtctatgaccaccgatgacgtcgtcagagcctctcgtattctcgaaaacgatattcgcattctcaaggaagaggtgcagagatcgaatcgggaatgggaatcgtacaaggagaagatacaagataatgaggagaaagttaaacttaataagcaattgccctacctcgttggtaacattgttgagatattggaaataaatccagaagatgaagcagaagaagatggttccaacattgatcttgactcccaaaggaaaggaaaatgtgttgtgctaaagacatctactcgacagacaatctttcttcctgttgttgggcttgttgaccctgccaagttaaaacctggtgatctggttggtgttaacaaagatagttacttaatcttggatgccctgccttctgagtatgattcacgagttaaggccatggaagttgatgaaaagccaaccgaggactacaatgacattggtggattagagaagcagattcaagaattagttgaagccattgttttgcccatgacccacaaggagcggttccaaaagttaggagttcgtcctcccaagggagtgctgttgtatggacctccggggactgggaaaacattgatggctcgtgcctgtgcagcacagacaaatgccacttttctgaaattggcaggccctcaactggtccagatgttcataggagatggagcaaaacttgttcgtgatgcctttcaactagcaaaagagaagtcaccatgcattatttttatagatgaaattgatgcaattggtacaaagcgttttgatagtgaagtaagtggagacagagaggtacaacgaactatgttagaattgcttaatcagcttgatggttttagcagtgatgaccggatcaaggtgatagcagcaactaaccgtgcagatattcttgatcctgccctgatgcgttctggtcgtttggatcgtaaaattgagtttccacacccaagtgaagaagcaagagctcgaattctacagattcattcaaggaagatgaatgttcacccagatgtcaactttgaagaacttgcccggtccacagatgatttcaatggcgcacaactgaaggctgtctgtgttgaggctggcatgttggctctacgccgtgatgcaactgaggtgaaccacgaggattttaatgaaggtattattcaagtccaagcaaagaagaaagcaagtctgaactattatgcatag

SEQ ID NO: 5186 - protein, 425 aa, Glycine max
MASAMLGDATTSFEDGKLASMTTDDVVRASRILENDIRILKEEVQRSNREWESYKEKIQDNEEKVKLNKQLPYLVGNIVEILEINPEDEAEEDGSNIDLDSQRKGKCVVLKTSTRQTIFLPVVGLVDPAKLKPGDLVGVNKDSYLILDALPSEYDSRVKAMEVDEKPTEDYNDIGGLEKQIQELVEAIVLPMTHKERFQKLGVRPPKGVLLYGPPGTGKTLMARACAAQTNATFLKLAGPQLVQMFIGDGAKLVRDAFQLAKEKSPCIIFIDEIDAIGTKRFDSEVSGDREVQRTMLELLNQLDGFSSDDRIKVIAATNRADILDPALMRSGRLDRKIEFPHPSEEARARILQIHSRKMNVHPDVNFEELARSTDDFNGAQLKAVCVEAGMLALRRDATEVNHEDFNEGIIQVQAKKKASLNYYA

SEQ ID NO: 5187 - DNA, 1269 bp, Glycine max
  CDS (1)..(1269)
atgggctcctccgcgatggtgttggacccgaaaccctcatcggagcctccgccgttcctcccgtcgacgaaatcggactaccttcaaggcagcttcggcggcgacgccaccgcctccgacgaggacgacctctacagccgcctgaaatccctccagcgccagctggagttcatcgacatccaggaggagtacgtgaaggatgagcagaagaatctcaagcgcgagctgctccgagcgcaggaggaggtgaagcggatacagtcggtgccgctcgtcattggccagttcatggagatggttgaccagaacaacggcatcgtcggatccaccaccggatccaactactacgtcaggatcctcagtaccatcaaccgcgagcttctcaagccctccgcctccgtcgcactccaccgccactccaacgcgctcgtcgacgttcttccgccggaggccgactccagcatctcgctcctcagccagtccgagaagcctgacgtcacttataatgacattggaggatgtgatatacagaaacaggaaatccgtgaggctgtggagctaccccttacacatcatgaactatacaaacaaattggtattgatcctccccgtggtgttttactgtatggaccccctggcactggcaaaacaatgcttgccaaagctgttgcgaatcataccactgctgctttcatcagggttgtgggatctgagtttgtgcagaagtatcttggtgagggtccacgaatggtccgtgatgtatttcgtcttgctaaagagaatgcccctgcaattatatttattgatgaggttgatgcaatagccactgctagatttgatgcccaaactggagctgatagagaagtacagcgtatccttatggaacttttgaatcagatggatggttttgaccaaacggtaaatgttaaagttataatggcaactaacagagcagacaccttggaccctgctctgttgcgtcctggaaggcttgatcgtaaaattgagttccctttgcctgatagacgccaaaagaggctcgtatttcaggtttgcacagccaaaatgaacttgagtgatgaggtagacctagaggattatgtttctcgtcctgacaaaatcagtgctgctgagatagcagccatttgtcaagaagctggaatgcatgctgttcgcaagaatagatatgtcatactgccgaaggacttcgagaagggttacaggacaaacgtgaagaagcctgatactgactttgaattttacaagtga

SEQ ID NO: 5188 - protein, 422 aa, Glycine max
MGSSAMVLDPKPSSEPPPFLPSTKSDYLQGSFGGDATASDEDDLYSRLKSLQRQLEFIDIQEEYVKDEQKNLKRELLRAQEEVKRIQSVPLVIGQFMEMVDQNNGIVGSTTGSNYYVRILSTINRELLKPSASVALHRHSNALVDVLPPEADSSISLLSQSEKPDVTYNDIGGCDIQKQEIREAVELPLTHHELYKQIGIDPPRGVLLYGPPGTGKTMLAKAVANHTTAAFIRVVGSEFVQKYLGEGPRMVRDVFRLAKENAPAIIFIDEVDAIATARFDAQTGADREVQRILMELLNQMDGFDQTVNVKVIMATNRADTLDPALLRPGRLDRKIEFPLPDRRQKRLVFQVCTAKMNLSDEVDLEDYVSRPDKISAAEIAAICQEAGMHAVRKNRYVILPKDFEKGYRTNVKKPDTDFEFYK

SEQ ID NO: 5189 - DNA, 1281 bp, Glycine max
  CDS (1)..(1281)
atggcaattgaacacgaagacgatctcaaagacgagaagaaccctcgacccctcgacgaggatgacatcgccctcctcaaaacctacggtttgggaccttattccacaagcataaaaaaggcggagaaggaaatcaaagatatggccaagaaagtgaatgacttatgtggtatcaaggagtctgatactggattagcagcaccaagccagtgggatcttgtttctgataagcaaatgatgcaggaagagcagcctcttcaggtggcacgatgcacaaagatcataaatccaaactctgaagatgccaaatatgttatcaatgtgaagcagatagcaaagtttgttgttgggctaggagacaaggtttcccccactgacattgaggaagggatgcgtgttggggttgatagaaacaaatatcagattcagattcctttgcctccaaaaattgatccaagtgtaaccatgatgacagttgaagagaagcctgatgtgacatataatgatgttggcggttgtaaggagcagattgaaaagatgcgagaagttgttgagcttcccatgctccacccagagaaattcgtcaagctaggaattgatcctccaaagggtgttctttgttatggtcccccagggactggcaaaacacttttagccagggctgtggctaataggactgatgcttgttttataagggttattggaagtgagctagttcagaaatatgttggtgagggggctaggatggttcgtgaactatttcagatggctcgttcaaagaaggcatgcattgtgttttttgatgaagttgatgcaattggaggtgcacgatttgatgatggtgttggtggtgacaatgaggttcagcgcaccatgcttgaaattgtgaatcagcttgatgggtttgatgctcggggaaacatcaaagttttgatggcaactaacaggcctgacactctagatcctgcactactacggcctgggcggttggaccgtaaagttgaattcggccttcctgacttagagagtaggactcagatattcaagatacacacaagaaccatgaactgcgaaagggatatccgatttgaacttctggctcggctttgcccaaattccactggagctgatataaggagtgtatgcacagaagccggtatgtatgctatccgtgcccggaggaagactgtaacagagaaagacttccttgatgcagtaaataaagtcatcaaaggataccagaagttcagtgcaactcccaagtatatggtctataactga

SEQ ID NO: 5190 - protein, 426 aa, Glycine max
MAIEHEDDLKDEKNPRPLDEDDIALLKTYGLGPYSTSIKKAEKEIKDMAKKVNDLCGIKESDTGLAAPSQWDLVSDKQMMQEEQPLQVARCTKIINPNSEDAKYVINVKQIAKFVVGLGDKVSPTDIEEGMRVGVDRNKYQIQIPLPPKIDPSVTMMTVEEKPDVTYNDVGGCKEQIEKMREVVELPMLHPEKFVKLGIDPPKGVLCYGPPGTGKTLLARAVANRTDACFIRVIGSELVQKYVGEGARMVRELFQMARSKKACIVFFDEVDAIGGARFDDGVGGDNEVQRTMLEIVNQLDGFDARGNIKVLMATNRPDTLDPALLRPGRLDRKVEFGLPDLESRTQIFKIHTRTMNCERDIRFELLARLCPNSTGADIRSVCTEAGMYAIRARRKTVTEKDFLDAVNKVIKGYQKFSATPKYMVYN

SEQ ID NO: 5191 - DNA, 1200 bp, Glycine max
  CDS (1)..(1200)
atgacggatgctgctgaagacgctacacgccgccgtaatgcggtggccgagtaccgcaagaagcttcttcaacacaaggaattggagtccagagtacgatccgtccgagagaatttgcgtgcctcaaagaaagagttcaacaaaactgaagatgatctgaagtctcttcaaagcgttggacagatcattggcgaagttcttaggcctctcgacaatgaacgcttgattgttaaggcaagcagcggacctaggtatgtggttggctgccgcagtaaagtagataaggaaaaactgactgctggtacgagagtcgttcttgatatgacgacgctcaccataatgcgggctcttccacgtgaagttgatccagtagtttacaatatgctgcatgaggatcctggtaatatcagttactctgctgttggtggcttatccgatcagataagggaattgagggagtcaattgaactgcctctgatgaatcctgagctcttccttcgagttggaattaaacctccaaagggtgttctcctttacgggcctcctggtactggtaaaacattgttagctagggcaattgcaagtaatatagatgcaaatttcctaaaggttgtttcaagtgccataattgataagtacattggagaaagtgccaggttaatcagagagatgtttggttatgcacgtgatcaccagccttgcatcatttttatggatgagatcgatgccattggtggtcgccgtttcagtgagggaacaagtgcagatcgtgagattcagagaacgctaatggagttgcttaatcaacttgatggatttgatcaacttggaaaggttaaaatgataatggcaacaaaccgtcctgatgtactggatcctgctcttctgcgtcctggaagattagatagaaaaatagaaatccctctgcctaatgaacaatcaaggatggaaattcttaagattcatgctgctggaattgccaagcatggtgaaatagactatgaagctgttgtgaagcttgcaaagggatttaatggggcggatcttccaaatgtgtgcacaaaaactggaatggcaccaattcgtccagagcgggattatgtgatccatgaaaattttatgaaggctgttaggaaactgaacgaggcaaaaaaacttgaatccagggcgcaccacagtgctgattttggtaaaaactaa

SEQ ID NO: 5192 - protein, 399 aa, Glycine max
MTDAAEDATRRRNAVAEYRKKLLQHKELESRVRSVRENLRASKKEFNKTEDDLKSLQSVGQIIGEVLRPLDNERLIVKASSGPRYVVGCRSKVDKEKLTAGTRVVLDMTTLTIMRALPREVDPVVYNMLHEDPGNISYSAVGGLSDQIRELRESIELPLMNPELFLRVGIKPPKGVLLYGPPGTGKTLLARAIASNIDANFLKVVSSAIIDKYIGESARLIREMFGYARDHQPCIIFMDEIDAIGGRRFSEGTSADREIQRTLMELLNQLDGFDQLGKVKMIMATNRPDVLDPALLRPGRLDRKIEIPLPNEQSRMEILKIHAAGIAKHGEIDYEAVVKLAKGFNGADLPNVCTKTGMAPIRPERDYVIHENFMKAVRKLNEAKKLESRAHHSADFGKN

SEQ ID NO: 5193 - DNA, 1272 bp, Glycine max
  CDS (1)..(1272)
atggcgagcgcgatggttgaggacgccaacttcgaagatgaccagctcgccaatatgaccaccgacgacgtcgtcagagcttctcgtcttctcgacaacgagattcgcatcctcaaagaagagttgcagaggaccaatttggagttggaatcgtacaaggacaagatcaaggagaatcaggagaagattaagctcaataagcagttgccctacctcgttgggaacatcgttgagatattggaaatgaacccagaagacgaagctgaagaagatggtgccaatattgatcttgactcacaaaggaagggaaagtgtgttgtgctaaagacttctactcgacagacaatctttctacctgttgttgggcttgttgaccctgacaagttaaaacctggtgatctggttggtgttaacaaggatagttacttaatcttggataccttgccttctgagtatgattctagagttaaggccatggaagttgatgaaaagccaaccgaggactacaatgacattggtggattagagaagcagattcaagaattagttgaagctattgttttgccaatgacctacaaggagcggttccaaaaattaggagttcgtccaccgaagggagtgctcttatatggacctccaggaactggaaaaacactaattgcccgtgcttgtgcagcacaaacaaatgccacttttctgaagttggcaggtccacagctggtccagatgtttataggagacggagcaaaacttgtccaggatgcctttcagctggcaaaagagaagtctccatgcattatatttatagatgaaattgatgcaattggaacaaagcgtttcgatagtgaagtaagtggagacagggaggtacagcgaacaatgttagaattgctcaatcaccttgatggttttagtagtgatgaccacattaaggtgattgcagcaacaaaccgtgctgacattcttgatcctgcccttatgcgttctggtcgattggatcgaaaaattgagttcccacacccaactgaagaagcaagagcccgaattctacagatccattctcggaaaatgaatgttcaccccgatgtcaactttgaagaattagctcggtccacagatgatttcaatgcagcacaacttaaagctgtctgtgttgaggctggcatgttggcccttcgccgtgatgcaactgaggtgaaccatgaggactttaatgaaggcatcatccaagtccaagcaaagaagaaagcaagcttgaattattatgcatag

SEQ ID NO: 5194 - protein, 423 aa, Glycine max
MASAMVEDANFEDDQLANMTTDDVVRASRLLDNEIRILKEELQRTNLELESYKDKIKENQEKIKLNKQLPYLVGNIVEILEMNPEDEAEEDGANIDLDSQRKGKCVVLKTSTRQTIFLPVVGLVDPDKLKPGDLVGVNKDSYLILDTLPSEYDSRVKAMEVDEKPTEDYNDIGGLEKQIQELVEAIVLPMTYKERFQKLGVRPPKGVLLYGPPGTGKTLIARACAAQTNATFLKLAGPQLVQMFIGDGAKLVQDAFQLAKEKSPCIIFIDEIDAIGTKRFDSEVSGDREVQRTMLELLNHLDGFSSDDHIKVIAATNRADILDPALMRSGRLDRKIEFPHPTEEARARILQIHSRKMNVHPDVNFEELARSTDDFNAAQLKAVCVEAGMLALRRDATEVNHEDFNEGIIQVQAKKKASLNYYA

SEQ ID NO: 5195 - DNA, 1200 bp, Glycine max
  CDS (1)..(1200)
atgacggatgctgctgaagacgctacacgccgccgtaatgcggtggccgagtaccgcaagaagcttcttcaacacaaggaattggagtccagagtacgatccgtccgagagaatttgcgtgcctcaaagaaagagttcaacaaaactgaagatgatctgaagtctcttcaaagcgttggacagatcattggcgaagttcttaggcctctcgacaatgaacgcttgattgttaaggcaagcagcggacctaggtatgtggttggctgccgcagtaaagtagataaggaaaaactgactgctggtacgagagtcgttcttgatatgacgacgctcaccataatgcgggctcttccacgtgaagttgatccagtagtttacaatatgctgcatgaggatcctggtaatatcagttactctgctgttggtggcttatccgatcagataagggaattgagggagtcaattgaactgcctctgatgaatcctgagctcttccttcgagttggaattaaacctccaaagggtgttctcctttacgggcctcctggtactggtaaaacattgttagctagggcaattgcaagtaatatagatgcaaatttcctaaaggttgtttcaagtgccataattgataagtacattggagaaagtgccaggttaatcagagagatgtttggttatgcacgtgatcaccagccttgcatcatttttatggatgagatcgatgccattggtggtcgccgtttcagtgagggaacaagtgcagatcgtgagattcagagaacgctaatggagttgcttaatcaacttgatggatttgatcaacttggaaaggttaaaatgataatggcaacaaaccgtcctgatgtactggatcctgctcttctgcgtcctggaagattagatagaaaaatagaaatccctctgcctaatgaacaatcaaggatggaaattcttaagattcatgctgctggaattgccaagcatggtgaaatagactatgaagctgttgtgaagcttgcggagggatttaatggggctgatcttcgaaatgtgtgcacagaagctggaatggcagcaattcgtgcagagcgtgattatgtgatccatgaagattttatgaaggctgttaggaaactgaacgaggcaaagaaacttgaatccagtgcgcactacagtgctgattttggtaaagactag

SEQ ID NO: 5196 - protein, 399 aa, Glycine max
MTDAAEDATRRRNAVAEYRKKLLQHKELESRVRSVRENLRASKKEFNKTEDDLKSLQSVGQIIGEVLRPLDNERLIVKASSGPRYVVGCRSKVDKEKLTAGTRVVLDMTTLTIMRALPREVDPVVYNMLHEDPGNISYSAVGGLSDQIRELRESIELPLMNPELFLRVGIKPPKGVLLYGPPGTGKTLLARAIASNIDANFLKVVSSAIIDKYIGESARLIREMFGYARDHQPCIIFMDEIDAIGGRRFSEGTSADREIQRTLMELLNQLDGFDQLGKVKMIMATNRPDVLDPALLRPGRLDRKIEIPLPNEQSRMEILKIHAAGIAKHGEIDYEAVVKLAEGFNGADLRNVCTEAGMAAIRAERDYVIHEDFMKAVRKLNEAKKLESSAHYSADFGKD

SEQ ID NO: 5197 - DNA, 1350 bp, Hordeum vulgare
  CDS (1)..(1350)
atggggcagggcacgccgggcggcatggacaagccgggcggagccccggacgaccgcaacaagacaggcggcgacggcgacaagaaggacaagaagttcgagccccccgccgcgccctcccgcgtcggccgcaagcagcgccgccagaaggggcccgaggcggccgcccgcctccccaacgtcgcgccgctctccaagtgccgcctccgcctcctcaagctcgaccgcgtcaaggactacctcctcatggaggaggagttcgtcgccgcgcaggagcgcctccgccccacagaggagaagacggaggaggaccgctccaaggtcgacgacctacgcggcacccccatgagcgtcggctccctcgaggagatcatcgacgagagccacgccatcgtctcctcctccgtcggcccagagtactacgtcggcatactctccttcgtcgacaaggaccagctcgagcccggctgctccatcctcatgcacaacaaggttctctctgtggttggaattctacaagacgaggttgatcctatggtgtctgtgatgaaagttgagaaagctccgctggaatcatatgcggacattggtgggttagatgctcagattcaagaaataaaagaggcggttgagcttccgctgacccaccctgagctatatgaagacattggaataaggccacccaagggggtcatattatatggagaacctggaacggggaaaactctacttgccaaggctgttgctaactccacatctgcaactttcttacgtgttgttggaagtgaacttattcagaagtaccttggcgacggtccaaaactagttagagaactatttagagttgcggatgagctttccccctcaatagtcttcatagatgagatcgatgcagttggaacaaagaggtatgacgctcattcaggaggggagcgtgagattcagagaactatgttggagctgctgaaccagctagatggttttgactcacgtggagatgttaaagttattctagctacaaatcgcattgaaagtcttgatccagccttgcttcgccctggcagaatagaccgaaagatagaattccctcttccagacattaagactaggcggcgcatcttccagatacacacggcaaagatgacattgtcagatgatgtgaacctggaagagttcgtcatgactaaggatgagttttctggtgctgacatcaaagcaatatgcaccgaatctggcttgcttgctttgagagagcgcaggatgaaggtgacacacgccgacttcaagaaggcaaaggagaaggtcatgttcaagaagaaggaaggtgtgccggaggggctttacatgtga

SEQ ID NO: 5198 - protein, 449 aa, Hordeum vulgare
MGQGTPGGMDKPGGAPDDRNKTGGDGDKKDKKFEPPAAPSRVGRKQRRQKGPEAAARLPNVAPLSKCRLRLLKLDRVKDYLLMEEEFVAAQERLRPTEEKTEEDRSKVDDLRGTPMSVGSLEEIIDESHAIVSSSVGPEYYVGILSFVDKDQLEPGCSILMHNKVLSVVGILQDEVDPMVSVMKVEKAPLESYADIGGLDAQIQEIKEAVELPLTHPELYEDIGIRPPKGVILYGEPGTGKTLLAKAVANSTSATFLRVVGSELIQKYLGDGPKLVRELFRVADELSPSIVFIDEIDAVGTKRYDAHSGGEREIQRTMLELLNQLDGFDSRGDVKVILATNRIESLDPALLRPGRIDRKIEFPLPDIKTRRRIFQIHTAKMTLSDDVNLEEFVMTKDEFSGADIKAICTESGLLALRERRMKVTHADFKKAKEKVMFKKKEGVPEGLYM

SEQ ID NO: 5199 - DNA, 1257 bp, Hordeum vulgare
  CDS (1)..(1257)
atggcgacggtggcgatggacatctcgaagcccccgccggccgcgtccggcgacgagtcggccaagggcgcgcgtggcggaggggaggggctgcggcagtactacctgcagcacatccacgacctgcagctccagatccgcaacaagacccacaacctcaaccgcctcgaggcccagcgcaacgacctcaactcccgagttagaatgctcagggaagagctacagctgctccaagaaccgggctcatatgttggcgaggtggtgaaggtcatgggcaaatcaaaggttctagtcaaggtgcatccagaaggcaaatatgtagtagatattgataaaagcatcgatattacaaaaataacaccttcaacaagagttgctcttcggaacgacagctacatgcttcatttggttctaccaagcaaagttgatccactggtcaaccttatgaaagttgagaaggtcccggattccacgtatgatatgattggaggtcttgatcagcaaatcaaggagatcaaagaggtcattgagcttcccatcaaacatcctgagctattcgagagcctcggaattgcccaaccaaagggcgtcctcctatacggaccaccagggacaggcaaaacattacttgctcgtgcagttgctcatcacaccgactgcaccttcatcagggtgtcaggttctgagttggttcagaagtatattggagagggttcccggatggtccgtgaactctttgtgatggctagggagcatgcaccatccattatattcatggatgaaatagactccattggatctgctagaatggagtcaggaaccggcaacggtgatagcgaagtgcaacggaccatgcttgagctgctaaaccaacttgatggttttgaagcatcaaacaaaattaaggttctgatggcaacaaacaggatagacatattggatcaagcccttctaaggcctggccgcatagacaggaagatcgaatttccaaatcctaatgaggattcacgaggtgacatcttgaagattcattcaaggaggatgaacttgatgcgtggaattgatctgaaaaagattgcgggaaagatgaatggcgcttcaggagctgagctaaaggcggtgtgcaccgaagccggaatgtttgctctccgcgagagaagggtgcacgtaacgcaggaggactttgagatggcggtggccaaggtgatgaagaaggacaatgagaagaacatgtccttgcggaagctgtggaagtga

SEQ ID NO: 5200 - protein, 418 aa, Hordeum vulgare
MATVAMDISKPPPAASGDESAKGARGGGEGLRQYYLQHIHDLQLQIRNKTHNLNRLEAQRNDLNSRVRMLREELQLLQEPGSYVGEVVKVMGKSKVLVKVHPEGKYVVDIDKSIDITKITPSTRVALRNDSYMLHLVLPSKVDPLVNLMKVEKVPDSTYDMIGGLDQQIKEIKEVIELPIKHPELFESLGIAQPKGVLLYGPPGTGKTLLARAVAHHTDCTFIRVSGSELVQKYIGEGSRMVRELFVMAREHAPSIIFMDEIDSIGSARMESGTGNGDSEVQRTMLELLNQLDGFEASNKIKVLMATNRIDILDQALLRPGRIDRKIEFPNPNEDSRGDILKIHSRRMNLMRGIDLKKIAGKMNGASGAELKAVCTEAGMFALRERRVHVTQEDFEMAVAKVMKKDNEKNMSLRKLWK

SEQ ID NO: 5201 - DNA, 1233 bp, Hordeum vulgare
  CDS (1)..(1233)
atgtcggccgcggccgtcgcgccgagcccgccggcggccccgccgtcctaccccgcggcgccctccgccccctccgctgaggatgacgacgacctctacggccgcctcaagtcgctgcagcgccacatggagttcgtcgagatccaggaggagtacgtcaaggacgagcagaagaaccttaagcgcgagctgctgcgcgcgcaggaggaggtcaagcggatccagtcggtgcccctcgtcatcggccagttcatggagatggtcgacggcaacaacggcatcgtcggatccaccaccggcagcaactactacgtgcgcatcctcagcaccatcaaccgcgagctgctcaagccctccgcctccgtcgccctgcaccgccactccaacgccctcgtcgacgtgctgccccccgaggccgactccagcatctcgctcctcgcctcctccgagaaacccaacgtcctatactcggacattggaggatgtgatatccaaaaacaagaaattcgcgaggcagttgagctaccattgacacaccatgaattgtacaagcagattggtattgatcctccaagaggggtgctgctctatggtcctccaggcactggcaagaccatgcttgctaaagctgtggcacatcacacaactgctgcttttatcagagtggttggttcagaatttgtgcagaagtacctgggtgagggcccaaggatgggtcgagatgtattccgcttagctaaagagaatgccccagctataataatcattgatgagggtgatgctatagccactgctcgattcgatgctcagaccggggctgaccgagaagttcagcgtattctgatggaactactgaatcagatggatggatttgatcagacagtgaatgtgaaggttataatggcaaccaatcgggcagatactctagatcctgctctgctgcgtccaggaagactggacaggaaaattgagttccctctgccggatcggaggcagaagaggcttgttttccaagtttgtactgctaagatgaacttgagtgatgaggttgatttggaagattatgtctccagacctgataaaatcagtgctgctgatatcactgctatttgccaggaagctggcatgcatgctgtccgcaaaaatcggtatgttatcctccccaaggacttcgagaagggttaccgaaccaacgtcaagaagcctgagtcagactttgacttctacaaatga

SEQ ID NO: 5202 - protein, 410 aa, Hordeum vulgare
MSAAAVAPSPPAAPPSYPAAPSAPSAEDDDDLYGRLKSLQRHMEFVEIQEEYVKDEQKNLKRELLRAQEEVKRIQSVPLVIGQFMEMVDGNNGIVGSTTGSNYYVRILSTINRELLKPSASVALHRHSNALVDVLPPEADSSISLLASSEKPNVLYSDIGGCDIQKQEIREAVELPLTHHELYKQIGIDPPRGVLLYGPPGTGKTMLAKAVAHHTTAAFIRVVGSEFVQKYLGEGPRMGRDVFRLAKENAPAIIIIDEGDAIATARFDAQTGADREVQRILMELLNQMDGFDQTVNVKVIMATNRADTLDPALLRPGRLDRKIEFPLPDRRQKRLVFQVCTAKMNLSDEVDLEDYVSRPDKISAADITAICQEAGMHAVRKNRYVILPKDFEKGYRTNVKKPESDFDFYK

SEQ ID NO: 5203 - DNA, 1281 bp, Hordeum vulgare
  CDS (1)..(1281)
atggcgccggagccagaagacgatctcatgagcgagaagaaccccaggcctctcgacgaggacgacatcgccctcctcaagacctacgggcttggaccctactcgaacagcatcaagaaggtcgagaaggatataaaggagatggccaagaagatcaacgacctgtgcgggataaaggagtctgatactggattggctccaccaagtcagtgggatcttgtatcagataaacagatgatgcaagaggagcagccactgcaggttgctagatgcacgaagattataagtcccaataccgatgatgccaaatatgtcatcaatgttaaacaaatcgcaaagtttgtggtcggcttaggtgataaagtttcccccactgatatcgaggaagggatgagagttggggttgatcgaaacaagtaccagatacaaatccctttgccacccaagattgatcctagtgttacaatgatgacagttgaagaaaagccggatgggacatataatgatgttggtggctgtaaggatcagattgagaagatgcgggaggttgtggagcttcctatgctccatcccgagaagtttgtcaagctgggtattgatcctccaaagggagtactttgctatggccctccaggaactggaaagacacttcttgccagggcagtggctaatcgcacagacgcatgttttatccgcgtgataggaagcgagttagttcagaagtatgttggtgaaggggcaaggatggttcgtgaactcttccagatggctcggtcaaagaaggcatgcattgtcttctttgacgaggttgatgccattggtggtgctcgctttgacgacggtgctggtggtgacaacgaggtccagcgcaccatgctcgagattgtcaatcagctggatggttttgatgcgagaggaaacatcaaggtcctcatggctaccaacaggcctgatacgttggacccggcactgttgcgtccagggcggctggacaggaaggtcgagtttggcttgcctgatctggagggccgcacccagatcttcaagatccacacccgcgcgatgaactgcgagcgggacatccggtttgagctgctggctcgcctctgccccaactccactggtgccgatatccggagtgtgtgcacagaggctggcatgtacgctatccgcgcgcggaggaaaactgtcacggagaaggatttcttggacgcagtcaacaaggtcattaaaggttatcaaaagttcagcgccacgccgaagtacatggtctataactag

SEQ ID NO: 5204 - protein, 426 aa, Hordeum vulgare
MAPEPEDDLMSEKNPRPLDEDDIALLKTYGLGPYSNSIKKVEKDIKEMAKKINDLCGIKESDTGLAPPSQWDLVSDKQMMQEEQPLQVARCTKIISPNTDDAKYVINVKQIAKFVVGLGDKVSPTDIEEGMRVGVDRNKYQIQIPLPPKIDPSVTMMTVEEKPDGTYNDVGGCKDQIEKMREVVELPMLHPEKFVKLGIDPPKGVLCYGPPGTGKTLLARAVANRTDACFIRVIGSELVQKYVGEGARMVRELFQMARSKKACIVFFDEVDAIGGARFDDGAGGDNEVQRTMLEIVNQLDGFDARGNIKVLMATNRPDTLDPALLRPGRLDRKVEFGLPDLEGRTQIFKIHTRAMNCERDIRFELLARLCPNSTGADIRSVCTEAGMYAIRARRKTVTEKDFLDAVNKVIKGYQKFSATPKYMVYN

SEQ ID NO: 5205 - DNA, 1281 bp, Hordeum vulgare
  CDS (1)..(1281)
atggcgccggagccggaggacgacatcatggcggagaagaacccgcgccccctcgacgaggacgacatcgccctcctcaagacctacgggcttgggccatactccacgagcatcaagacggccgagaaggagatcaaggagttggccaagaggatcaatgacctttgtgggataaaggagtctgatactgggctagctccacctagccagtgggatctagtgtcagacaaacagatgatgcaggaggagcagccactgcaagtagcaaggtgcaccaagattataaaccctaataccgacgatgccaaatacatgatcaatgtaaaacaaattgcaaagtttgttgttggattgggtgataaagtttccccaactgatattgaggaagggatgagagtcggtgttgatcggaacaagtaccagattcagattccgttgccaccgaagattgaccccagcgtcactatgatgacggttgaggagaaaccagatgtcacgtataatgatgttggcgggtgtaaggagcagattgaaaaaatgcgtgaggttgtcgagctccccatgcttcacccagagaagtttgtgaagcttggtattgatcctcctaaaggtgtcctttgctacggtcctcctggcactggcaagactcttcttgctagagctgttgccaataggacggatgcttgttttatccgtgttattggaagcgaattagttcagaagtatgttggtgaaggcgctcggatggttagggagttatttcagatggctcgctcgaagaaagcatgcatcatattcttcgatgaagttgatgccattggtggtgctcgctttgatgatggagctgggggcgataatgaggttcagcgtactatgcttgaaatcgtcaatcagcttgacggttttgatgctagggggaatatcaaggttctcatggccaccaacaggcctgatacactggaccctgcacttctacgtcctggtcgcctggaccgaaagatggaatttggcttacctgacttggaaggccgtacccagatattcaaaatacatacacgcacaatgaactgtgagcgtgatatccgattcgagctactggcgcgactctgccccaacgccaccggtgcggacatcaggagtgtctgcacagaagccggcatgtacgccatccgtgcccgcaggaagactgtgacggagaaggatttcctcgactcggtcaacaaggttatcaaggggtatcagaaattcagcgcaaccccgaaatacatggtgtacaattga

SEQ ID NO: 5206 - protein, 426 aa, Hordeum vulgare
MAPEPEDDIMAEKNPRPLDEDDIALLKTYGLGPYSTSIKTAEKEIKELAKRINDLCGIKESDTGLAPPSQWDLVSDKQMMQEEQPLQVARCTKIINPNTDDAKYMINVKQIAKFVVGLGDKVSPTDIEEGMRVGVDRNKYQIQIPLPPKIDPSVTMMTVEEKPDVTYNDVGGCKEQIEKMREVVELPMLHPEKFVKLGIDPPKGVLCYGPPGTGKTLLARAVANRTDACFIRVIGSELVQKYVGEGARMVRELFQMARSKKACIIFFDEVDAIGGARFDDGAGGDNEVQRTMLEIVNQLDGFDARGNIKVLMATNRPDTLDPALLRPGRLDRKMEFGLPDLEGRTQIFKIHTRTMNCERDIRFELLARLCPNATGADIRSVCTEAGMYAIRARRKTVTEKDFLDSVNKVIKGYQKFSATPKYMVYN

SEQ ID NO: 5207 - DNA, 1389 bp, Oryza sativa
  CDS (1)..(1389)
atggggcagggcaccccgggaggcatgggcaagcagggcggcgcccccggcgaccgcaagcctggcggcgacggcgacaagaaggaccgcaagttcgagccccccgccgccccctcccgcgtcggccgcaagcagcgcaagcagaagggccccgaggcggccgctcgcctccccaacgtcgcccctctctccaagtgccgcctccgcctcctcaagctcgagcgggtcaaggactacctcctcatggaggaggagttcgtcgccgcccaggagcgcctccgccccaccgaggacaagaccgaggaggaccgatccaaggtcgacgacctccgcggcacccccatgagcgtcggatccctcgaggagatcatcgacgagagccatgccatcgtctcctcctccgtcggccccgagtactacgtcggcatcctctccttcgtcgacaaggaccagctcgagcccggctgctccatcctcatgcacaacaagatggctgtcagatgccaatgcttgtataaggctgcttttcaggttctgtctgtggtcggaattttgcaagatgaagttgatcctatggtttctgtgatgaaagtggagaaagctccgctggaatcctatgctgacattggtgggctagatgcccagatccaagaaatcaaagaggcagttgagcttcctttgacccatcctgagctatatgaagacattggcatcaggccacccaagggagtcatattatacggagaacctggaacagggaagacactacttgccaaggctgttgctaactccacatccgcaactttcttgcgtgttgttggaagtgagcttattcaaaagtatcttggtgatggtcccaaactagtcagggaactgttcagagttgctgatgagctttctccctcaatagtctttatcgatgagattgatgctgttggaacaaagaggtacgatgctcattcaggaggggagcgtgagattcagagaactatgttggagcttcttaaccagttagatggttttgactctcgtggtgatgtcaaagttatactagcaacaaatcgcatcgaaagtcttgatccagcattgctacgccctggtcgcatagatcggaagatagaatttcctctgccagatattaaaactaggcggcgcatcttccagatacacacatctaagatgacattggcagatgatgttaacctagaagagtttgtgatgaccaaggatgagttttctggtgctgacatcaaagcaatatgtacggaggccggattgctcgctttaagggagcgcagaatgaaggtgacacatgccgatttcaagaaggccaaaaagaaggtcatgttcaagaagaaggaaggtgtaccggaagggctttatatgtga

SEQ ID NO: 5208 - protein, 462 aa, Oryza sativa
MGQGTPGGMGKQGGAPGDRKPGGDGDKKDRKFEPPAAPSRVGRKQRKQKGPEAAARLPNVAPLSKCRLRLLKLERVKDYLLMEEEFVAAQERLRPTEDKTEEDRSKVDDLRGTPMSVGSLEEIIDESHAIVSSSVGPEYYVGILSFVDKDQLEPGCSILMHNKMAVRCQCLYKAAFQVLSVVGILQDEVDPMVSVMKVEKAPLESYADIGGLDAQIQEIKEAVELPLTHPELYEDIGIRPPKGVILYGEPGTGKTLLAKAVANSTSATFLRVVGSELIQKYLGDGPKLVRELFRVADELSPSIVFIDEIDAVGTKRYDAHSGGEREIQRTMLELLNQLDGFDSRGDVKVILATNRIESLDPALLRPGRIDRKIEFPLPDIKTRRRIFQIHTSKMTLADDVNLEEFVMTKDEFSGADIKAICTEAGLLALRERRMKVTHADFKKAKKKVMFKKKEGVPEGLYM

SEQ ID NO: 5209 - DNA, 1290 bp, Oryza sativa
  CDS (1)..(1290)
atgacgtcatccggcgctcccccgccggcggcgatggccgtggacgacgcggaggacgaccagctcgcctccatgtccacggaggacatcgtccgtgcctcccgcctactcgacaacgagatccgcgtcctcaaggatgagctgcagaggaccaacttggagctggaatcgttcaaggagaagattaacgagaaccaggagaagattaagctcaacaaccagcttccctacctcgtcggcaacatcgttgagattctggaaatgaaccctgaggatgaagctgaggaggatggtgctaatattgatttagactcacaaaggaaaggaaaatgtgttgttctgaagacttccacaagacaaactatattccttcctgtggttgggctagttgaccctgataaactcaagcctggtgatttggttggagtaaacaaagacagctaccttatactggacacactgccatcagagtatgattcacgagtaaaggcaatggaggtggatgaaaaacccacagaggactacaatgatattggaggtcttgaaaagcagattcaagagcttgtggaggcaattgttttgccaatgacacacaaagatcggttccaaaagttgggcattcgcccccccaaaggagttcttttgtatggaccacctggaactgggaaaacattgatggctcgtgcatgtgctgcacagacaaatgcaacgttcctgaaattagctggtccacaattagtccagatgtttatcggtgatggagcaaagctggttcgggatgcttttcagcttgctaaggagaaagctccctgcatcattttcattgatgagattgatgccattgggactaagaggtttgacagtgaggttagtggtgacagagaagttcagaggactatgttggaattgctgaaccaactcgatggatttagtagtgacgagcggataaaggtcatagcggcaacgaatcgtgctgacattcttgatcctgctttgatgcgatctggtcgtttggaccgaaagattgagtttcctcatccatctgaagaagcaagagctagaatcttgcaaattcactcaagaaaaatgaatgtaaacccagatgtgaattttgaagagctggctcgctcaacagatgacttcaatggagcgcaactgaaagctgtttgtgtcgaagctggtatgcttgcactgcggcgagatgctacagaggtgactcatgaggacttcaacgaaggcataatacaggtgcaggctaagaagaagtctagcctaaattattacgcttaa

SEQ ID NO: 5210 - protein, 429 aa, Oryza sativa
MTSSGAPPPAAMAVDDAEDDQLASMSTEDIVRASRLLDNEIRVLKDELQRTNLELESFKEKINENQEKIKLNNQLPYLVGNIVEILEMNPEDEAEEDGANIDLDSQRKGKCVVLKTSTRQTIFLPVVGLVDPDKLKPGDLVGVNKDSYLILDTLPSEYDSRVKAMEVDEKPTEDYNDIGGLEKQIQELVEAIVLPMTHKDRFQKLGIRPPKGVLLYGPPGTGKTLMARACAAQTNATFLKLAGPQLVQMFIGDGAKLVRDAFQLAKEKAPCIIFIDEIDAIGTKRFDSEVSGDREVQRTMLELLNQLDGFSSDERIKVIAATNRADILDPALMRSGRLDRKIEFPHPSEEARARILQIHSRKMNVNPDVNFEELARSTDDFNGAQLKAVCVEAGMLALRRDATEVTHEDFNEGIIQVQAKKKSSLNYYA

SEQ ID NO: 5211 - DNA, 1155 bp, Oryza sativa
  CDS (1)..(1155)
atggccacggtggcgatggacatctccaagccccctcccgcggcgggcggcgacgaggctgcggcggcgaaggggaggggcggcgccggaggaggagttagaatgctcagggaagagctgcagttgcttcaagaacctggctcgtatgttggtgaggtggtgaaggtcatgggtaaatcaaaggttctagtgaaggtacatccagaaggcaaatatgtggtggatattgataaaagcattgatattacaaagatcacaccttcaacaagagttgctcttcgaaatgatagctatatgcttcatttgatcctgccaagcaaagttgatccgttggtcaatcttatgaaagttgagaaggttcctgattctacttatgatatgattggaggtcttgatcagcaaatcaaagagatcaaagaggtcattgaacttcctatcaaacatccagagctatttgagagtcttggaattgcccaaccaaagggtgtccttctctatggccctccaggcacaggaaaaacattgttggcacgtgcagttgctcatcacactgactgcaccttcatcagggtgtctggttccgagttagttcagaagtacattggtgagggttctcggatggtccgtgaactctttgttatggccagggaacatgcaccatccattattttcatggatgaaatagactccattggatctgctaggatggagtctggaactggcaacggtgacagtgaagtccagcgaaccatgcttgagcttctgaaccaacttgatggttttgaagcatcaaacaaaataaaggttctgatggcaacaaataggatagacatcttggatcaggcccttctgaggcctggtcgcatagacaggaaaattgaatttcctaatcctaatgaggattcacgctttgatatcttgaagattcattcaagaaaaatgaacttgatgcgtggtattgatctgaaaaagatcgctgaaaagatgaatggggcttcaggagccgagctcaaggcggtctgcacagaagctggaatgtttgctcttcgtgagagaagggtgcatgtaacacaagaggactttgagatggcagtggcgaaggtgatgaagaaagacacggaaaagaacatgtccctacggaagctctggaagtga

SEQ ID NO: 5212 - protein, 384 aa, Oryza sativa
MATVAMDISKPPPAAGGDEAAAAKGRGGAGGGVRMLREELQLLQEPGSYVGEVVKVMGKSKVLVKVHPEGKYVVDIDKSIDITKITPSTRVALRNDSYMLHLILPSKVDPLVNLMKVEKVPDSTYDMIGGLDQQIKEIKEVIELPIKHPELFESLGIAQPKGVLLYGPPGTGKTLLARAVAHHTDCTFIRVSGSELVQKYIGEGSRMVRELFVMAREHAPSIIFMDEIDSIGSARMESGTGNGDSEVQRTMLELLNQLDGFEASNKIKVLMATNRIDILDQALLRPGRIDRKIEFPNPNEDSRFDILKIHSRKMNLMRGIDLKKIAEKMNGASGAELKAVCTEAGMFALRERRVHVTQEDFEMAVAKVMKKDTEKNMSLRKLWK

SEQ ID NO: 5213 - DNA, 1341 bp, Zea mays
  CDS (1)..(1341)
atgggacaaggttctcccggcgggatgggcaagcagcccggcctcccgggcgaccgcaagcagggagacggcaagaaagagaagaaatatgaaccacccgctgccccttcccgtgtcggccggaagcagaagcggcagaagggctccgaggcggcggcgcggctccccgccgtggcgccgctctcaaagtgccgccttcgcctactcaagctcgaacgcgtcaaggactaccttctcatggaagaggagttcgttgccagccaggagcgcctgcgccccagcgaggataagacggaggaggaccgatccaaggtcgacgacctccgcggcactcccatgaacgtcggatcgctggaggagatcatcgacgagagccatgccatcgtctcctcgtccgtcggtcccgagtactacgtcgggatactttccttcgttgataaggaccagctcgagcctggatgtgccattctgatgcacaacaaggttctgtcagtggttggtattttgcaagacgaagttgatcctatggtttctgtgatgaaagttgaaaaggcacctttggagtcttatgctgacattggtggcttggatgctcaaattcaagaaatcaaagaagcagttgagcttcccttgacacatcctgagctgtatgaagacattgggatcaggccacccaagggagtcatattatatggcgaacctggaacaggaaaaactctactcgccaaggctgttgccaattcaacatctgcgactttcttgcgtgttgtcggtagtgaacttattcaaaagtaccttggggatggtcccaagctagtcagagaattgtttagggtggctgatgaactttctccctcaatagtcttcattgatgagattgacgcagttggaacgaagaggtatgatgctcattcaggaggggagcgtgagattcaaagaactatgttggagctgctgaatcagctagatggttttgactcacgtggagatgttaaagtcattctagcaacaaaccgcattgaaagtcttgatccagccttgcttcggccaggccgtatagaccggaagattgaatttcctctaccagatattaaaactagacgacgcatcttccagatacacacatcgaaaatgacattagctgatgatgtaaacttggaagagtttattatgtcaaaagatgagttttcaggtgctgacatcaaggccatttgtactgaagctggcttgcttgctttgagagaacggcgaatgaaggtgacgcatgcagacttcaagaaggccaaagaaaaggttatgttcaagaagaaagaaggcgtgccggagggcctatatatgtga

SEQ ID NO: 5214 - protein, 446 aa, Zea mays
MGQGSPGGMGKQPGLPGDRKQGDGKKEKKYEPPAAPSRVGRKQKRQKGSEAAARLPAVAPLSKCRLRLLKLERVKDYLLMEEEFVASQERLRPSEDKTEEDRSKVDDLRGTPMNVGSLEEIIDESHAIVSSSVGPEYYVGILSFVDKDQLEPGCAILMHNKVLSVVGILQDEVDPMVSVMKVEKAPLESYADIGGLDAQIQEIKEAVELPLTHPELYEDIGIRPPKGVILYGEPGTGKTLLAKAVANSTSATFLRVVGSELIQKYLGDGPKLVRELFRVADELSPSIVFIDEIDAVGTKRYDAHSGGEREIQRTMLELLNQLDGFDSRGDVKVILATNRIESLDPALLRPGRIDRKIEFPLPDIKTRRRIFQIHTSKMTLADDVNLEEFIMSKDEFSGADIKAICTEAGLLALRERRMKVTHADFKKAKEKVMFKKKEGVPEGLYM

SEQ ID NO: 5215 - DNA, 1263 bp, Zea mays
  CDS (1)..(1263)
atgtcggccgccacaaccgccccaacccctgcggtggccaccccgatggcgccgcctccgtcgtacccggcctcctccacgatctccgcctccgtggccgcgtcggtcgaggaagaggacgacctctatggccgcctcaagtcgctccagcgccacatggagttcgtcgagatccaggaggagtacgttaaagacgaacagaagaacctcaagcgcgaactcctccgtgcgcaggaggaggtcaagcggatccagtccgtaccgctcgtcatcggccagtttatggagatggtcgacggcaacaacggcatcgtgggttctactacgggcagcaactactatgtgcggatcctcagcaccatcaaccgcgagctgctcaagccgtcagcatctgtcgcgttgcatcgtcactccaacgctttagtcgacgtgctgccgcccgaggccgactccagcatctccttgctgggatcgtcggagaagcccaacgtcacctacaacgatattggaggatgcgacatccaaaagcaagaaatacgggaggcggttgagttacccttgactcatcatgagttgtacaagcagattggtattgatcctccaagaggggtgcttctgtatggtcctccgggtactggcaagaccatgcttgccaaagcagtcgcacatcataccactgctgcttttatcagggtcgtcggttcagagtttgttcaaaagtacttgggtgagggccctagaatggtgcgtgacgtgttccgtttggccaaggagaatgccccagcaatcattttcattgatgaggttgatgctatagccactgctcgttttgatgctcagactggtgctgaccgagaagttcagcgtattcttatggagctactcaatcagatggatgggtttgatcaaacagtcaatgtgaaggttataatggcaactaatcgggcagacactctagatcctgctttgttgcgtcctggtagacttgacaggaaaattgagttccctctgccagaccggcgtcagaagaggcttgtttttcaagtttgcactgccaaaatgaacctgagcgatgaggttgatttggaagattatgtttccagaccggataagatcagtgctgctgatattgctgctatctgccaagaggctggcatgcatgctgtccgcaaaaaccgatatgtcatcctccccaaggactttgaaaagggctaccgaaccaacgtgaagaagcccgagacagactttgatttctacaaatga

SEQ ID NO: 5216 - protein, 420 aa, Zea mays
MSAATTAPTPAVATPMAPPPSYPASSTISASVAASVEEEDDLYGRLKSLQRHMEFVEIQEEYVKDEQKNLKRELLRAQEEVKRIQSVPLVIGQFMEMVDGNNGIVGSTTGSNYYVRILSTINRELLKPSASVALHRHSNALVDVLPPEADSSISLLGSSEKPNVTYNDIGGCDIQKQEIREAVELPLTHHELYKQIGIDPPRGVLLYGPPGTGKTMLAKAVAHHTTAAFIRVVGSEFVQKYLGEGPRMVRDVFRLAKENAPAIIFIDEVDAIATARFDAQTGADREVQRILMELLNQMDGFDQTVNVKVIMATNRADTLDPALLRPGRLDRKIEFPLPDRRQKRLVFQVCTAKMNLSDEVDLEDYVSRPDKISAADIAAICQEAGMHAVRKNRYVILPKDFEKGYRTNVKKPETDFDFYK

SEQ ID NO: 5217 - DNA, 1350 bp, Triticum aestivum
  CDS (1)..(1350)
atggggcagggcacgccgggcggcatgggcaagcagggcggcgccccgggcgaccgcggcaagccgggcggcgacggcgacaagaaggacaagaagttcgagccgcccgccgcgccgtcccgggtcggccgcaagcagcgccgccagaaggggcccgaggcggccgcccgcctccccggcgtcgcgccgctctccaagtgccgcctccgcctcctcaagctcgaccgcgtcaaggactacctcctcatggaggaggagttcgtcgccgcgcaggagcgcctccgccccaccgaggagaagacggaggaggaccgctccaaggtcgacgacctccgcggcacccccatgagcgtcggctccctcgaggagatcatcgacgagagccacgccatcgtctcctcctccgtcggccccgagtactacgtcggcatactctccttcgtcgacaaggaccagctcgagccaggctgctccatcctcatgcacaacaaggttctttctgtggttggaattctgcaagacgaagttgaccctatggtatctgtgatgaaagttgagaaagctccgctggaatcatatgcggacattggtgggttagatgctcagattcaagaaataaaagaggcggttgagcttccactaacccaccccgagttatatgaagacattggaataaggccacccaagggggtcatattatatggagaaccgggaacagggaaaactctacttgccaaggctgttgctaactccacatctgcaactttcttacgtgtcgttggaagtgaacttattcagaagtaccttggcgacggtccaaaactagttagagaactatttagagtggcggatgagctttccccctcgatagtcttcatcgatgagatcgatgcagttggaacaaagaggtatgatgctcattcaggaggggagcgtgagattcaaagaactatgttggagctgctgaaccagctagatggttttgactcgcgtggagatgttaaagttattctagctacaaatcgcattgaaagtcttgatccagccttgcttcgccctggccgaatagaccgaaagatagaattccctcttccagacattaagactaggcggcgcatcttccagatacacacggcgaagatgacattgtcagatgatgtgaacctggaagagtttgtcatgactaaggatgagttttctggtgctgacatcaaagcaatatgcaccgaatctggcttgcttgctttgagagagcgtaggatgaaggtgacgcacgccgacttcaagaaggcaaaggagaaggtcatgttcaagaagaaggaaggcgtgccggaggggctttacatgtga

SEQ ID NO: 5218 - protein, 449 aa, Triticum aestivum
MGQGTPGGMGKQGGAPGDRGKPGGDGDKKDKKFEPPAAPSRVGRKQRRQKGPEAAARLPGVAPLSKCRLRLLKLDRVKDYLLMEEEFVAAQERLRPTEEKTEEDRSKVDDLRGTPMSVGSLEEIIDESHAIVSSSVGPEYYVGILSFVDKDQLEPGCSILMHNKVLSVVGILQDEVDPMVSVMKVEKAPLESYADIGGLDAQIQEIKEAVELPLTHPELYEDIGIRPPKGVILYGEPGTGKTLLAKAVANSTSATFLRVVGSELIQKYLGDGPKLVRELFRVADELSPSIVFIDEIDAVGTKRYDAHSGGEREIQRTMLELLNQLDGFDSRGDVKVILATNRIESLDPALLRPGRIDRKIEFPLPDIKTRRRIFQIHTAKMTLSDDVNLEEFVMTKDEFSGADIKAICTESGLLALRERRMKVTHADFKKAKEKVMFKKKEGVPEGLYM

SEQ ID NO: 5219 - DNA, 1257 bp, Triticum aestivum
  CDS (1)..(1257)
atggcgacggtggcgatggacatctcgaagcccccgccggccgcgtccggcgacgagtcggccaagggcgcgcgtggcggaggcgaggggttgcgccagtactacctgcagcacatccacgacctgcagctccagatccgccagaagacgcacaacctcaaccgcctcgaggcccagcgcaacgacctcaactcccgagttagaatgcttagggaagagctacagttactccaagagcctggctcttatgttggtgaggtggtgaaggtcatgggcaaatcaaaggttctagttaaggtgcatccagaaggcaaatatgtagtagatattgataagagcatcgatatcacaaaaatcacaccttcaacaagagttgctcttcggaatgatagctatatgcttcatttggtccttccaagcaaagttgatccactggtcaatcttatgaaagttgagaaggtcccagattctacatatgatatgattggaggtcttgatcagcaaatcaaggagatcaaagaggtcatcgagcttcctatcaaacatcctgagttatttgagagccttggaattgcgcagccaaagggtgtcctcctttatggaccaccagggacaggcaaaacattactggcacgtgcagttgctcatcacaccgactgtaccttcatcagggtatctggttctgagttggttcagaagtatattggtgagggctcccggatggttcgtgaactctttgttatggctagggagcatgcaccatctattatattcatggatgaaatagactccattggatctgctagaatggagtctggaactggcaatggtgatagtgaagtgcaacggaccatgcttgagcttctaaaccaacttgatggttttgaagcatcaaacaaaattaaggttctgatggcaacaaaccgcatagacatcttggatcaagcccttttgaggcctggccgcatagacaggaagattgaatttccaaatcctaatgaggattcacgaggtgatatcttgaagattcattcaagaaggatgaacttgatgcgtggaattgatctgaaaaagattgcgggaaagatgaatggcgcttccggagctgagctaaaggcggtctgcaccgaagccggaatgtttgctctccgtgagagaagggtgcacgtaacgcaggaggacttcgagatggcggtggccaaggtgatgaagaaggacaatgagaagaacatgtccttgcggaagctgtggaagtga

SEQ ID NO: 5220 - protein, 418 aa, Triticum aestivum
MATVAMDISKPPPAASGDESAKGARGGGEGLRQYYLQHIHDLQLQIRQKTHNLNRLEAQRNDLNSRVRMLREELQLLQEPGSYVGEVVKVMGKSKVLVKVHPEGKYVVDIDKSIDITKITPSTRVALRNDSYMLHLVLPSKVDPLVNLMKVEKVPDSTYDMIGGLDQQIKEIKEVIELPIKHPELFESLGIAQPKGVLLYGPPGTGKTLLARAVAHHTDCTFIRVSGSELVQKYIGEGSRMVRELFVMAREHAPSIIFMDEIDSIGSARMESGTGNGDSEVQRTMLELLNQLDGFEASNKIKVLMATNRIDILDQALLRPGRIDRKIEFPNPNEDSRGDILKIHSRRMNLMRGIDLKKIAGKMNGASGAELKAVCTEAGMFALRERRVHVTQEDFEMAVAKVMKKDNEKNMSLRKLWK

SEQ ID NO: 5221 - DNA, 1257 bp, Triticum aestivum
  CDS (1)..(1257)
atggcgaccgcagcaaaccctcccgcggccctcccgtcggcgcccccgccctcctaccccgccaccgccgcccactgcgcctcctcctcctccgccgcggccgaggacgacgacgacctctacggccgcctcaaatcgctccagcgccacatggagttcgtcgagatccaggaggagtacgtcaaggacgagcagaagaacctgaagcgcgagctgctgcgcgcgcaggaggaggtcaagcggatccagtccgtgcccctcgtcatcggccagttcatggagatggtcgacggcaacaacggcatcgtcggatccaccaccggcagcaactactacgtgcggatcctcagcaccatcaaccgcgagctgctcaagccgtcggcgtccgtcgccctgcaccgccactccaacgcgctcgtcgacgtgctgccgcccgaggccgactccagcatctcgctgctcgcttcgtcggagaagcccaacgtcctatattcggacattggaggatgtgatattcaaaaacaagaaattcgggaggcagttgagctaccattgacacaccatgagttgtacaagcagattggtattgatcctccaagaggggtgctgctctatggtcctccaggcactggcaagaccatgcttgctaaagctgtggcacatcacactactgctgcttttatcagagtggttggttcagagtttgtgcagaagtacttgggtgagggcccaaggatggttcgagatgtattccgcttagctaaagagaatgccccggctataatattcattgatgaggttgatgctatagccactgctcgattcgatgctcagaccggggctgaccgagaagttcagcgtattctgatggagctactgaatcagatggatggatttgatcaaacagtgaatgtgaaggttataatggcaaccaatcgggcagatactctagatcctgctctgttgcgtccaggaagactggacaggaaaatcgagttccccctgccggaccggaggcagaagaggcttgttttccaagtttgtactgctaagatgaacttgagtgacgaggttgatttggaagattatgtctccagacctgataaaatcagtgctgctgatatcactgctatttgccaggaagctggcatgcatgctgtccgcaaaaatcgctatgttatcctccccaaggacttcgagaagggttaccgaaccaacgtcaagaagcctgagacagactttgacttctacaaatga

SEQ ID NO: 5222 - protein, 418 aa, Triticum aestivum
MATAANPPAALPSAPPPSYPATAAHCASSSSAAAEDDDDLYGRLKSLQRHMEFVEIQEEYVKDEQKNLKRELLRAQEEVKRIQSVPLVIGQFMEMVDGNNGIVGSTTGSNYYVRILSTINRELLKPSASVALHRHSNALVDVLPPEADSSISLLASSEKPNVLYSDIGGCDIQKQEIREAVELPLTHHELYKQIGIDPPRGVLLYGPPGTGKTMLAKAVAHHTTAAFIRVVGSEFVQKYLGEGPRMVRDVFRLAKENAPAIIFIDEVDAIATARFDAQTGADREVQRILMELLNQMDGFDQTVNVKVIMATNRADTLDPALLRPGRLDRKIEFPLPDRRQKRLVFQVCTAKMNLSDEVDLEDYVSRPDKISAADITAICQEAGMHAVRKNRYVILPKDFEKGYRTNVKKPETDFDFYK

SEQ ID NO: 5223 - DNA, 1305 bp, Triticum aestivum
  CDS (1)..(1305)
atgtcgtcctcccctacccccgcgccagacgccggcgccgccgcgatggccgtcgacgactcgtcggagaccgaccagctcgactccatgtccacggaggacatcgtccgggccacccgcctcctcgacaacgaggtccgcgtcctcaaggacgagctgcagcggaacaacctggagctcgagaacgtcaaggacaagatcaaggagaaccaggagaagataaagctcaacaagcagctgccctacctcgtcggcaacatcgtcgagattttggaaatgaaccctgaagatgaggctgaagaggatggtgctaatatagatctggactcacagaggaaaggaaaatgtgttgttcttaagacatccacaagacagactatattccttcctgtgatcgggctagttgaccctgacaacctcaagcctggtgatttggttggagtcaacaaggacagctacttgatattagacacgctaccttcggagtatgactctcgagtaaaggcaatggaggtagatgaaaagcctacggaggattataatgacattggtggccttgagaaagagattcaggaactcgttgaagctatagtgttgccaatgacacacaaggagcaatttcagaagttgggaatccgtcccccgaaaggagttcttttatatggaccacctgggacgggaaagacattgatggctcgtgcatgtgctgcacaaaccaatgcaacctttctgaaacttgctggtccgcagctagtccagatgttcatcggtgacggggcaaagcttgtccgagatgcctttgagctggcaaaggagaaggccccctgcatcatttttattgatgagattgatgcaattggaacaaagcgttttgacagtgaagtgagtggtgacagagaagtgcaacgaactatgttggagttgctgaatcagctagatggatttagcagtgatgagaggataaaggtgatagctgcaaccaatcgtgcagatattctcgatcctgctttactccgttctggtcgcctggacagaaagattgagttccctcatccgacggaagaagcaagagctcggattttgcaaattcactcaagaaagatgaacgtacatcctgatgtcaactttgaggagctggctcgttcaactgatgatttcaacggtgcacagctgaaggctgtttgtgtggaagctggcatgcttgctctacgcagggacgctacagaggtgatccatgaagatttcaacgaaggcattatccaagtgcaagcaaagaagaagtccagcttgaattattacgcttag

SEQ ID NO: 5224 - protein, 434 aa, Triticum aestivum
MSSSPTPAPDAGAAAMAVDDSSETDQLDSMSTEDIVRATRLLDNEVRVLKDELQRNNLELENVKDKIKENQEKIKLNKQLPYLVGNIVEILEMNPEDEAEEDGANIDLDSQRKGKCVVLKTSTRQTIFLPVIGLVDPDNLKPGDLVGVNKDSYLILDTLPSEYDSRVKAMEVDEKPTEDYNDIGGLEKEIQELVEAIVLPMTHKEQFQKLGIRPPKGVLLYGPPGTGKTLMARACAAQTNATFLKLAGPQLVQMFIGDGAKLVRDAFELAKEKAPCIIFIDEIDAIGTKRFDSEVSGDREVQRTMLELLNQLDGFSSDERIKVIAATNRADILDPALLRSGRLDRKIEFPHPTEEARARILQIHSRKMNVHPDVNFEELARSTDDFNGAQLKAVCVEAGMLALRRDATEVIHEDFNEGIIQVQAKKKSSLNYYA

SEQ ID NO: 5225 - DNA, 1281 bp, Triticum aestivum
  CDS (1)..(1281)
atggcgccggagccggaggacgacatcatggcggagaagaacccgcgccccctcgacgaggacgacatcgccctccttaagacctacgggcttgggccatactccacgagcatcaagacggccgagaaggagatcaaggagttggccaagaggatcaatgacctatgtgggataaaggagtctgatactgggctggctccacctagccagtgggatctggtgtcagacaaacagatgatgcaagaagagcagccattacaagtagcaaggtgcaccaagattataaaccctaataccgacgatgccaagtacatgattaatgtaaaacaaattgcaaagtttgtggttggattgggggataaagtttcgccaactgatatcgaggaagggatgagagtcggtgtcgatcggaacaagtatcagatacagattccattgccaccaaagattgatcccagcgtcaccatgatgactgttgaggaaaaaccagatgtcacgtataatgatgttggcgggtgcaaggagcagattgaaaaaatgcgtgaggtagtcgagctccccatgcttcacccggaaaagtttgtgaagcttggtatcgaccctccgaaaggtgtcctttgctacggtcctcctggcactggcaagactcttcttgctagagctgttgctaatcgcacggatgcttgtttcatccgtgtaattggtagtgaattagttcagaagtatgttggtgagggcgctcggatggttagggagttatttcagatggctcggtcgaagaaagcatgcatcatattcttcgatgaagttgatgcaattggtggtgctcgttttgatgatggagctgggggcgataacgaagtacagcgtactatgcttgaaatcgtcaatcagcttgatggttttgatgctagggggaatatcaaggttctcatggccaccaacaggcctgatacacttgatcctgcacttctgcgtcctggtcgtttggacagaaaggtggaatttgggttacctgacttggaaggccgtacccagatattcaaaatacatacgcgcaccatgaactgtgagcgtgatatacgcttcgagctactggcgcgactctgccccaacgccactggcgccgacatcaggagtgtctgcacagaagctggcatgtacgccatccgcgcccgcaggaagactgtgactgaaaaggatttcctcgactcggtcaacaaggtcatcaaggggtaccagaaattcagcgcaaccccaaaatacatggtgtacaattga

SEQ ID NO: 5226 - protein, 426 aa, Triticum aestivum
MAPEPEDDIMAEKNPRPLDEDDIALLKTYGLGPYSTSIKTAEKEIKELAKRINDLCGIKESDTGLAPPSQWDLVSDKQMMQEEQPLQVARCTKIINPNTDDAKYMINVKQIAKFVVGLGDKVSPTDIEEGMRVGVDRNKYQIQIPLPPKIDPSVTMMTVEEKPDVTYNDVGGCKEQIEKMREVVELPMLHPEKFVKLGIDPPKGVLCYGPPGTGKTLLARAVANRTDACFIRVIGSELVQKYVGEGARMVRELFQMARSKKACIIFFDEVDAIGGARFDDGAGGDNEVQRTMLEIVNQLDGFDARGNIKVLMATNRPDTLDPALLRPGRLDRKVEFGLPDLEGRTQIFKIHTRTMNCERDIRFELLARLCPNATGADIRSVCTEAGMYAIRARRKTVTEKDFLDSVNKVIKGYQKFSATPKYMVYN

SEQ ID NO: 5227 - DNA, 1353 bp, Triticum aestivum
  CDS (1)..(1353)
atggggcagggttctccaggcggcatgggcaagcagggcggtctccccggtgaccgcaagccgggcgacggtgccgccggcgacaagaaggacaagaagttcgagccccccgccgcaccgtcgcgcgtggggcgcaagcagcggaaacagaggggccccgaggcggcggcgcggctgccccccgtggcgccgctctccaagtgccgcctccgccttctcaagctggaccgcgtcaaggactaccttctcatggaggaggagttcgtcgcgagccaggagcggctgcgccccagcgaagacaagacggaggaggaccgatctaaggtcgacgacctccgcggcacccctatgagcgttggctcgctcgaggagatcatcgacgagagccacgccatcgtctcgtcctccgttgggcctgagtactatgtcagcgtactctcgttcgtcgacaaggaccagctggagccgggatgctccatactgatgcataacaaggttctctcggtggttggaattttgcaagatgaagttgatcctatggtttctgtcatgaaagttgagaaggcacctttggagtcttatgctgacattggtggtttggatgcccaaattcaagagatcaaagaggcagtggaacttccgttgacacatcctgagctatatgaggacattgggatcaggcctccgaagggagtcatactatacggggaacctggaacagggaaaactctacttgcaaaggctgttgccaattctacatcagcaacattcttgcgtgttgttgggagtgagttgatccagaagtaccttggtgacggccccaagcttgtaagagaactgtttagggtggctgatgatctgtctccttcaattgtcttcattgatgagattgatgcagttggaacaaagaggtatgatgctcattcaggtggtgagcgtgagattcagagaaccatgttggagttgttaaatcagctcgatggttttgattcaagaggagatgtaaaggttattctagcgacaaaccgcattgagagccttgacccagccttgcttcgaccaggccgaatagacagaaagattgaatttccattaccagatattaaaacacgacggcgtatctttcagatacacactgctaagatgacattggcagaagatgtgaacctagaagagtttgtgatgaccaaagatgagttttctggtgctgatatcaaagccatttgtactgaagctggattgcttgccttaagagagcgcaggatgaaggtgacacatgctgacttcaagaaggccaaagagaaggtaatgttcaagaagaaggaaggtgtaccggaggggctgtacatgtga

SEQ ID NO: 5228 - protein, 450 aa, Triticum aestivum
MGQGSPGGMGKQGGLPGDRKPGDGAAGDKKDKKFEPPAAPSRVGRKQRKQRGPEAAARLPPVAPLSKCRLRLLKLDRVKDYLLMEEEFVASQERLRPSEDKTEEDRSKVDDLRGTPMSVGSLEEIIDESHAIVSSSVGPEYYVSVLSFVDKDQLEPGCSILMHNKVLSVVGILQDEVDPMVSVMKVEKAPLESYADIGGLDAQIQEIKEAVELPLTHPELYEDIGIRPPKGVILYGEPGTGKTLLAKAVANSTSATFLRVVGSELIQKYLGDGPKLVRELFRVADDLSPSIVFIDEIDAVGTKRYDAHSGGEREIQRTMLELLNQLDGFDSRGDVKVILATNRIESLDPALLRPGRIDRKIEFPLPDIKTRRRIFQIHTAKMTLAEDVNLEEFVMTKDEFSGADIKAICTEAGLLALRERRMKVTHADFKKAKEKVMFKKKEGVPEGLYM

SEQ ID NO: 5229 - DNA, 1203 bp, Triticum aestivum
  CDS (1)..(1203)
atggccgaggccgacgacgccgccgccgcccgccggcgcaccgtcatcacggagtaccgcaacaagctcctcaactgccgcgagctggagacgagggtccgcacaggtagggaaaacctaaaaaaggcaaagaaagattacgataaaactgaagatgatttgaagtccttgcagagtgtgggccaaatcattggtgaagtacttcgaccattggacagtgaaagatttatcgtcaaagccagtagtggcccacgttatgtggttggctgcagaagcaaagttgacaaagaaaagctgacagctgcaacacgagttgtccttgacatgacaacattaacaataatgcgcactctaccacgtgaggttgatcccgtggtctataacatgctacacgaagaccccggcaatgtcagttactcagctgtaggtggactgtcggatcaaataagggagctgcgggagtccatcgagttacctcttatgaatccagaattgtttcttcgcgttgggattaaaccaccaaagggtgttctgctctatggcccacctggaacgggaaagacattgcttgctagagccattgctagcaacatcgatgctaactttttaaagattgtttcaagtgctatcattgacaaatatattggtgaaagtgcccgtcttataagagaaatgtttaactatgcacgtgagcatcaaccatgtattattttcatggatgagattgatgccattggtggccgaagattcagtgagggcactagtgcagatcgtgaaatacaacggacattgatggagctcctaaatcagttggatggattcgatgagctcggaaaggtgaagatgatcatggcgacgaaccggcctgatgtcttggaccctgcgctccttcgtcctggacgcctagaccggaagatagagattccgctgccgaatgagcaatccaggacggaggtcctgaaaatccatgcagctggtatcgccaagcatggcgaaattgattacgaggctgtggttaagctggccgagggcttcaatggcgctgatcttcgcaatgtctgcactgaggctggcatggccgccattcgagcagagcgtgactacgtcatccacgaagacttcatgaaggcagttcggaagttgaatgacgccaagaagctcgagtccagcgcacactacagcgccgactttggcaaggactaa

SEQ ID NO: 5230 - protein, 400 aa, Triticum aestivum
MAEADDAAAARRRTVITEYRNKLLNCRELETRVRTGRENLKKAKKDYDKTEDDLKSLQSVGQIIGEVLRPLDSERFIVKASSGPRYVVGCRSKVDKEKLTAATRVVLDMTTLTIMRTLPREVDPVVYNMLHEDPGNVSYSAVGGLSDQIRELRESIELPLMNPELFLRVGIKPPKGVLLYGPPGTGKTLLARAIASNIDANFLKIVSSAIIDKYIGESARLIREMFNYAREHQPCIIFMDEIDAIGGRRFSEGTSADREIQRTLMELLNQLDGFDELGKVKMIMATNRPDVLDPALLRPGRLDRKIEIPLPNEQSRTEVLKIHAAGIAKHGEIDYEAVVKLAEGFNGADLRNVCTEAGMAAIRAERDYVIHEDFMKAVRKLNDAKKLESSAHYSADFGKD

SEQ ID NO: 5231 - DNA, 1203 bp, Triticum aestivum
  CDS (1)..(1203)
atgtctaccactgaaggcgaagaagccggaaggcggcgtactgcggtcgccgagtatcggaagaagctccttcagcagagggaactcgaatcaagaagtcgcgcagcaaaagacagtttgcgggtttcaaagaaggaatatgcgaaaaccgaggatgacctgaagtcgttacagagtgttggacagatcattggcgaagtacttaggccacttgacaatgaacgcatgatagttaaagcaagcagcggtccgaggtatgtggttggctgccgtagcaaagtggacaaagaaaagctgactgctggaactcgcgttgttcttgatatgactactctgacgatcatgagggctcttccccgagaagttgatccagttgtatacaacatgctccacgaagaccccggtaatgttagctactctgctgttggagggttgtcggatcagattcgggagctccgagaatccatagaactccctctcatgaatcctgaactctttctgagagtggggattaagcctccaaagggtgttctcctttacggacctccaggaactgggaaaacattgttagccagggcaatcgcgagcaacatcgatgccaacttcctaaaggttgtatctagtgctataatcgacaagtacattggtgaaagcgcgaggttgattcgagagatgtttaattacgctcgcgatcatcaaccatgcatcatatttatggacgagatcgatgccattggtggacgacgtttcagcgaagggacgagcgctgatcgtgaaattcaacgaactctcatggagttgcttaatcaattagatggatttgatcagctcggcaaggttaaaatgatcatggcaaccaacagaccggatgttctggatcctgctcttcttcgcccgggccgtctagacaggaagatcgagattccattgccgaatgagcagtcgaggatggaaattctcaagattcatgctgctggcattgccaaacacggcgaaatcgactatgaagcagttgtgaaactagctgagggtttcaatggcgccgatcttcgtaatgtatgtaccgaagccggcatgtctgcaatccgtgcagaacgcgactatgtcatccatgaagatttcatgaaggccgtcagaaagttgaatgaagcgaagaaactcgaatcaagttctcactacaatgctgatttcgggaaggaatga

SEQ ID NO: 5232 - protein, 400 aa, Triticum aestivum
MSTTEGEEAGRRRTAVAEYRKKLLQQRELESRSRAAKDSLRVSKKEYAKTEDDLKSLQSVGQIIGEVLRPLDNERMIVKASSGPRYVVGCRSKVDKEKLTAGTRVVLDMTTLTIMRALPREVDPVVYNMLHEDPGNVSYSAVGGLSDQIRELRESIELPLMNPELFLRVGIKPPKGVLLYGPPGTGKTLLARAIASNIDANFLKVVSSAIIDKYIGESARLIREMFNYARDHQPCIIFMDEIDAIGGRRFSEGTSADREIQRTLMELLNQLDGFDQLGKVKMIMATNRPDVLDPALLRPGRLDRKIEIPLPNEQSRMEILKIHAAGIAKHGEIDYEAVVKLAEGFNGADLRNVCTEAGMSAIRAERDYVIHEDFMKAVRKLNEAKKLESSSHYNADFGKE

SEQ ID NO: 5233 - DNA, 1344 bp, Zea mays
  CDS (1)..(1344)
atggggcagggcactccgggagggatgggcaagcagggcggcgctggcgaccgcaagcccggggacggcggcgacaagaaggacaagaagtttgagccgccggccgcgccctcccgcgtcggccgcaagcagcgcaagcagaagggcgccgaggcggccgcgcgcctccccaacgtcgcgccgctctccaagtgccgactccgcctcctcaagctcgagcgggtcaaggactacctcctcatggaggaggagttcgtcgccgcgcaggaacgcctccgtccccaggaagacaaggccgaggaggaccgatccaaggtcgacgacctccgcggcacccccatgagcgtcggatccctcgaggagattatcgacgagagccacgccatcgtctcctcctctgtcggacccgagtactatgtcagcatcctctcctttgtcgacaaggaccagctcgagccgggatgctccatcctcatgcacaataaggttctttctgtagttggtatattgcaagatgaagttgatcctatggtatctgtgatgaaagttgagaaagcacctttggaatcttatgctgacattggtggactagattcccagattcaagaaattaaagaggctgttgagcttcccttgactcatcctgagttgtatgaagacattgggatcaggccacccaagggagtcatattatatggcgaacctggaactggaaaaactctactcgccaaggctgttgccaattcaacatctgcgactttcttgcgtgttgtcggtagtgaacttattcaaaagtaccttggggatggtcccaagctagtcagagaattgtttagggtggctgatgaactttctccctcaatagtcttcattgatgagattgacgcagttggaacgaagaggtatgatgctcattcaggaggggagcgtgagattcaaagaactatgttggagctgctgaatcagctagatggttttgactcacgtggagatgttaaagtcattctagcaacaaaccgcattgaaagtcttgatccagccttgcttcggccaggccgtatagaccggaagattgaatttcctctaccagatattaaaactagacgacgcatcttccagatacacacatcgaaaatgacattagctgatgatgtgaacttggaagagtttgttatgaccaaagacgagttttcgggtgctgatattaaggcaatctgcacagaggctggattgcttgccttaagagaacgcagaatgaaggtgacccatgcagatttcaagaaggcaaaggagaaggtgatgtacaagaagaaggaaggtgttccggatggtctctacatgtag

SEQ ID NO: 5234 - protein, 447 aa, Zea mays
MGQGTPGGMGKQGGAGDRKPGDGGDKKDKKFEPPAAPSRVGRKQRKQKGAEAAARLPNVAPLSKCRLRLLKLERVKDYLLMEEEFVAAQERLRPQEDKAEEDRSKVDDLRGTPMSVGSLEEIIDESHAIVSSSVGPEYYVSILSFVDKDQLEPGCSILMHNKVLSVVGILQDEVDPMVSVMKVEKAPLESYADIGGLDSQIQEIKEAVELPLTHPELYEDIGIRPPKGVILYGEPGTGKTLLAKAVANSTSATFLRVVGSELIQKYLGDGPKLVRELFRVADELSPSIVFIDEIDAVGTKRYDAHSGGEREIQRTMLELLNQLDGFDSRGDVKVILATNRIESLDPALLRPGRIDRKIEFPLPDIKTRRRIFQIHTSKMTLADDVNLEEFVMTKDEFSGADIKAICTEAGLLALRERRMKVTHADFKKAKEKVMYKKKEGVPDGLYM

SEQ ID NO: 5235 - DNA, 1347 bp, Zea mays
  CDS (1)..(1347)
atgaaaaattccgctttacatttcttgcgagagaagaagcaaagcctgtgttctgcttctgcattctggaaaaacagggtccacctccgtaaaaaaaaaaaaaagaaagcctcgcgccgccgccgccgccgaggaaggttgaggaagaggatggccgagggcggggaagaagcccgccgccgtgctgcgatcgccgagtaccgcaagaagctcctcacctgccgggagctcgaggcgcgggtcaaaactgggagggagaatctaaaaaatgcaaagaaaaacttggaaaaaactgaagaggatctaaaatcactgcaaagtgttggtcaaattatcggtgaagtgcttcgacctttggacaaggaacgatttattgtcaaggctagcagcggaccacgttatgttgttgcctgccgaagtaaagttgacaaagaaaagttgattgctggtacacgagttgttcttgacatgacaacacttaccattatgcgcattctgccacgtgaggtcgaccctgtggtttacaacatgctacatgaagatcctggcaatgtaagttactcagctgtaggtgggttgtcagatcaaataagggaactcagagaatccattgaattacctcttatgaacccagaattgtttctccgtgtcgggattaaaccgccgaagggcgtgctgctctacggtccacctggaactgggaagacgctcctagctagagccattgctagcaacattgatgctaattttttgaaggtggtgtcaagtgctatcattgataaatacattggtgaaagtgcacgcttaattcgtgaaatgtttaactatgcacgtgagcatcagccatgcatcattttcatggatgaaattgatgccattggtggccgaagatttagtgagggcacaagtgcagatcgtgagattcagaggacattgatggagcttctaaatcagttagatggattcgatgagcttgggaaggtgaaaatgatcatggcaaccaaccggcctgatgttttggatcctgcactccttcgacctggtcggttggacaggaagatcgagatcccactgccgaatgaacaagggaggatggaggtcctcaagattcatgcagctggcatcgcaaagcatggggagattgactatgaagctgtagtcaaactagctgagggcttcaatggagccgatatgcgcaacttgtgcacagaagccggcatggctgctatccgagcggagcgtgactatgtcattcacgaggacttcatgaaggctgtgcgcaagctgaatgatgccaagaagctcgagtccagtgcgcactacagtgctgacttcggcaaggattga

SEQ ID NO: 5236 - protein, 448 aa, Zea mays
MKNSALHFLREKKQSLCSASAFWKNRVHLRKKKKKKASRRRRRRGRLRKRMAEGGEEARRRAAIAEYRKKLLTCRELEARVKTGRENLKNAKKNLEKTEEDLKSLQSVGQIIGEVLRPLDKERFIVKASSGPRYVVACRSKVDKEKLIAGTRVVLDMTTLTIMRILPREVDPVVYNMLHEDPGNVSYSAVGGLSDQIRELRESIELPLMNPELFLRVGIKPPKGVLLYGPPGTGKTLLARAIASNIDANFLKVVSSAIIDKYIGESARLIREMFNYAREHQPCIIFMDEIDAIGGRRFSEGTSADREIQRTLMELLNQLDGFDELGKVKMIMATNRPDVLDPALLRPGRLDRKIEIPLPNEQGRMEVLKIHAAGIAKHGEIDYEAVVKLAEGFNGADMRNLCTEAGMAAIRAERDYVIHEDFMKAVRKLNDAKKLESSAHYSADFGKD

SEQ ID NO: 5237 - DNA, 1287 bp, Zea mays
  CDS (1)..(1287)
atgtcgtcgtcggcgcccgcaccggccgccatggccgtggacgacgcggaggacgaccagctcgcctccatgtccacggaggagatcatcagggcctcccgtctcctcgacaacgagatccgcgtccacaaggacgagctgcagcggtcgaacctggagctggagtctatcaaggagaagaccaaggagaaccaggagaagattaagctcaacaagcagctgccgtacctcgtcggcaacatcgtcgagattttggaaatgaaccctgaggatgaggctgaagaagatggtgctaacatcgatctggactcacaaaggaaaggaaaatgtgttgttctgaagacatccaccagacaaaccatattccttcctgtaattgggttagttgaccccgataagctgaagcctggcgatttagttggagttaacaaagacagctacttgatattagatacattgccttcagagtatgactcacgggttaaggcaatggaagtagatgagaaacctactgaggattacaatgacatcggcggacttgagaaacagattcaagagcttgtggaagcaatagtgttaccaatgacacacaaggaccgatttcaaaaattgggcattcgtccccccaaaggggttcttttgtatggaccccctgggaccgggaaaacgctcatggctcgtgcatgcgctgcacagactaatgcaacatttctgaaattggctggtccacaacttgtccagatgttcattggtgatggagctaagcttgttagagatgcttttcagcttgctaaggagaaagccccgtgcatcatctttattgatgaaattgatgccattggaacaaagcgttttgacagtgaagttagtggcgatagagaagtgcaaaggacaatgttggaattgctgaaccagcttgatggatttagcagcgatgagaggataaaggtgatagctgcaacaaatcgtgctgatattcttgatcctgctctgatgagatctggtcgtctggaccggaagattgagttccctcatccatcagaggaagcaagagctagaatcctgcagatccactcgaggaaaatgaatgtgaatccagatgtcaactttgaagagttggcgcgttcaaccgatgatttcaatggcgctcagctaaaggctgtttgcgtagaggctggcatgctcgctctacgccgagatgctacagaggttacccacgaggatttcaacgaggggatcatccaagtgcaggcaaagaagaagtccagcttgaattactacgcgtaa

SEQ ID NO: 5238 - protein, 428 aa, Zea mays
MSSSAPAPAAMAVDDAEDDQLASMSTEEIIRASRLLDNEIRVHKDELQRSNLELESIKEKTKENQEKIKLNKQLPYLVGNIVEILEMNPEDEAEEDGANIDLDSQRKGKCVVLKTSTRQTIFLPVIGLVDPDKLKPGDLVGVNKDSYLILDTLPSEYDSRVKAMEVDEKPTEDYNDIGGLEKQIQELVEAIVLPMTHKDRFQKLGIRPPKGVLLYGPPGTGKTLMARACAAQTNATFLKLAGPQLVQMFIGDGAKLVRDAFQLAKEKAPCIIFIDEIDAIGTKRFDSEVSGDREVQRTMLELLNQLDGFSSDERIKVIAATNRADILDPALMRSGRLDRKIEFPHPSEEARARILQIHSRKMNVNPDVNFEELARSTDDFNGAQLKAVCVEAGMLALRRDATEVTHEDFNEGIIQVQAKKKSSLNYYA

SEQ ID NO: 5239 - DNA, 1269 bp, Zea mays
  CDS (1)..(1269)
atggcgacggtggcgatggacatctcgaagcccacgccggtggcgtccggcgacgaggccgcggcggcggccaaggggaggagcggcggagggggcgaggggctgcggcagtactacctgcagcacatccacgacctgcagctccagatccggcagaagacccacaacctcaaccgtctcgaggcccagcgcaatgacctcaactcccgagttagaatgctcagggaagagttgcagttgcttcaagagcctggctcatatgttggtgaggtggtgaaggtcatggggaaatcgaaggttctggtgaaggtacaccccgaaggcaaatatgttgttgatatagataagagcattgatatcacaaagatcacaccttcaacaagagtcgctcttcgtaatgacagctatatgctccatctgatcctaccaagcaaagttgatccattggtcaatctcatgaaagttgagaaggttcctgattctacttatgatatgattggaggtcttgaccagcaaattaaagagatcaaagaggtcattgagcttccaatcaaacatccggaactatttgagagccttggaattgcacaaccaaagggtgtcctcctttatggacctccaggcacaggaaagacattgctggcacgtgcggttgctcatcacactgactgcaccttcatcagggtgtctggttctgagttggttcagaagtatattggtgaaggctcccggatggttcgggaactctttgttatggccagggaacatgcaccatccattatatttatggatgaaattgactctatcggatctgctagaatggagtctggaactggcaacggtgatagtgaagtgcagcgtaccatgcttgaacttctaaaccagcttgatggttttgaagcttcaaacaaaattaaggttttgatggcaacaaacagaatagacattttggatcaagcccttttgaggcctggccgcatagacaggaagattgagtttccaaatcctaacgaggactcacgtttcgatattctgaagatccattcaaggaaaatgaacttgatgcgtggtatcgatctgaaaaagatcgcagaaaagatgaatggggcctcaggagctgagctcaaggccgtctgtacagaggctggaatgtttgctctccgtgagagaagggtgcacgttacacaggaggacttcgagatggcagtggccaaggtgatgaagaaagacacggagaagaacatgtccctgcgcaagctctggaagtga

SEQ ID NO: 5240 - protein, 422 aa, Zea mays
MATVAMDISKPTPVASGDEAAAAAKGRSGGGGEGLRQYYLQHIHDLQLQIRQKTHNLNRLEAQRNDLNSRVRMLREELQLLQEPGSYVGEVVKVMGKSKVLVKVHPEGKYVVDIDKSIDITKITPSTRVALRNDSYMLHLILPSKVDPLVNLMKVEKVPDSTYDMIGGLDQQIKEIKEVIELPIKHPELFESLGIAQPKGVLLYGPPGTGKTLLARAVAHHTDCTFIRVSGSELVQKYIGEGSRMVRELFVMAREHAPSIIFMDEIDSIGSARMESGTGNGDSEVQRTMLELLNQLDGFEASNKIKVLMATNRIDILDQALLRPGRIDRKIEFPNPNEDSRFDILKIHSRKMNLMRGIDLKKIAEKMNGASGAELKAVCTEAGMFALRERRVHVTQEDFEMAVAKVMKKDTEKNMSLRKLWK

SEQ ID NO: 5241 - DNA, 1341 bp, Zea mays
  CDS (1)..(1341)
atgggacaaggttctcccggcgggatgggcaagcagcccggccttccgggcgaccgcaagcagggagacggcaagaaagagaagaaatatgaaccacccgctgccccttcccgtgtcggccggaagcagaagcggcagaagggctccgaggcggcggcgcggctccccgccgtggcgccgctctcaaagtgccgccttcgcctactcaagctcgaacgcgtcaaggactaccttctcatggaagaggagttcgttgccagccaggagcgcctgcgccccagcgaggataagacggaggaggaccgatccaaggtcgacgacctccgcggcactcccatgaacgtcggatcgctggaggagatcatcgacgagacccatgccatcgtctcctcgtccgtcggtcccgagtactacgtcgggatactttccttcgttgataaggaccagctcgagcctggatgtgccattctgatgcacaacaaggttctgtcagtggttggtattttgcaagacgaagttgatcctatggtttctgtgatgaaagttgaaaaggcacctttggagtcttatgctgacattggtggcttggatgctcaaattcaagaaatcaaagaagcagttgaacttcccttaacacatcctgagctatatgaggacattgggatcagacctccgaagggagttatactatatggggaacctggaacagggaaaactctactcgcaaaggctgttgccaattctacttcagcaacgttcttgcgtgttgttgggagtgaattgatccaaaagtaccttggtgatggtcccaagcttgttagagaattgttcagggtggctgatgatctttctccttcaattgtctttattgatgagattgatgctgttgggacaaagaggtacgatgctcattctggtggcgagcgtgagattcagagaaccatgttggagttgttaaatcagctggatggttttgattcaagaggagatgttaaagttattctagcaacaaatcgtattgagagtcttgatccagccttgcttcgcccaggtcgaattgacagaaagattgaattccctttacctgatgtcaagactaggcggcgcatcttccagatacacacatcgaaaatgacactggctgatgatgtaaacctagaagagtttattatgtcaaaagatgagttttcaggtgctgacatcaaggccatttgtactgaagctggcttgcttgctttgagagagcggcggatgaaggtgacgcatgcagacttcaagaaggccaaagaaaaggttatgttcaagaagaaagaaggcgtgccggagggcctatatatgtga

SEQ ID NO: 5242 - protein, 446 aa, Zea mays
MGQGSPGGMGKQPGLPGDRKQGDGKKEKKYEPPAAPSRVGRKQKRQKGSEAAARLPAVAPLSKCRLRLLKLERVKDYLLMEEEFVASQERLRPSEDKTEEDRSKVDDLRGTPMNVGSLEEIIDETHAIVSSSVGPEYYVGILSFVDKDQLEPGCAILMHNKVLSVVGILQDEVDPMVSVMKVEKAPLESYADIGGLDAQIQEIKEAVELPLTHPELYEDIGIRPPKGVILYGEPGTGKTLLAKAVANSTSATFLRVVGSELIQKYLGDGPKLVRELFRVADDLSPSIVFIDEIDAVGTKRYDAHSGGEREIQRTMLELLNQLDGFDSRGDVKVILATNRIESLDPALLRPGRIDRKIEFPLPDVKTRRRIFQIHTSKMTLADDVNLEEFIMSKDEFSGADIKAICTEAGLLALRERRMKVTHADFKKAKEKVMFKKKEGVPEGLYM

SEQ ID NO: 5243 - DNA, 1344 bp, Zea mays
  CDS (1)..(1344)
atggggcagggcactccgggagggatgggcaagcagggcggcgccggcgaccgcaagccgggggacgccggcgaaaagaaggacaagaagttcgagccgccggccgcgccctcccgcgtcggcaggaagcagcgcaagcagaagggcgccgaggccgccgcgcgcctccccaacgtcgcgccgctctccaagtgccgactccgcctcctcaagctcgaccgggtcaaggactacctcctcatggaggaggagttcgtcgccgcgcaggaacgcctccgtccccaggaagacaaggccgaggaggaccgatccaaggtcgacgacctccgaggcacccccatgagcgtcggatccctcgaggagatcatcgacgagagccacgccatcgtctcctcctctgtcggacccgagtactatgtcagcatcctctcctttgtcgacaaggaccagctcgagccgggatgctccatcctcatgcacaataaggttctttctgtggttggtatattgcaagatgaagttgatcctatggtatctgtgatgaaagttgagaaagcgcctttggaatcttatgctgacattggtggactggatgctcagattcaagaaattaaagaggctgttgagcttcccttgactcaccctgagctgtatgaagacattggtattaggcctcccaagggagtcatattatatggcgaacctggaactggaaaaactctactcgccaaggctgttgccaattcaacatctgcgactttcttgcgtgttgtcggtagtgaacttattcaaaagtaccttggggatggtcccaagctagtcagagaattgtttagggtggctgatgaactttctccctcaatagtctttattgatgagattgacgctgttggaacgaagaggtatgatgctcattcaggaggggagcgtgagattcaaagaactatgttggagctgctgaatcagctagatggttttgactcacgtggagatgttaaagtcattctagcaacaaaccgcattgaaagtcttgatcctgctttgcttcggccaggccgtatagaccggaagattgaattccctctaccagatattaaaactagaagacgcatcttccagatacacacatcaaaaatgacattagctgacgatgtgaacttggaagagtttgttatgaccaaagatgagttctcgggcgctgatattaaggccatctgcacggaggctggattgctcgccttaagagaacgtagaatgaaagtgacccatgcagatttcaagaaagcaaaggagaaggtgatgtacaagaagaaggaaggtgttccggatggtctctacatgtag

SEQ ID NO: 5244 - protein, 447 aa, Zea mays
MGQGTPGGMGKQGGAGDRKPGDAGEKKDKKFEPPAAPSRVGRKQRKQKGAEAAARLPNVAPLSKCRLRLLKLDRVKDYLLMEEEFVAAQERLRPQEDKAEEDRSKVDDLRGTPMSVGSLEEIIDESHAIVSSSVGPEYYVSILSFVDKDQLEPGCSILMHNKVLSVVGILQDEVDPMVSVMKVEKAPLESYADIGGLDAQIQEIKEAVELPLTHPELYEDIGIRPPKGVILYGEPGTGKTLLAKAVANSTSATFLRVVGSELIQKYLGDGPKLVRELFRVADELSPSIVFIDEIDAVGTKRYDAHSGGEREIQRTMLELLNQLDGFDSRGDVKVILATNRIESLDPALLRPGRIDRKIEFPLPDIKTRRRIFQIHTSKMTLADDVNLEEFVMTKDEFSGADIKAICTEAGLLALRERRMKVTHADFKKAKEKVMYKKKEGVPDGLYM

SEQ ID NO: 5245 - DNA, 1293 bp, Zea mays
  CDS (1)..(1293)
atgtcgtcatccggcgccccggccccggcggcggcaatggccgttgacgacgcggaggacgaccagctcgcctccatgtccacggaggatatcatccgggcctcccgccttcttgacaacgagatccgtgtcctcaaggacgagttgcagcggacgaacctggagttggagtcgttcaaggagaagattaaggaaaaccaagagaaaattaagctcaacaagcagctgccctacctcgttggcaacatcggtgagatcttggaaatgaaccctgaggatgaagctgaggaggatggtgctaacattgatttagactcacaaaggaaaggaaaatgtgttgttctgaagacctccacaagacaaactatattccttcctgttgttgggctagtggaccctgacaagctaaagcctggtgatctggttggagtcaataaagatagctaccttatactagatacattgccatcagagtacgattcacgagtgaaggcaatggaagtggatgaaaagcccactgaagattataatgacattgggggtcttgaaaagcagattcaagagcttgtagaggcaattgtactgcccatgacacataaagaccggttccagaagttgggtattcgtcctccaaaaggggttcttttgtacggaccaccaagaactggcaagacactcatggctcgtgcatgtgctgcacagacgaatgcaacgtttcttaaattaactggtccacaacttgtgcagatgtttattggtgatggaacaaagcttgtccgggatgcattccagcttgccaaagagaaagctccttggattatatttattgatgagatagatgccattggcaccaaacgttttgatagtgaagttagcggtgatagagaagttcagcggacaatgttggaattattgaatcaactggatggattcagcagcgatgagagaataaaggtcatagctgcaactaaccgtgctgacatccttgaccctgctctgatgcgatctggacggttggaccgaaagattgagttccctcacccatccgaagaagcaagagctagaatcttgcaaatccattcaaggaaaatgaatgtaaatcctgatgtcaactttgaagaattggctcgctcaactgatgacttcaacggagcacagctaaaggcagtttgtgtagaagctggtatgcttgccctacggcgggatgctacagaggtaactcacgaggatttcaacgaagggatcgtacaggtccaggcgaagaaaaagtcaagcttgaactactatgcttaa

SEQ ID NO: 5246 - protein, 430 aa, Zea mays
MSSSGAPAPAAAMAVDDAEDDQLASMSTEDIIRASRLLDNEIRVLKDELQRTNLELESFKEKIKENQEKIKLNKQLPYLVGNIGEILEMNPEDEAEEDGANIDLDSQRKGKCVVLKTSTRQTIFLPVVGLVDPDKLKPGDLVGVNKDSYLILDTLPSEYDSRVKAMEVDEKPTEDYNDIGGLEKQIQELVEAIVLPMTHKDRFQKLGIRPPKGVLLYGPPRTGKTLMARACAAQTNATFLKLTGPQLVQMFIGDGTKLVRDAFQLAKEKAPWIIFIDEIDAIGTKRFDSEVSGDREVQRTMLELLNQLDGFSSDERIKVIAATNRADILDPALMRSGRLDRKIEFPHPSEEARARILQIHSRKMNVNPDVNFEELARSTDDFNGAQLKAVCVEAGMLALRRDATEVTHEDFNEGIVQVQAKKKSSLNYYA

SEQ ID NO: 5247 - DNA, 1293 bp, Zea mays
  CDS (1)..(1293)
atgtcgtcatccggcgccccggccccggcggcggcaatggccgttgacgacgcggaggacgaccagctcgcctccatgtccacggaggatatcatccgggcctcccgccttcttgacaacgagatccgtgtcctcaaggacgagttgcagcggacgaacctggagttggagtcgttcaaggagaagattaaggaaaaccaagagaaaattaagctcaacaagcagctgccctacctcgttggcaacatcgttgagatcttggaaatgaaccctgaggatgaagctgaggaggatggtgctaacattgatttagactcacaaaggaaaggaaaatgtgttgttctgaagacctccacaagacaaactatattccttcctgttgttgggctagtggaccctgacaagctaaagcctggtgatctggttggagtcaataaagatagctaccttatactagatacattgccatcagagtacgattcacgagtgaaggcaatggaagtggatgaaaagcccactgaagattataatgacattgggggtcttgaaaagcagattcaagagcttgtagaggcaattgtactgcccatgacacataaagaccggttccagaagttgggtattcgtcctccaaaaggggttcttttgtacggaccaccaggaactggcaagacactcatggctcgtgcatgtgctgcacagacgaatgcaacgtttcttaaattagctggtccacaacttgtgcagatgtttattggtgatggagcaaagcttgtccgggatgcattccagcttgccaaagagaaagctccttgtattatatttattgatgagatagatgccattggcaccaaacgttttgatagtgaagttagcggtgatagagaagttcagcggacaatgttggaattattgaatcaactggatggattcagcagcgatgagagaataaaggtcatagctgcaactaaccgtgctgacatccttgaccctgctctgatgcgatctggacggttggaccgaaagattgagttccctcacccatccgaagaagcaagagctagaatcttgcaaatccattcaaggaaaatgaatgtaaatcctgatgtcaactttgaagaattggctcgctcaactgatgacttcaacggagcacagctaaaggcagtttgtgtagaagctggtatgcttgccctacggcgggatgctacagaggtaactcacgaggatttcaatgaagggatcgtacaggtccaggcgaagaaaaagtcaagcttgaactactatgcttaa

SEQ ID NO: 5248 - protein, 430 aa, Zea mays
MSSSGAPAPAAAMAVDDAEDDQLASMSTEDIIRASRLLDNEIRVLKDELQRTNLELESFKEKIKENQEKIKLNKQLPYLVGNIVEILEMNPEDEAEEDGANIDLDSQRKGKCVVLKTSTRQTIFLPVVGLVDPDKLKPGDLVGVNKDSYLILDTLPSEYDSRVKAMEVDEKPTEDYNDIGGLEKQIQELVEAIVLPMTHKDRFQKLGIRPPKGVLLYGPPGTGKTLMARACAAQTNATFLKLAGPQLVQMFIGDGAKLVRDAFQLAKEKAPCIIFIDEIDAIGTKRFDSEVSGDREVQRTMLELLNQLDGFSSDERIKVIAATNRADILDPALMRSGRLDRKIEFPHPSEEARARILQIHSRKMNVNPDVNFEELARSTDDFNGAQLKAVCVEAGMLALRRDATEVTHEDFNEGIVQVQAKKKSSLNYYA

SEQ ID NO: 5249 - DNA, 1263 bp, Zea mays
  CDS (1)..(1263)
atgtcggccgccaccaccggcccagccccttcagtagccactccgatggcgccccctccgtcctacccggcctcctccacggcctcttcctccatctccgcgtccgccgaggaggaggaggacctctatggccgcctcaaatcgctccaacgccacatggagttcgtcgaaatccaggaggagtacgttaaagacgagcagaagaacctgaagcgcgaactccttcgtgcgcaggaggaggttaagcggatccagtctgtaccgctcgtcattggccagtttatggagatggtcgacggcaacaacggcatcgtgggctctaccactggcagcaactactacgtgcggatcctcagcaccatcaaccgcgagttgctcaagccgtcagcgtccgtcgcgttgcatcgtcactccaacgctctagtcgacgtgctgccgccggaggccgactccagcatctccttgttgggatcgtcggagaagcccaacgtcacttacaacgatattggaggatgtgacatccaaaagcaagaaatacgggaggcggttgaattacccttgactcatcatgagttgtacaagcagattggtattgatcctccaagaggggtgcttctgtatggtcctccgggtactggcaagaccatgcttgccaaagcagttgcacatcataccactgctgcttttatcagggtcgtcggttcagagtttgttcaaaagtacttgggtgagggccctagaatggtgcgtgacgtgttccgtttggccaaggagaatgccccagcaatcattttcattgatgaggttgatgctatagccactgctcgttttgatgctcagactggtgctgaccgagaagttcagcgtattcttatggagctactcaatcagatggatgggtttgatcaaacagtcaatgtgaaggttataatggcaactaatcgggcagacactctagatcctgctttgttgcgtcctggtagacttgacaggaaaattgagttccctctgccagaccggcgtcagaagaggcttgtttttcaagtttgcactgccaaaatgaacctgagcgatgaggttgatttggaagattatgtttccagaccggataagatcagtgctgctgatattgctgctatctgccaagaggctggcatgcatgctgtccgcaaaaaccgatatgtcatcctccccaaggactttgaaaagggctaccgaaccaacgtgaagaagcccgagacagactttgatttctacaaatga

SEQ ID NO: 5250 - protein, 420 aa, Zea mays
MSAATTGPAPSVATPMAPPPSYPASSTASSSISASAEEEEDLYGRLKSLQRHMEFVEIQEEYVKDEQKNLKRELLRAQEEVKRIQSVPLVIGQFMEMVDGNNGIVGSTTGSNYYVRILSTINRELLKPSASVALHRHSNALVDVLPPEADSSISLLGSSEKPNVTYNDIGGCDIQKQEIREAVELPLTHHELYKQIGIDPPRGVLLYGPPGTGKTMLAKAVAHHTTAAFIRVVGSEFVQKYLGEGPRMVRDVFRLAKENAPAIIFIDEVDAIATARFDAQTGADREVQRILMELLNQMDGFDQTVNVKVIMATNRADTLDPALLRPGRLDRKIEFPLPDRRQKRLVFQVCTAKMNLSDEVDLEDYVSRPDKISAADIAAICQEAGMHAVRKNRYVILPKDFEKGYRTNVKKPETDFDFYK

SEQ ID NO: 5251 - DNA, 25 bp, Artificial sequence
  primer
atgagtgaagaacaggaccctttat

SEQ ID NO: 5252 - DNA, 27 bp, Artificial sequence
  primer
tcataatttttggtattctatagtgcc

SEQ ID NO: 5253 - protein, 400 aa, Artificial sequence
  consensus sequence
  Variant (2)..(22): Xaa in position 2 to 22 is any amino acid
  Variant (23)..(57): Xaa in position 23 to 57 is any or no amino acid
  Variant (59)..(71): Xaa in position 59 to 71 is any amino acid
  Variant (72)..(75): Xaa in position 72 to 75 is any or no amino acid
  Variant (77)..(87): Xaa in position 77 to 87 is any amino acid
  Variant (88)..(122): Xaa in position 88 to 122 is any or no amino acid
  Variant (125)..(127): Xaa in position 125 to 127 is any amino acid
  Variant (129)..(130): Xaa in position 129 to 130 is any amino acid
  Variant (131)..(133): Xaa in position 131 to 133 is any or no amino acid
  Variant (135)..(136): Xaa in position 135 to 136 is any amino acid
  Variant (137)..(138): Xaa in position 137 to 138 is any or no amino acid
  Variant (140)..(148): Xaa in position 140 to 148 is any amino acid
  Variant (150)..(152): Xaa in position 150 to 152 is any amino acid
  Variant (156)..(157): Xaa in position 156 to 157 is any amino acid
  Variant (160)..(160): Xaa in position 160 is any amino acid
  Variant (162)..(163): Xaa in position 162 to 163 is any amino acid
  Variant (165)..(166): Xaa in position 165 to 166 is any amino acid
  Variant (170)..(173): Xaa in position 170 to 173 is any amino acid
  Variant (175)..(179): Xaa in position 175 to 179 is any amino acid
  Variant (180)..(180): Xaa in position 180 is any or no amino acid
  Variant (183)..(183): Xaa in position 183 is any amino acid
  Variant (187)..(188): Xaa in position 187 to 188 is any amino acid
  Variant (191)..(191): Xaa in position 191 is any amino acid
  Variant (205)..(205): Xaa in position 205 is any amino acid
  Variant (207)..(207): Xaa in position 207 is any amino acid
  Variant (209)..(212): Xaa in position 209 to 212 is any amino acid
  Variant (214)..(214): Xaa in position 214 is any amino acid
  Variant (216)..(220): Xaa in position 216 to 220 is any amino acid
  Variant (222)..(225): Xaa in position 222 to 225 is any amino acid
  Variant (227)..(228): Xaa in position 227 to 228 is any amino acid
  Variant (230)..(230): Xaa in position 230 is any amino acid
  Variant (232)..(235): Xaa in position 232 to 235 is any amino acid
  Variant (237)..(238): Xaa in position 237 to 238 is any amino acid
  Variant (240)..(241): Xaa in position 240 to 241 is any amino acid
  Variant (243)..(246): Xaa in position 243 to 246 is any amino acid
  Variant (248)..(248): Xaa in position 248 is any amino acid
  Variant (250)..(250): Xaa in position 250 is any amino acid
  Variant (252)..(252): Xaa in position 252 is any amino acid
  Variant (255)..(255): Xaa in position 255 is any amino acid
  Variant (260)..(261): Xaa in position 260 to 261 is any amino acid
  Variant (263)..(269): Xaa in position 263 to 269 is any amino acid
  Variant (270)..(274): Xaa in position 270 to 274 is any or no amino acid
  Variant (276)..(276): Xaa in position 276 is any amino acid
  Variant (280)..(281): Xaa in position 280 to 281 is any amino acid
  Variant (287)..(287): Xaa in position 287 is any amino acid
  Variant (291)..(296): Xaa in position 291 to 296 is any amino acid
  Variant (297)..(297): Xaa in position 297 is any or no amino acid
  Variant (299)..(301): Xaa in position 299 to 301 is any amino acid
  Variant (306)..(306): Xaa in position 306 is any amino acid
  Variant (308)..(308): Xaa in position 308 is any amino acid
  Variant (319)..(319): Xaa in position 319 is any amino acid
  Variant (325)..(325): Xaa in position 325 is any amino acid
  Variant (327)..(327): Xaa in position 327 is any amino acid
  Variant (329)..(332): Xaa in position 329 to 332 is any amino acid
  Variant (333)..(333): Xaa in position 333 is any or no amino acid
  Variant (335)..(336): Xaa in position 335 to 336 is any amino acid
  Variant (338)..(339): Xaa in position 338 to 339 is any amino acid
  Variant (342)..(363): Xaa in position 342 to 363 is any amino acid
  Variant (364)..(365): Xaa in position 364 to 365 is any or no amino acid
  Variant (368)..(372): Xaa in position 368 to 372 is any amino acid
  Variant (373)..(377): Xaa in position 373 to 377 is any or no amino acid
  Variant (379)..(379): Xaa in position 379 is any amino acid
  Variant (383)..(384): Xaa in position 383 to 384 is any amino acid
  Variant (386)..(386): Xaa in position 386 is any amino acid
  Variant (388)..(392): Xaa in position 388 to 392 is any amino acid
  Variant (393)..(398): Xaa in position 393 to 398 is any or no amino acid
GXXXXXXXXXXXXXXXXXXXXXXXXXXXXXXXXXXXXXXXXXXXXXXXXXXXXXXXXVXXXXXXXXXXXXXXXXXVXXXXXXXXXXXXXXXXXXXXXXXXXXXXXXXXXXXXXXXXXXXXXXLPXXXDXXXXXVXXXXMXXXXXXXXXYXXXGGLXXQIXEXXEXXELPXXXXEXXXXXXGIXPPKXXGVXLYGPPGTGKTLLAXAXAXXXXAXFXXXXXSXXXXKXXGXGXXXXRXXFXXAXXXXPXIXFXDEXDAIGXXRXXXXXXXXXXXXEXQRTXXELLNQXDGFXXXXXXXKXXXATNRXDXLDPALLRPGRXDRKIEXPXPXXXXXRXXIXXIHXXXXXXXXXXXXXXXXXXXXXXXXGAXXXXXXXXXXCXEAGXXAXRXXXXXXXXXXXDF

SEQ ID NO: 5254 - protein, 43 aa, Artificial sequence
  protein pattern
  Variant (2)..(5): Xaa in position 2 to 5 is any amino acid
  Variant (6)..(6): Xaa in position 6 is any or no amino acid
  Variant (8)..(8): Xaa in position 8 is any amino acid
  Variant (9)..(9): Xaa in position 9 is any or no amino acid
  Variant (11)..(11): Xaa in position 11 is any or no amino acid
  Variant (14)..(14): Xaa in position 14 is any amino acid
  Variant (21)..(22): Xaa in position 21 to 22 is Leu or Met
  Variant (24)..(24): Xaa in position 24 is Lys or Arg
  Variant (26)..(26): Xaa in position 26 is any amino acid
  Variant (28)..(31): Xaa in position 28 to 31 is any amino acid
  Variant (32)..(32): Xaa in position 32 is Ala, Cys, Ser or Thr
  Variant (33)..(33): Xaa in position 33 is any amino acid
  Variant (35)..(35): Xaa in position 35 is Ile or Leu
  Variant (36)..(38): Xaa in position 36 to 38 is any amino acid
  Variant (39)..(39): Xaa in position 39 is Ala, Gly or Ser
  Variant (40)..(40): Xaa in position 40 is Ala, Pro or Ser
  Variant (41)..(41): Xaa in position 41 is Ala, Glu, Gly or Gln
  Variant (42)..(42): Xaa in position 42 is Phe, Ile or Leu
  Variant (43)..(43): Xaa in position 43 is Ala, Ile or Val
GXXXXXGXXLXYGXPGTGKTXXAXAXAXXXXXXFXXXXXXXXX

SEQ ID NO: 5255 - protein, 30 aa, Artificial sequence
  protein pattern
  Variant (2)..(3): Xaa in position 2 to 3 is any amino acid
  Variant (4)..(6): Xaa in position 4 to 6 is any or no amino acid
  Variant (8)..(9): Xaa in position 8 to 9 is any amino acid
  Variant (11)..(11): Xaa in position 11 is Asp, Lys or Arg
  Variant (12)..(12): Xaa in position 12 is Asp, Glu or Lys
  Variant (13)..(14): Xaa in position 13 to 14 is any amino acid
  Variant (16)..(16): Xaa in position 16 is any amino acid
  Variant (18)..(18): Xaa in position 18 is Gly, Ile, Leu or Val
  Variant (20)..(20): Xaa in position 20 is Ile, Met or Val
  Variant (23)..(23): Xaa in position 23 is Ile, Leu or Val
  Variant (25)..(25): Xaa in position 25 is Ala or Ser
  Variant (26)..(26): Xaa in position 26 is Ile or Val
  Variant (27)..(27): Xaa in position 27 is any amino acid
  Variant (28)..(28): Xaa in position 28 is Ala, Gly, Ser or Thr
  Variant (29)..(29): Xaa in position 29 is any amino acid
RXXXXXFXXAXXXXPXIXFXDEXDXXXXXR

SEQ ID NO: 5256 - protein, 17 aa, Artificial sequence
  protein pattern
  Variant (2)..(2): Xaa in position 2 is Ile or Val
  Variant (5)..(5): Xaa in position 5 is any amino acid
  Variant (6)..(6): Xaa in position 6 is Leu or Met
  Variant (7)..(7): Xaa in position 7 is Ile, Leu or Met
  Variant (11)..(11): Xaa in position 11 is Asn or Thr
  Variant (13)..(13): Xaa in position 13 is Leu or Met
  Variant (17)..(17): Xaa in position 17 is Ala, Asp, Glu, Gly or Ser
EXQRXXXELLXQXDGFX

SEQ ID NO: 5257 - DNA, 1131 bp, Arabidopsis thaliana
  CDS (1)..(1131)
atgtcgaaaaaggagattgctcttcagcaagcacttgatcagattaccagttcatttggcaaagggtccataatgtatctcggtcgtgctgtttctcctagaaatgtcccggttttctctaccggatcttttgcccttgatgtagctttgggagttggtggccttcctaaggggcgtgttgtggagatatatggtcctgaagcatcgggaaagacaacacttgctcttcatgttattgcagaagcacaaaaacaaggaggaacctgtgtctttgtagatgctgagcatgctcttgattcgtcacttgctaaggcaatcggtgtaaatacagaaaatctgcttctatcacagcctgattgtggcgaacaggcccttagtcttgtggatactttaatccgaagtggttcagttgatgttattgtagttgacagtgtggctgctcttgtacctaaaggagaacttgagggcgagatgggtgatgcacatatggctatgcaagccagattgatgagccaagctttgcgtaaattgagccattctttatcgttatcgcaaacacttctgatctttataaatcaggtgagatcaaaactatctacgtttggaggatttggaggtccaacagaagttacttgtggtggaaatgctttgaagttttatgcttctatgcgtttgaatatcaagcgaattggacttatcaagaaaggcgaagagacaacgggaagtcaagtctccgtgaagatagtgaagaacaaactcgctccgccgtttagaactgctcagtttgagcttgaattcggcaaaggaatctgcaagatcacggagataatcgacctgagcataaagcacaagttcatcgcgaaaaacggaacattctacaatctcaacggtaaaaactaccatggaaaagaggctttaaagagattccttaaacagaacgaatctgatcaagaagagctcatgaagaagctccaagacaagctcatcgccgatgaagctgcagataaggaaactgaatctgaatctgaggaagaagattccctgagagttgtggtttcacctgacaacacagatgatgaatcaccagctcttgttgttggagctgctgcagtggttgttgaggcagcatga

SEQ ID NO: 5258 - protein, 376 aa, Arabidopsis thaliana
MSKKEIALQQALDQITSSFGKGSIMYLGRAVSPRNVPVFSTGSFALDVALGVGGLPKGRVVEIYGPEASGKTTLALHVIAEAQKQGGTCVFVDAEHALDSSLAKAIGVNTENLLLSQPDCGEQALSLVDTLIRSGSVDVIVVDSVAALVPKGELEGEMGDAHMAMQARLMSQALRKLSHSLSLSQTLLIFINQVRSKLSTFGGFGGPTEVTCGGNALKFYASMRLNIKRIGLIKKGEETTGSQVSVKIVKNKLAPPFRTAQFELEFGKGICKITEIIDLSIKHKFIAKNGTFYNLNGKNYHGKEALKRFLKQNESDQEELMKKLQDKLIADEAADKETESESEEEDSLRVVVSPDNTDDESPALVVGAAAVVVEAA

SEQ ID NO: 5259 - DNA, 1828 bp, Zea mays
  CDS (100)..(1392)
gaattcccgggtcgacccacgcgtccgaaacccctaaaccctagctccccacccccagcctccccgcggcttccagcgattggaggcgaagcagccgccatggcgatcctccttaggcgcgcgtcgctgcggcgcgtcatcgccttcgccgccgcctcctcctcctcctcttctttgcactctgagatttataagcaaggggtttgtggatccatgtttcattgccgagagttcgcatcaaaagccaaaaaaaagaagtcaagtggaacagactccgatgaggagagtatgtcaaagaaagacttggctttacaccaggctatcgatcaaataacgtctgcatttgggaagggggcaataatgtggcttgggcgttcgcaaggccttagagatgtacctgttgtgtctactgggtctttcgctttggatatggctctaggaactggtggtcttccaaaggggcgtgtcatagaggtctatggtccagaggcttcaggcaagacaacacttgctctacatgtcattgcagaagcacaaaagaatgggggttactgtgcctttgtagatgcagaacacgctttggatccagctcttgcagagtcaattggtgttgacactaacaatttgctcgtctctcagccagactgcgctgagcaagcactcagtcttgtggacacactgattcgaagtggatctgttgatgttgttgtagtagacagtgtagctgcgcttgttccaaagactgagcttgatggtgagatgggtgatgcacatgttgctcttcaggctaggttgatgagccaagctcttcgcaagcttagccactcactttcactttcgcagacagttttgttatttattaatcagatcagggccaaggtagccacatttggatttggaggaccaactgaggtcacttctggtggtaacgccttgaagttttatgcttctgttcgcttgaacatcaggcgtattggttttttaaaggaaggtgaagagacaataggtagtcaggttgctgtgaagattgtaaaaaataagcatgccccacccttcaagactgcacagtttgagcttgaatttggaaaggggatatgccgcagttctgagctttttgaacttgggttgaagcacaagcttatccaaaagactggcggtgcatattatagattcaatgatatgagtttcaaaggtaaaaataaccttaaatcttaccttactgaaaacaagagtgttgcaaatgatctggagacgaaactaaggagattgatgggaaccgaagcacctaaagagcaggaggcagaagacagttcgccgagtgatttgcctgaagaggttgtcacacctgaagcatcctcagaagaggatatgggagtcgtaatcgaggcttgaccagtgatctgacgtgctggcaagcgagaccagaatttctggagctgttcctgtaaaacaatattttgggtcctgaagtcaccaccgcttggatcgacatgaccctgcggtgttctggtgattccattgtaacagacttcagcccttaccgtgcttttacagtagtgtagcatgaagagaattggcattgtgtgaaatcatgctgatagctgagaggtggaagttgaaggcggtaaggttgtggtctctggctatctgaactctagtgtagtatatagtgtaggcgacggtaaaatgtagtggcgtggtcgtgtatacatgatgctcacattttgagctcctggtttcacgtcgaagccaatttcaaaagcattctttattgagcgcagctagaattacatcgaaaaaaaaaaaaaaaaaaaaaaaaaaaaaaaaa

SEQ ID NO: 5260 - protein, 430 aa, Zea mays
MAILLRRASLRRVIAFAAASSSSSSLHSEIYKQGVCGSMFHCREFASKAKKKKSSGTDSDEESMSKKDLALHQAIDQITSAFGKGAIMWLGRSQGLRDVPVVSTGSFALDMALGTGGLPKGRVIEVYGPEASGKTTLALHVIAEAQKNGGYCAFVDAEHALDPALAESIGVDTNNLLVSQPDCAEQALSLVDTLIRSGSVDVVVVDSVAALVPKTELDGEMGDAHVALQARLMSQALRKLSHSLSLSQTVLLFINQIRAKVATFGFGGPTEVTSGGNALKFYASVRLNIRRIGFLKEGEETIGSQVAVKIVKNKHAPPFKTAQFELEFGKGICRSSELFELGLKHKLIQKTGGAYYRFNDMSFKGKNNLKSYLTENKSVANDLETKLRRLMGTEAPKEQEAEDSSPSDLPEEVVTPEASSEEDMGVVIEA

SEQ ID NO: 5261 - DNA, 1884 bp, Glycine max
  CDS (112)..(1410)
actgttttgaaaaaaaagacgcacaccaacctttcctaattcacactgcacacttcatttctgaacaaaaaaaataaaaattattcctgttttagtgcttctttcttatccatggcgagtctgcttcggaacgctaacacatccctcctcaaacgttctctcttccactccgaccttctaacgcgcttttgctttaaaccgggagtgttgggcacgtctcaagttttaagcttttcaactcgtaaaaggaggtctaaatcagatggaagtgactcaggtgaagagaacatgtctaagaaagatatggcattacaacaagctattgatcaaatcacatctgcatatggaaagggatctatcatgtggcttggtcgttccatggcaccaaaaaatgtacctgtggtgtctactggttcttttgctctggatatagcacttggggttggaggtcttccaaaggggcgtgttgtggaaatatttggtccagaggcttctgggaaaacaactcttgctttgcatatgattgcggaagcacaaaagctaggaggctactgtgcctttgttgatgctgagcatgcacttgataagacacttgcagagtcaattggtgtagatactaagaacttgcttctctcacaacccgattgtggtgaacaagcacttagccttgtggataccttaatccggagtggttcagttgatgcaattgttgttgatagtgtagctgctcttgttcctaaaggcgagcttgatggggagatgggtgatgctcacatggcaatgcaggctaggttgatgagccaggctcttcggaaattgtgccactccttgtcactttcacagtgtatattagtttttataaaccaggtgaggtcaaaaaattctacttttgggggatatggtgggcccactgaagttacttgtggtggtaatgcactgaagttttatgcttctgtgcggctaaatatcaaaagaattgggtttgtcaagaagggtgaagagactttaggaagtcaggttcttgtcaaggttgtgaagaacaagcatgcccctccatttaaaactgcacagtttgagattgagttcggcaagggtataagtagagaagcggagatcatagagttgagcgtaaaatacaaaatcataaagaagagtggttcattttttgaatataatggccggaatttccatggcaaggatgctctaaagagattcctggcggagagtgatggagtacaagaattagcaacaatgctcagggagaagattcttgatgctgagccagaactggagccagaggagcaggagatgatgggagatgttatggaactaatggaagaaatggtatcgcttgattccactgatgaagcagcttctcgtgctcctgcccctgttgctgcagaagcttaaatttgcaaataacctcaaaatatggggtggtctaatctccctgcttcaaaaatgtaccctactcaaaagggccctcacagatgaaggaggatctaaaaggtaaaaacaacggattccttatccttcctagttttgaacacttttcctccttgagagcatgaggcacattacctttgtaaattgaaatttttggtcattttatgcgagccgtgagttatggcgtctaagttttgtgactggaaggcaaaggccttctgatgaggaaggaatcaagggccctaggctgatcaatatttaagtcattgctgattgcttagaaggatgctaatcttcactttgtataattgtctgtgtatatgtattccttgcagtaagattttgcatgcatttatgcctccagctattcaaaattattagatgaagatctgtcagatcatcttatatcagtaaattagacttatttatgtcttaaaa

SEQ ID NO: 5262 - protein, 432 aa, Glycine max
MASLLRNANTSLLKRSLFHSDLLTRFCFKPGVLGTSQVLSFSTRKRRSKSDGSDSGEENMSKKDMALQQAIDQITSAYGKGSIMWLGRSMAPKNVPVVSTGSFALDIALGVGGLPKGRVVEIFGPEASGKTTLALHMIAEAQKLGGYCAFVDAEHALDKTLAESIGVDTKNLLLSQPDCGEQALSLVDTLIRSGSVDAIVVDSVAALVPKGELDGEMGDAHMAMQARLMSQALRKLCHSLSLSQCILVFINQVRSKNSTFGGYGGPTEVTCGGNALKFYASVRLNIKRIGFVKKGEETLGSQVLVKVVKNKHAPPFKTAQFEIEFGKGISREAEIIELSVKYKIIKKSGSFFEYNGRNFHGKDALKRFLAESDGVQELATMLREKILDAEPELEPEEQEMMGDVMELMEEMVSLDSTDEAASRAPAPVAAEA

SEQ ID NO: 5263 - DNA, 1760 bp, Oryza sativa
  CDS (106)..(1395)
ttgggggcaaaaaccctaaaccctagcaatccccaccctcttcctcgccgcacggttccaggggtcgccgctgccgtcgccgccggcggcgccgacgacgacgacatggcgaaccttttttgtctcgcgtcgctgcggcgcgccgtcgccgccgtcgcggcagcagccgcgccctgccccgagagctataagcaagggatctgtggctctactttccactgccggtatttctcgtctaaagccaaaaagaagacaaagtccagtggaactgactctggtgaagagaatctgtcaaagaaagacttggctctacaccaggctattgatcaaataacatctgcatttgggaagggcgcaataatgtggcttggtcgttctgaaggtcgtagagaagtacctgttgtgtcaactgggtctttctctttggatttggcattgggaactggtggacttccaaagggtcgtgttatagaggtgtatggtccagaagcttcaggcaagacaactcttgcacttcacgttattgcagaagcacaaaagcatggcggttattgtgccttcgtagatgcagagcatgccttagatccagctctggctgaatcaattggggtcaacaccagtaatttacttctctctcagccagactgtggcgagcaggcactcagtcttgtggacacactgattcgaagcggctctgttgatgttgttgttgttgatagtgtagcagctcttgtccctaagagtgagcttgacggggagatgggtgatgcacatgttgctctccaggctagattgatgagccaagctcttcgcaagctgagccactctctctcactttcccagacaattttgttattcattaaccagatcaggtctaaagtgaccacatttggaggatttggaggtccaatggaggttacttctggtggaaatgcccttaaattctatgcttccgttagaatgaacatcaagcgtattggtttggtaaagaaaggcgaagagactataggtagtcaagtgcttgtgaagattgtgaaaaacaagcatgccccaccgttcaagacagcacagtttgagctggaatttggtaaagggatatgccgcagttcagagcttattgaacttggattaaagcacaagcttgtcaaaaagttgggtggtgcattttattctttcaacgaagagtcatatcgtggtaaagatgcccttaaatcttacctcaacgaaaatgaaagtatcgcaaaagaactggagacgaatttaaggaaattgatgggaactcaagcacctaaaaagcaggaggatgaaggtgatttcctgagtgatctgcctgaagagagtctcgccactgaaacatcctccgaggaggaactggcagctgtaatagaagcttaatcagtgatgcttaatcagtgatgatagatcaacaagaaggaatatgcgctgagcagttattccactgaaccatacatattttggttcttggagatgtcattttggctgcaccgggcatatagaatgtgtggaattcgtatttgaacatccttcagttgtcaaatgcctggagcgaagtgaggtagagccggggaaggaccggggggcttacgtatggacttgtatggtggctatttagacattgaaagggttattagtagaatgtaaccatgtatatatgtcgcatatctgggattcctcgtcggttctggcttgagatacacttactaaatgcttctgatatttgattattccggttccattcc

SEQ ID NO: 5264 - protein, 429 aa, Oryza sativa
MANLFCLASLRRAVAAVAAAAAPCPESYKQGICGSTFHCRYFSSKAKKKTKSSGTDSGEENLSKKDLALHQAIDQITSAFGKGAIMWLGRSEGRREVPVVSTGSFSLDLALGTGGLPKGRVIEVYGPEASGKTTLALHVIAEAQKHGGYCAFVDAEHALDPALAESIGVNTSNLLLSQPDCGEQALSLVDTLIRSGSVDVVVVDSVAALVPKSELDGEMGDAHVALQARLMSQALRKLSHSLSLSQTILLFINQIRSKVTTFGGFGGPMEVTSGGNALKFYASVRMNIKRIGLVKKGEETIGSQVLVKIVKNKHAPPFKTAQFELEFGKGICRSSELIELGLKHKLVKKLGGAFYSFNEESYRGKDALKSYLNENESIAKELETNLRKLMGTQAPKKQEDEGDFLSDLPEESLATETSSEEELAAVIEA

SEQ ID NO: 5265 - DNA, 1380 bp, Glycine max
  CDS (1)..(1380)
atgacatgttgtcacattccattttccttcttcaaaatttgttcttcctttgaacccctcaaagtcaaacctgcttctatggcgagactgcttcggaacacttcccttctcacacgctccctattcttccctaaggtctttaaactaggaatgattggcacttctcagattttgagcttctcatctaaaggtagaaggcgctctaaatctgatggaagtgactcaggtgaagagaacatgtctaagaaagagttggcccttcagcaagctcttgatcagatcacttccgcatttggaaagggatccatcatgtggcttggtcgttctgtctcaccaaaaaatgtacctgttgtgtctactggttcttttgctcttgatgtagcactaggaattggtggtcttccaaagggacgtgttgtggaaatatatggtccagaggcttctggaaaaacaactcttgctttacatgtgattgcagaggcacaaaagcaaggaggctattgtgtctttgtcgatgccgagcatgcccttgataagacactggcagagtctattggtgtgaatacaacgaacttgcttctctcccaacctgattgtggtgaacaagcactaagtcttgtggataccttaatccgtagtggttcagttgatgtagttgttgttgacagtgtggctgctcttgttcctaaaggtgagcttgatggtgaaatgggtgatgctcacatggcaatgcaggctaggttgatgagccaggctcttcgaaaattgagccatgccttgtcactttctcaaactatattaatttttataaaccaggtgaggtcaaagatttcaacttttgggggatttagtgggcctactgaagttacttgtggtgggaatgcattgaaattctatgcttcagtgcggctaaatatcaagagaatagggtttgtcaagaagggtgaagagattttaggaagtcaggttcttgtcaaggttgtgaagaacaagcttgcccctccatttaaaactgccgagtttgagcttcaatttggcaaaggtatatgtaaagaaacagagattatagacttgagcgtaaatcacaaactcatctcaaaggctggtgccatgttttactataacgaacatagtttccgtggtaaggatgccctaaagaattttctggccgagaatcgaagtgcattagaagaacttgaaatgaagctcagggagaagcttcttaatgctgagacagaaaagatgcaagagtcggatgtaattaatggatatgttaccgaagaaattgcaacagttgattctactaatgacaatgttacagaaaaaattgcaacagttgattctactgatgaagaagctgcagctattgttgaagcatga

SEQ ID NO: 5266 - protein, 459 aa, Glycine max
MTCCHIPFSFFKICSSFEPLKVKPASMARLLRNTSLLTRSLFFPKVFKLGMIGTSQILSFSSKGRRRSKSDGSDSGEENMSKKELALQQALDQITSAFGKGSIMWLGRSVSPKNVPVVSTGSFALDVALGIGGLPKGRVVEIYGPEASGKTTLALHVIAEAQKQGGYCVFVDAEHALDKTLAESIGVNTTNLLLSQPDCGEQALSLVDTLIRSGSVDVVVVDSVAALVPKGELDGEMGDAHMAMQARLMSQALRKLSHALSLSQTILIFINQVRSKISTFGGFSGPTEVTCGGNALKFYASVRLNIKRIGFVKKGEEILGSQVLVKVVKNKLAPPFKTAEFELQFGKGICKETEIIDLSVNHKLISKAGAMFYYNEHSFRGKDALKNFLAENRSALEELEMKLREKLLNAETEKMQESDVINGYVTEEIATVDSTNDNVTEKIATVDSTDEEAAAIVEA

SEQ ID NO: 5267 - DNA, 1272 bp, Glycine max
  CDS (1)..(1272)
atgatcagttcttgctttcatatgcaggtctttaaactaggaatgattggcacttctcagattttgagcttctcatctaaaggtagaaggcgctctaaatctgatggaagtgactcaggtgaagagaacatgtctaagaaagagttggcccttcagcaagctcttgatcagatcacttccgcatttggaaagggatccatcatgtggcttggtcgttctgtctcaccaaaaaatgtacctgttgtgtctactggttcttttgctcttgatgtagcactaggaattggtggtcttccaaagggacgtgttgtggaaatatatggtccagaggcttctggaaaaacaactcttgctttacatgtgattgcagaggcacaaaagcaaggaggctattgtgtctttgtcgatgccgagcatgcccttgataagacactggcagagtctattggtgtgaatacaacgaacttgcttctctcccaacctgattgtggtgaacaagcactaagtcttgtggataccttaatccgtagtggttcagttgatgtagttgttgttgacagtgtggctgctcttgttcctaaaggtgagcttgatggtgaaatgggtgatgctcacatggcaatgcaggctaggttgatgagccaggctcttcgaaaattgagccatgccttgtcactttctcaaactatattaatttttataaaccaggtgaggtcaaagatttcaacttttgggggatttagtgggcctactgaagttacttgtggtgggaatgcattgaaattctatgcttcagtgcggctaaatatcaagagaatagggtttgtcaagaagggtgaagagattttaggaagtcaggttcttgtcaaggttgtgaagaacaagcttgcccctccatttaaaactgccgagtttgagcttcaatttggcaaaggtatatgtaaagaaacagagattatagacttgagcgtaaatcacaaactcatctcaaaggctggtgccatgttttactataacgaacatagtttccgtggtaaggatgccctaaagaattttctggccgagaatcgaagtgcattagaagaacttgaaatgaagctcagggagaagcttcttaatgctgagacagaaaagatgcaagagtcggatgtaattaatggatatgttaccgaagaaattgcaacagttgattctactaatgacaatgttacagaaaaaattgcaacagttgattctactgatgaagaagctgcagctattgttgaagcatga

SEQ ID NO: 5268 - protein, 423 aa, Glycine max
MISSCFHMQVFKLGMIGTSQILSFSSKGRRRSKSDGSDSGEENMSKKELALQQALDQITSAFGKGSIMWLGRSVSPKNVPVVSTGSFALDVALGIGGLPKGRVVEIYGPEASGKTTLALHVIAEAQKQGGYCVFVDAEHALDKTLAESIGVNTTNLLLSQPDCGEQALSLVDTLIRSGSVDVVVVDSVAALVPKGELDGEMGDAHMAMQARLMSQALRKLSHALSLSQTILIFINQVRSKISTFGGFSGPTEVTCGGNALKFYASVRLNIKRIGFVKKGEEILGSQVLVKVVKNKLAPPFKTAEFELQFGKGICKETEIIDLSVNHKLISKAGAMFYYNEHSFRGKDALKNFLAENRSALEELEMKLREKLLNAETEKMQESDVINGYVTEEIATVDSTNDNVTEKIATVDSTDEEAAAIVEA

SEQ ID NO: 5269 - DNA, 1239 bp, Vibrio cholerae O1 biovar eltor str. N16961
  CDS (1)..(1239): transl_table=11
ttgagcatctcgcagcagatcaggttcaaaacgttaactgagccaaacttttttctatacaggggtggacactgtacaaatcaacagtataataaaccccaacatgacaaatcagcgtcgacccgatttcgacacaattacctatcacctgagagtgactatccggagagagtaatggacgagaataaacagaaggcacttgcggccgccctcggtcaaattgaaaagcaatttggtaaaggctccatcatgcgcttaggcgacaaccgcgcgatggatgtagaaaccatttcgaccggttctctgtctctggatatcgcgttgggtgctggtggtctaccaatgggacgtatcgttgagatcttcggccctgaatcttcgggtaaaacgacactgactctggaactgattgctgctgcacaacgtgaaggtaaaacctgtgcgtttatcgatgccgagcacgcactggatccggtttatgccaaaaaattgggcgtgaatatcgatgagctactggtttctcagccagataccggcgagcaagcactggaaatttgtgatgcactggctcgctctggtgctgtggatgtcatcgttgttgactcagtagcggctttgacaccaaaagcggaaattgaaggcgaaatgggcgatagccacatgggtctgcaagcgcgtatgttgtcgcaagcaatgcgtaaactgacgggtaacctcaagcaatccaactgtatgtgtatcttcatcaaccaaattcgtatgaagattggtgtgatgtttggtaacccagaaactaccactggcggtaacgcactgaaattctacgcttctgttcgtttggatattcgccgtactggcgcaatcaaagaaggcgaagaagtggtgggtaacgaaacccgtatcaaggttgtgaagaacaagattgctgcgccgtttaaagaagcgaacactcagatcatgtatggccaaggtttcaatcgtgaaggtgaattgatcgatcttggtgtgaaacacaaaatggttgagaagtcaggcgcttggtacagctataacggcgataaaatcggccaaggtaaagcgaatgcctacaagtatctgaaagaaaacccagaaattgcgaaaactctagataaaaaactgcgtgaaatgctgttaaacccagaaaacatgcagctgatcgctgaaacatcttctgcggcggatgacgtcgaatttggcgcggtgccagaagagttttaa

SEQ ID NO: 5270 - protein, 412 aa, Vibrio cholerae O1 biovar eltor str. N16961
MSISQQIRFKTLTEPNFFLYRGGHCTNQQYNKPQHDKSASTRFRHNYLSPESDYPERVMDENKQKALAAALGQIEKQFGKGSIMRLGDNRAMDVETISTGSLSLDIALGAGGLPMGRIVEIFGPESSGKTTLTLELIAAAQREGKTCAFIDAEHALDPVYAKKLGVNIDELLVSQPDTGEQALEICDALARSGAVDVIVVDSVAALTPKAEIEGEMGDSHMGLQARMLSQAMRKLTGNLKQSNCMCIFINQIRMKIGVMFGNPETTTGGNALKFYASVRLDIRRTGAIKEGEEVVGNETRIKVVKNKIAAPFKEANTQIMYGQGFNREGELIDLGVKHKMVEKSGAWYSYNGDKIGQGKANAYKYLKENPEIAKTLDKKLREMLLNPENMQLIAETSSAADDVEFGAVPEEF

SEQ ID NO: 5271 - DNA, 1062 bp, Escherichia coli O157:H7 EDL933
  CDS (1)..(1062): transl_table=11
  misc_feature (78)..(78): y is t or c
  misc_feature (472)..(472): n is a, g, c or t
  misc_feature (702)..(702): r is g or a
atggctatcgacgaaaacaaacagaaagcgttggcggcagcactgggccagattgagaaacaatttggtaaaggctcyatcatgcgcctgggtgaagaccgttccatggatgtggaaaccatctctaccggttcgctttcactggatatcgcgcttggggcaggtggtctgccgatgggccgtatcgtcgaaatctacggaccggaatcttccggtaaaaccacgctgacgttgcaggtgattgccgcagcgcagcgtgaaggtaaaacctgtgcgtttatcgatgctgaacacgcgctggacccaatctacgcacgtaaactgggcgtcgatatcgacaacctgctgtgctcccagccggacaccggcgagcaggcactggaaatctgtgacgccctggcgcgttctggcgcagtaaacgttatcgtcgttgactccgtggcggcactgacgccgaaagcggaaatcgaangcgaaatcggcgactctcacatgggccttgcggcacgtatgatgagccaggcgatgcgtaagctggcgggtaacctgaagcagtccaacacgctgctgatcttcatcaaccagatccgtatgaaaattggtgtgatgttcggtaacccggaaaccactaccggtggtaacgcgctgaaattctacgcctctgttcgtctcgacatccgtcgtatcggcgcggtgaaagarggcgaaaacgtggtgggtagcgaaacccgcgtgaaagtggtgaagaacaaaatcgctgcgccgtttaaacaggctgaattccagatcctctacggcgaaggtatcaacttctacggcgaactggttgacctgggcgtaaaagagaagctgatcgagaaagcaggcgcgtggtacagctacaaaggtgagaagatcggtcagggtaaagcgaatgcaactgcctggctgaaagataacccggaaaccgcgaaagagatcgagaagaaagtacgtgagttgctgctgagcaacccgaactcaacgccggatttctctgtagatgatagcgaaggcgtagcagaaactaacgaagatttttaa

SEQ ID NO: 5272 - protein, 353 aa, Escherichia coli O157:H7 EDL933
  misc_feature (158)..(158): The Xaa at location 158 stands for Arg, Cys, Gly, or Ser.
MAIDENKQKALAAALGQIEKQFGKGSIMRLGEDRSMDVETISTGSLSLDIALGAGGLPMGRIVEIYGPESSGKTTLTLQVIAAAQREGKTCAFIDAEHALDPIYARKLGVDIDNLLCSQPDTGEQALEICDALARSGAVNVIVVDSVAALTPKAEIEXEIGDSHMGLAARMMSQAMRKLAGNLKQSNTLLIFINQIRMKIGVMFGNPETTTGGNALKFYASVRLDIRRIGAVKEGENVVGSETRVKVVKNKIAAPFKQAEFQILYGEGINFYGELVDLGVKEKLIEKAGAWYSYKGEKIGQGKANATAWLKDNPETAKEIEKKVRELLLSNPNSTPDFSVDDSEGVAETNEDF

SEQ ID NO: 5273 - DNA, 1089 bp, Rickettsia conorii str. Malish 7
  CDS (1)..(1089): transl_table=11
ttgatttttctttctcaagcttatattttaattggtaagtttataatatggaaatttatgtcaaatacagataaggaaagagccattgccgcagcactcgcacaaattgaaaaaagctacggtaaaggttcggtaatgaaactagggcagcgtccgcatgttgatatagaggccgtatcaaccggctcacttgggctagatatagctcttggaatcggcggtgttcccaaaggtagaatcatcgaaatttttggtcctgaaagctcaggtaaaaccactctaacattgcatttaattgcagaagctcaaaaaaagggtggtacatgtgcttttattgatgccgagcatgcattagaccctgcttatgctaaaaaattaggcgtaaatattgatgagcttattatttcacagcccgatacaggtgaacaagccctagaaattgccgatacgttaattcgctccagcggtattgatatgataataatagatagtgttgcggctttagtaccgaaatcagagattgagggcgaaatgggtgatgctcaaatggcttctcaagcaaggttaatgagccaggctttgcgtaaacttactgcatcaattaatcgcaccaattgtattactgttttcatcaatcaaatcagaatgaaaataggtgtgatgttcggtagtcctgaaactacgacaggcggtaatgccttaaaattctatgcttctgttaggatcgatataagaagaatcggctccattaaagataaagaagaagtaataggcagccaaaccaaagtaaaagtagtcaaaaacaaagtatctcctccatttaaaactgcagattttgatataatgtacggttcaggtatttcaaaagaaggcgagataatcgaccttggagttaagcttgatattgttgagaaatccggctcttggttttcctacaagaacgtacgcataggtcaagggcgtgaaaacgtcaaacaatatttaaaagaacatccacaaatttccaacgaaattgagaaaataatacgtgaaaaatcgtcaaaaattactaatataaatcttgatcaaacggaggaagaaaatgattga

SEQ ID NO: 5274 - protein, 362 aa, Rickettsia conorii str. Malish 7
MIFLSQAYILIGKFIIWKFMSNTDKERAIAAALAQIEKSYGKGSVMKLGQRPHVDIEAVSTGSLGLDIALGIGGVPKGRIIEIFGPESSGKTTLTLHLIAEAQKKGGTCAFIDAEHALDPAYAKKLGVNIDELIISQPDTGEQALEIADTLIRSSGIDMIIIDSVAALVPKSEIEGEMGDAQMASQARLMSQALRKLTASINRTNCITVFINQIRMKIGVMFGSPETTTGGNALKFYASVRIDIRRIGSIKDKEEVIGSQTKVKVVKNKVSPPFKTADFDIMYGSGISKEGEIIDLGVKLDIVEKSGSWFSYKNVRIGQGRENVKQYLKEHPQISNEIEKIIREKSSKITNINLDQTEEEND

SEQ ID NO: 5275 - DNA, 1137 bp, Brucella melitensis 16M
  CDS (1)..(1137): transl_table=11
ttgtggcaacgagcctgccgggcttctagcgagacaagaggatggtgtaagatgtctcaaaattcattgcgacttgttgaggataattcagtggacaagacaaaagctctcgacgcggcattgtcgcaaatcgaacgggcgttcggcaaaggctcaatcatgcgtctgggccagaacgatcaggtggtcgaaatcgaaaccgtatcgaccggctcgctctcgctcgatattgccttgggggttggcggcttgcccaagggacgtatcgtggaaatctatgggccggaaagttccggtaaaaccacgcttgccttgcacaccatcgctgaagcgcagaagaagggcggcatctgcgcattcgtcgatgcggaacatgcgcttgacccggtctatgcgcgcaagctcggtgtcgatcttgaaaatcttctgatctcgcagcccgatacgggtgaacaggcgcttgaaatcaccgatacgctcgtgcgctctggcgccatcgacgttctcgttgtcgactcggtcgcagccctgacgccgcgtgctgaaatcgaaggtgaaatgggggattccctgccgggccttcaggcccgtctcatgagccaggcgctgcgcaagcttactggctccatttcccgttcaaactgcatggtgatcttcatcaaccagatccgcatgaagatcggtgtcatgttcggctcgccggaaacgacaacgggcggcaatgcgctcaagttctatgcttcggttcgcctcgatattcgccgtatcggctccatcaaggagcgcgacgaagtggtgggcaaccagacccgcgtgaaggtggtgaagaacaagctcgctcctccgttcaagcaggtcgaattcgatatcatgtatggcgcgggcgtttccaaggtgggcgagctggtcgatcttggtgtcaaggccggtgtggttgagaagtctggtgcctggttctcctataattcccagcgtctcgggcaggggcgcgagaacgccaagcaatatctcaaggataatccggaagtcgcgcgtgaaatcgaaaccacgcttcgccagaatgccggcctgatcgccgagcagttccttgacgatggcggaccggaagaagatgctgccggcgcggcggaaatgtaa

SEQ ID NO: 5276 - protein, 378 aa, Brucella melitensis 16M
MWQRACRASSETRGWCKMSQNSLRLVEDNSVDKTKALDAALSQIERAFGKGSIMRLGQNDQVVEIETVSTGSLSLDIALGVGGLPKGRIVEIYGPESSGKTTLALHTIAEAQKKGGICAFVDAEHALDPVYARKLGVDLENLLISQPDTGEQALEITDTLVRSGAIDVLVVDSVAALTPRAEIEGEMGDSLPGLQARLMSQALRKLTGSISRSNCMVIFINQIRMKIGVMFGSPETTTGGNALKFYASVRLDIRRIGSIKERDEVVGNQTRVKVVKNKLAPPFKQVEFDIMYGAGVSKVGELVDLGVKAGVVEKSGAWFSYNSQRLGQGRENAKQYLKDNPEVAREIETTLRQNAGLIAEQFLDDGGPEEDAAGAAEM

SEQ ID NO: 5277 - DNA, 1146 bp, Fusobacterium nucleatum subsp. nucleatum ATCC 25586
  CDS (1)..(1146): transl_table=11
gtgaaaaaaatggcagcaaagaaagataaaagtgtaccagattcaaaaataacagataaagaaggaaaagaaaaagcagtcaaagacgctatggcagcgattacaaaaggttttgggtctggacttattatgaaattgggagaaaaaagttctatgaatgtagaatctatcccaacaggaagtataaatttggatatagctttgggaattggtggagtacctaaaggaagaattattgaaatatatggagcagaaagttcaggtaagacaactcttgcattacatgttatagctgaagcacaaaaacaaggtggaacagttgcatttattgatgctgaacatgcacttgatccagtttatgcaaaagcattaggagttgacatagacgaacttttaatttcccaaccagattatggggaacaagcattagaaattgcagatactcttgttagatcaggggctattgatttaatagtaattgactcagttgcagcacttgttccaaaagcagaaatagatggagaaatgtctgatcaacaaatgggattacaagctagacttatgtcaaaaggtttaagaaaattaacaggaaatcttaacaaatataagactacaatgatttttattaaccaaatcagagaaaaaattggtgtaacttatggccctacaactacaactactggtggaaaggcacttaaattctattcatcagttagaatggaagttaaaaagatgggtacagtaaaacaaggtgatgatccaataggaagtgaagttatagtaaaagtaactaagaataaggttgcacctccatttaaagaagcagcatttgaaatactatatggaaaagggatttcaaaggttggagagattatagatgcagctgttgcaaaagatgtaatagttaaagctggttcttggttcagttttagagaccaaagtataggacaaggaaaagaaaaagtaagagcagaattagaaataaatcctgaattattagcacaagttgaaaaagatttaaaggaagccattgcaaaaggtcctgttgataagaaaaagaaaaaatctaaaaaagaagcttcttctgatgacactgatgatgaaaatcttgaaatagatgatgcaattgatgaaaataacgattaa

SEQ ID NO: 5278 - protein, 381 aa, Fusobacterium nucleatum subsp. nucleatum ATCC 25586
MKKMAAKKDKSVPDSKITDKEGKEKAVKDAMAAITKGFGSGLIMKLGEKSSMNVESIPTGSINLDIALGIGGVPKGRIIEIYGAESSGKTTLALHVIAEAQKQGGTVAFIDAEHALDPVYAKALGVDIDELLISQPDYGEQALEIADTLVRSGAIDLIVIDSVAALVPKAEIDGEMSDQQMGLQARLMSKGLRKLTGNLNKYKTTMIFINQIREKIGVTYGPTTTTTGGKALKFYSSVRMEVKKMGTVKQGDDPIGSEVIVKVTKNKVAPPFKEAAFEILYGKGISKVGEIIDAAVAKDVIVKAGSWFSFRDQSIGQGKEKVRAELEINPELLAQVEKDLKEAIAKGPVDKKKKKSKKEASSDDTDDENLEIDDAIDENND

SEQ ID NO: 5279 - DNA, 1062 bp, Chlamydophila pneumoniae TW-183
  CDS (1)..(1062): transl_table=11
atgaatttacctgatagaaaaaaggctctagaagctgctgttgcttatattgaaaagcaattcggcgctgggtccatcatgagtttaggaagacactctgccacacatgaaatctccaccatcaaaacaggagctttatctttagacttagctcttggaattcatggggtccccaaaggacgggtgatcgaaatctttggtcctgaatcctcagggaaaacgacactagctacccatattgtcgcgaatgctcaaaaaatgggcggtgttgctgcctatatagatgctgaacatgctttagatcctagttatgcatctcttattggcgtcaatatcgatgatcttatgatttctcaacccgactgtggtgaagatgcattaagcatagcagaattgctcgcgcgttcaggagctgtcgatgttatcgttattgactctgtagccgctttagttcctaaaagcgaactcgaaggagacatcggtgatgtacacgtaggcctacaagctcgtatgatgtctcaagcattacgcaagctcaccgctaccctatcacgtagccaaacctgtgcagtgttcattaaccaaatccgagagaaaatcggtgttagcttcggaaacccagaaactactacgggaggacgtgccttaaaattctactcttcaatacgattagatattcgccgtataggttcaataaaaggcagtgataactctgacatcggaaatcgaattaaagtgaaggtagctaaaaataaacttgctcctccattcagaatcgcagaatttgacatcctattcaatgaagggatttcttctgcaggttgtatcctagatcttgctgtcgaatataatattattgagaaaaaaggttcttggttcaactatcaagagaagaagttaggacagggaagagaatttgttcgtgaagaacttaaacgtaatagaaagctttttaaggaaattgagaagcgcatctacgatgtaattgcagcgaataaaactccctctgttcatgctaatgaaacacctcaggaagttcctgctcaaacagtagaagcttaa

SEQ ID NO: 5280 - protein, 353 aa, Chlamydophila pneumoniae TW-183
MNLPDRKKALEAAVAYIEKQFGAGSIMSLGRHSATHEISTIKTGALSLDLALGIHGVPKGRVIEIFGPESSGKTTLATHIVANAQKMGGVAAYIDAEHALDPSYASLIGVNIDDLMISQPDCGEDALSIAELLARSGAVDVIVIDSVAALVPKSELEGDIGDVHVGLQARMMSQALRKLTATLSRSQTCAVFINQIREKIGVSFGNPETTTGGRALKFYSSIRLDIRRIGSIKGSDNSDIGNRIKVKVAKNKLAPPFRIAEFDILFNEGISSAGCILDLAVEYNIIEKKGSWFNYQEKKLGQGREFVREELKRNRKLFKEIEKRIYDVIAANKTPSVHANETPQEVPAQTVEA

SEQ ID NO: 5281 - DNA, 1110 bp, Vibrio vulnificus YJ016
  CDS (1)..(1110): transl_table=11
ttgtcgaccctatttcgacataattacctatcacctgagagtgactatctggagagagtaatggacgagaacaaacagaaggcactggccgccgcactaggtcaaattgaaaagcagttcggtaaaggttcaatcatgcgcctaggtgacaaccgtgcgatggatgttgaaaccatctcgacaggttcactatctctggatattgcgctgggtgctggtggcttaccaatgggccgtatcgttgaaatttttggtccagaatcttcaggtaaaaccacgttgacccttgagctgatcgctgcggctcaacgtgaaggcaaaacttgtgcgtttatcgatgccgagcacgcgttggatcctgtgtatgcgaagaagcttggcgttaatatcgaccagttgttggtatctcagcctgacaccggtgaacaagcattggaaatctgtgatgctcttgctcgctcaggtgcggttgacgttattgttgtcgactctgttgcagcattgacgccaaaggcagaaatcgaaggtgagatgggcgactcgcacatgggtcttcaagctcgtatgctatctcaagcgatgcgtaagttaacgggtaacctaaagcagtctaactgtatgtgtatcttcatcaaccagatccgtatgaagatcggtgtgatgtttggtaacccagaaaccacaacgggtggtaatgctctgaaattctacgcttctgttcgtcttgatattcgccgtactggtgcgatcaaagaaggtgatgaggtcgtgggtaacgaaacgcgcatcaaagtggtgaagaataagatcgctgcgccgtttaaagaagccaacactcaaattatgtacggccaaggctttaaccgcgaaggtgaactgattgacctaggcgtgaaatgtaagctgattgaaaaatcaggcgcttggtacagctataacggcgacaaaattggccaaggtaaagcgaacgcttgtaaatacctgaaagaaaacgtagatgtcgcaaaagtactggatacgaaattgcgtgaaatgttgctttctccagcaaacatcaacgatgaatcggcagagttagtcgaagaaatgccagagcaagaagagttttaa

SEQ ID NO: 5282 - protein, 369 aa, Vibrio vulnificus YJ016
MSTLFRHNYLSPESDYLERVMDENKQKALAAALGQIEKQFGKGSIMRLGDNRAMDVETISTGSLSLDIALGAGGLPMGRIVEIFGPESSGKTTLTLELIAAAQREGKTCAFIDAEHALDPVYAKKLGVNIDQLLVSQPDTGEQALEICDALARSGAVDVIVVDSVAALTPKAEIEGEMGDSHMGLQARMLSQAMRKLTGNLKQSNCMCIFINQIRMKIGVMFGNPETTTGGNALKFYASVRLDIRRTGAIKEGDEVVGNETRIKVVKNKIAAPFKEANTQIMYGQGFNREGELIDLGVKCKLIEKSGAWYSYNGDKIGQGKANACKYLKENVDVAKVLDTKLREMLLSPANINDESAELVEEMPEQEEF

SEQ ID NO: 5283 - DNA, 1230 bp, Mycobacterium avium subsp. paratuberculosis K-10
  CDS (1)..(1230): transl_table=11
atgtcggccggcctttcgcggctgctgcgacgcccgcggcgtgtcgaacttgaatcgaacacctgttcggctactgtgggggacgttcgcagcgtcaacttgtcggtggccttctctagtgtcaccgccaaccgaccgataccggtcagaagacacaccgactataggagaggcaccatgacgcaagcccccgaccgcgagaaggctctcgaactggcgatggcccagatcgaaaagagctacgggaaaggctcggtgatgcgtctcggcgacgagatgcgtcaaccgatctcggtcatcccgaccggatccatcgccctggacgtcgccctgggcatcggcggcctgccccgcggccgggtcgtggagatctacggcccggaatcctcgggtaagaccaccgtcgccctgcacgcggtggccaacgcccaggccgccggcggtgtcgcggcgttcatcgacgccgagcacgcgctggaccccgagtacgccaagaagctcggcgtggacaccgattcgctgctggtcagccagccggacacgggggagcaggcgctcgagatcgccgacatgctgatccgctccggcgcgctggacatcctggtcatcgactcggtggccgcgctggtgccgcgcgccgagctggagggcgagatgggggacagccacgtcgggctgcaggcccggctgatgagccaggcgctgcggaaaatgactggcgcgctgaacaattcgggcaccaccgcgatcttcatcaaccagctgcgggagaagatcggggtgatgttcggcagcccggagaccacgacgggtggcaaggcgttgaagttctacgcctcggtgcgcatggacgtgcgccggatcgagacgctcaaggacggcaccaacgcggtcggcaaccgcacccgggtcaagatcgtcaagaacaaggtgtcgccgccgttcaagcaggccgagttcgacatcctctacggccgcgggatcagccgggagggctcgctgatcgacatgggtgtggatcagggcttcatccgcaagtccggttcctggttcacctatgagggcgagcagctcggccagggcaaggagaacgcccgcaccttcttgatggagaacgacgaggtcgccaacgagatcgagaagaagatcaaggaaaagctcggcattggcgcggtcgtgaccgatgacttgtccgatgacggcgtcctgcccgcccccgtcgacttctga

SEQ ID NO: 5284 - protein, 409 aa, Mycobacterium avium subsp. paratuberculosis K-10
MSAGLSRLLRRPRRVELESNTCSATVGDVRSVNLSVAFSSVTANRPIPVRRHTDYRRGTMTQAPDREKALELAMAQIEKSYGKGSVMRLGDEMRQPISVIPTGSIALDVALGIGGLPRGRVVEIYGPESSGKTTVALHAVANAQAAGGVAAFIDAEHALDPEYAKKLGVDTDSLLVSQPDTGEQALEIADMLIRSGALDILVIDSVAALVPRAELEGEMGDSHVGLQARLMSQALRKMTGALNNSGTTAIFINQLREKIGVMFGSPETTTGGKALKFYASVRMDVRRIETLKDGTNAVGNRTRVKIVKNKVSPPFKQAEFDILYGRGISREGSLIDMGVDQGFIRKSGSWFTYEGEQLGQGKENARTFLMENDEVANEIEKKIKEKLGIGAVVTDDLSDDGVLPAPVDF

SEQ ID NO: 5285 - DNA, 1248 bp, Chlamydomonas reinhardtii
  CDS (1)..(1248)
atgcagaccgcaattcaaatgcctagtggtggctgcttgagcagtggggcccgggcccggagcagcgcacgggccactcaacagattctttgcgcgccacgtcgcgacgtcgttgcgaaggcgcggcgcaccaaaactgccacgacaacctatactcagggcgaacgcccggatgccgataccaaggccaagctcttcaacgagacagtcgaccgcatcactcgccgctttggtgacgggtccatcatgcgtctcagcgacagcgtcacggcgaacattgagaccttccccagcggctcactcacgctggacgcggccctgggcggcggctacccccgcggccgcattatcgaggtgtacggtccggaggccagcggcaagaccacgctggccatgcacgcctgcgccgagatccagcgcctgggcggcacggtcgcctacatagacgtggagcacgccttcgaccgcacctacgccgagcgcctgggcatcaacctgaacaacttctggtacgcgcagcccatgacgggcgaggaggcgctggaggtgatggacgagctgtgccgcagcaacgtgtgcgacctggtggtcatcgactcggtggcggcgctggtgccgagggccgagctggagggagacatcggcagcgtgcagatcggcagccaggcccgcctgctgagccaggccctgcgcaagctgtccgcctccgcctccaaaagcaagaccaccctgttcttcatcaaccagctgcggaacaagattggcgtcatgttcggcaaccccgagaccacctcgggcggcaacgcgctcaagtactacagcagcgtgcgcatcgacatccgcaagaaggagacactcagcgagtcggaccaggcctacgccaaccgggtccgcgccaaggtggtgaagaacaaggtggcctcgccgcataaggaggctctgtttgagatctactacggccgtggcattgacttcctgggcggactcatcgacaccgcggagcgcctcaaggtgctcacccgccgcggtgccttctactactacggcgaccagcggctgggccagggccgggagaaggtgttggcggcgctgcgcgaggacgcggagcgcacagccgccattgaggccgcggtgcgggacgtgctgcgggccaaccccgacgcggcgctggtggacacggaggagggcgacgacgacgacggcctgggcaccgcctccaccgtggcgctggacatggacgacgtgtag

SEQ ID NO: 5286 - protein, 415 aa, Chlamydomonas reinhardtii
MQTAIQMPSGGCLSSGARARSSARATQQILCAPRRDVVAKARRTKTATTTYTQGERPDADTKAKLFNETVDRITRRFGDGSIMRLSDSVTANIETFPSGSLTLDAALGGGYPRGRIIEVYGPEASGKTTLAMHACAEIQRLGGTVAYIDVEHAFDRTYAERLGINLNNFWYAQPMTGEEALEVMDELCRSNVCDLVVIDSVAALVPRAELEGDIGSVQIGSQARLLSQALRKLSASASKSKTTLFFINQLRNKIGVMFGNPETTSGGNALKYYSSVRIDIRKKETLSESDQAYANRVRAKVVKNKVASPHKEALFEIYYGRGIDFLGGLIDTAERLKVLTRRGAFYYYGDQRLGQGREKVLAALREDAERTAAIEAAVRDVLRANPDAALVDTEEGDDDDGLGTASTVALDMDDV

SEQ ID NO: 5287 - DNA, 1050 bp, Clostridium thermocellum ATCC 27405
  CDS (1)..(1050): transl_table=11
atgattgagaagaaaaaagctctggagatggttttgggacaaatcgagaagcagtttggcaaaggggcggttatgaagctgggtgaaaacacccacatgaatatagagaccattcccaccggtgctttagggcttgatatagctttgggagtcggaggagtgccgagaggaagaatagttgaaatatttgggcctgaatcatcgggtaagacgacggtcgctctgcatattatcgccgaggcgcaaaaagcaggcggcgaggcggctttcatagatgcggagcatgctttggaccctgtgtatgccaagaacctgggagttgatatagaaaatcttattgtttcccagccggataccggagaacaggctttggaaattgcagaggcacttgtaagaagcggagcgattgacgttattgtaattgactcggttgcggctttggttcccaaagcggaaatagacggtgaaatgggagattcccatgtaggtcttcaggcaaggcttatgtcccaggcattaaggaaacttgccggtgttatcaacaaatccaggacgacggcaatatttattaaccaactcagagaaaaggtaggagttatgtttggcaatcctgaaaccacgccgggcggacgggctttgaaattctatgcttcggtaagactcgatgtaagaaggcttgagtccatcaaacagggaaatgaggtaataggaagcaggacaaaggtcaaagttgttaagaacaaagttgctcctccttttaaagaagcagagtttgatattatttacggccagggtatttcaaaggaaggcaatattctcgatgttgcggtaaatctcgatattgtaaacaaaagcggcgcgtggttctcctacaacggtcagaagattggccagggaagggagaatgcaaagcaattcctgaaggaaaatcctgaaatagcgaaggaaattgagacaaagattagagaaaactataaccagacatttctaatgagtattaatgcccaggttgatactgatgatgaagtggatttggaagatgaagaataa

SEQ ID NO: 5288 - protein, 349 aa, Clostridium thermocellum ATCC 27405
MIEKKKALEMVLGQIEKQFGKGAVMKLGENTHMNIETIPTGALGLDIALGVGGVPRGRIVEIFGPESSGKTTVALHIIAEAQKAGGEAAFIDAEHALDPVYAKNLGVDIENLIVSQPDTGEQALEIAEALVRSGAIDVIVIDSVAALVPKAEIDGEMGDSHVGLQARLMSQALRKLAGVINKSRTTAIFINQLREKVGVMFGNPETTPGGRALKFYASVRLDVRRLESIKQGNEVIGSRTKVKVVKNKVAPPFKEAEFDIIYGQGISKEGNILDVAVNLDIVNKSGAWFSYNGQKIGQGRENAKQFLKENPEIAKEIETKIRENYNQTFLMSINAQVDTDDEVDLEDEE

SEQ ID NO: 5289 - DNA, 1071 bp, Burkholderia vietnamiensis G4
  CDS (1)..(1071): transl_table=11
atggaagatagcaagaagggctccgggatgaccgccgagaagagcaaggcgctggcggccgcactcgcgcagatcgagaagcagttcggcaaagggtcgatcatgcggatgggcgacggcgacgtgaaggaagacatccaggtcgtctccacgggctcgctgggcctcgatatcgcgctcggcgtcggcggcctgccgcgcggccgggtggtcgaaatctacggtccggaatcgtccggcaagaccacgctcacgctgcaggtgatcgccgagctgcagaagctgggcggcaccgcagccttcatcgacgccgagcacgcgctcgacgtccagtacgcggcgaagctcggcgtgaacgtgccggagctgctgatctcgcagccggacaccggcgaacaggcgctcgaaatcaccgacgcgctcgtgcgctcgggctcgatcgacatgatcgtcatcgactcggtcgcggcactggtgccgaaggccgaaatcgaaggcgagatgggcgattcgctgccgggtctgcaggcgcgtctgatgtcgcaggcgctgcgcaagctgacgggtacgatcaagcgcacgaactgcctcgtgatcttcatcaaccagatccggatgaagatcggcgtgatgttcggcaacccggaaaccacgacgggcggcaatgcactgaagttctattcgtcggtgcgtctggacatccgccggatcggctcgatcaagaagaacgacgaggtgatcggcaacgaaacccgcgtgaaggtcgtcaagaacaaggtatcgccgccgttccgcgaagcgatcttcgacatcctctacggcgaaggcatttcgcgtcagggcgagatcatcgatctcggcgtgcaggcgaaaatcgtcgacaaggccggcgcctggtacagctacaacggcgagaagatcggtcagggcaaggacaacgcgcgtgaattcctgcgcgagaatcccgaaatcgcacgcgagatcgagaaccgcattcgcgagtcgctcggtgtcgtcgcgatgcccgatggcgtggtcgacgaagccgaggcgatggacgaagaagagtga

SEQ ID NO: 5290 - protein, 356 aa, Burkholderia vietnamiensis G4
MEDSKKGSGMTAEKSKALAAALAQIEKQFGKGSIMRMGDGDVKEDIQVVSTGSLGLDIALGVGGLPRGRVVEIYGPESSGKTTLTLQVIAELQKLGGTAAFIDAEHALDVQYAAKLGVNVPELLISQPDTGEQALEITDALVRSGSIDMIVIDSVAALVPKAEIEGEMGDSLPGLQARLMSQALRKLTGTIKRTNCLVIFINQIRMKIGVMFGNPETTTGGNALKFYSSVRLDIRRIGSIKKNDEVIGNETRVKVVKNKVSPPFREAIFDILYGEGISRQGEIIDLGVQAKIVDKAGAWYSYNGEKIGQGKDNAREFLRENPEIAREIENRIRESLGVVAMPDGVVDEAEAMDEEE

SEQ ID NO: 5291 - DNA, 1086 bp, Xanthobacter autotrophicus Py2
  CDS (1)..(1086): transl_table=11
atgactcagtcgacactcagactcgtcgaaggttcttccatggataagaccaaggcgctggatgccgctctctcccagatcgagcggcacttcggcaagggctcgatcatgcggctcggcaagggcggcaaagccttggaaatcgagagcgttcccaccggctcgctcgggctggacatcgccatcggcatcggcggcctgcccaagggccgcgtcgtggagatcttcgggccggaatcctccggcaagaccaccctggcgctgcacacggtcgcggaagcgcagaagcggggcggcacctgcgccttcatcgatgccgagcacgcgctcgaccccatctatgcgcgcaagctgggcgtcaatctcgacgacctgctcatctcccagcccgacgcgggcgagcaggcgctggaaatcgccgacacgctggtgcgctcgggcgccatcgacgtgctggtggtcgattcggtggccgcgctcaccccgcgcgccgaactggatggcgagatgggcgacagccagcccggcatgcaggcgcgcctcatgagccaggcgctgcgcaagctcacggcctccatctccaagtccaacaccatggtcatcttcatcaaccagatccggatgaagatcggcgtcatgtacggctcgccggagaccaccaccggcggcaatgcgctcaagttctacgcctcggtgcggctcgatatccgccgtatcggcatgatcaaggagcgcgacgaggtggtgggcaaccagacccgcgtgaaggtggtgaagaacaagctggcgccgcccttcaagcaggtggaattcgacatcatgtacggcgaggggatttccaagaccggcgaactgctggatctcggggtcaaggccggcgtggtggagaagtccggcgcctggttctcccacgacagccagcgcctcggccagggccgcgagaacgccaagaccttcctgaagcagaatcaggagattgccggccgcatcgaggcggcgatccgccagaatgcgggcctcatcgccgagaagatcctcgccggcacgccggaggatgacgccgacggcgacccggctgacgcctga

SEQ ID NO: 5292 - protein, 361 aa, Xanthobacter autotrophicus Py2
MTQSTLRLVEGSSMDKTKALDAALSQIERHFGKGSIMRLGKGGKALEIESVPTGSLGLDIAIGIGGLPKGRVVEIFGPESSGKTTLALHTVAEAQKRGGTCAFIDAEHALDPIYARKLGVNLDDLLISQPDAGEQALEIADTLVRSGAIDVLVVDSVAALTPRAELDGEMGDSQPGMQARLMSQALRKLTASISKSNTMVIFINQIRMKIGVMYGSPETTTGGNALKFYASVRLDIRRIGMIKERDEVVGNQTRVKVVKNKLAPPFKQVEFDIMYGEGISKTGELLDLGVKAGVVEKSGAWFSHDSQRLGQGRENAKTFLKQNQEIAGRIEAAIRQNAGLIAEKILAGTPEDDADGDPADA

SEQ ID NO: 5293 - DNA, 1089 bp, Rickettsia akari str. Hartford
  CDS (1)..(1089): transl_table=11
ttgatttttcttgctcaagcttatattttaattggtaagtttataatatggaaatttatgtcaaatacagataaggaaagagccattgccgcagcactcgtgcaaatcgaaaaaagctacggtaaaggttctgtgatgaaactcgggcaacgtccgaatgttgatatagaagccgtatctaccggctcacttgggctagatatagctcttggaatcggtggtgttcctaaaggcagaattatcgagatttttggtcctgaaagctcaggtaaaaccactctaacactacatttaatcgccgaagcacagaaaaagggtggtacatgtgcttttattgatgccgagcatgcattagaccctgcttatgcgaaaaaacttggcgtaaatattgacgagcttattatttcgcagcctgatacaggtgaacaagccttagaaattactgatactttaattcgctccggcggtattgatatgataataatagatagtgttgcggctttagtaccgaaatcagagattgagggcgagatgggtgatgcacaaatggcttctcaagcaagattaatgagccaggcactccgtaaacttaccgcatcaattaatcgtaccaattgtattactgttttcatcaaccaaatcagaatgaaaataggtgtgatgttcggcagtcctgaaactacgacaggcggtaatgctttgaaattctatgcttctgttaggatcgatataagaagaataggctccattaaagataaagaagaagtgataggcagccaaactagagtaaaagtagtcaaaaacaaagtatctcctccattcaaaactgcagattttgatataatgtacggttcaggtatttcaaaagaaggcgagataatcgatcttggagttaagcttgatattgttgagaaatccggctcttggttttcctataataacgtacgcattggacaaggacgtgaaaacgtcaaacaatatttaaaagaacatccacaaatttccaacgaaattgagaaaataatacgtgaaaaatcgtcaaaaattattaatataaatcttgatcaaatggaggacgaaaatgattga

SEQ ID NO: 5294 - protein, 362 aa, Rickettsia akari str. Hartford
MIFLAQAYILIGKFIIWKFMSNTDKERAIAAALVQIEKSYGKGSVMKLGQRPNVDIEAVSTGSLGLDIALGIGGVPKGRIIEIFGPESSGKTTLTLHLIAEAQKKGGTCAFIDAEHALDPAYAKKLGVNIDELIISQPDTGEQALEITDTLIRSGGIDMIIIDSVAALVPKSEIEGEMGDAQMASQARLMSQALRKLTASINRTNCITVFINQIRMKIGVMFGSPETTTGGNALKFYASVRIDIRRIGSIKDKEEVIGSQTRVKVVKNKVSPPFKTADFDIMYGSGISKEGEIIDLGVKLDIVEKSGSWFSYNNVRIGQGRENVKQYLKEHPQISNEIEKIIREKSSKIININLDQMEDEND

SEQ ID NO: 5295 - DNA, 1077 bp, Desulfococcus oleovorans Hxd3
  CDS (1)..(1077): transl_table=11
atgagtaacgcagaaaagaccaaggcggttgaaagcgcgattacccagatcgagcggcagttcggcaagggcgccatcatgaagctgggcaccggaaccgtgatcaatgttccgtccatatccaccggctccattgccctggatgtggccctgggcgtgggcgggcttcccaggggccgggtgaccgagatatacgggcaggagtcgtcgggcaagaccaccattgcccttcataccgttgccgaggcccagaaaaagggtggcattgccgcctttatcgacgccgagcacgctctggacacggcctatgccaaaaagctgggggtcaacaccgatgaactgctggtctcccagcccgacaccggcgagcaggccctggagatcgcggacatgctggtgagaagcggcgccatcgacatcctggtaatcgactcggtggcggccctggtgcccaaggccgagatcgagggcgagatgggcgactcccacatgggactgcaggcccggcttatgtcccaggccctgcgaaagctcaccggcgtgatcggcaaaaccaatacatccattatttttatcaaccagatccgtgaaaagatcggcgtgtttttcggcaaccccgagaccacgcccggcggcaacgccctgaagttttacgcgtctgtgcggctggacattcgccgcagcgcggccatcaaggacggccaggaggtggtgggcaaccgggtgcgggtcaaggtggtcaagaacaagatcgcgccccccttcaagaccgtggagtttgacatgatgtatggcgaaggcatatcgaaaaccggtgaactgctggacatcggcgtggaaaacaacattattgaaaagagcggctcgtggtactcatataacggcgagcgcatcggccagggccgggagaatgtgaagcagttttttgccgacaagcccgaggtgtttaacgaactctatgccaaagtgcgcgagagcgttggccttgccggcgggcagcccgccgcggtggagaaaccggacaaggccgacaaggccgataaggcggcaaaggccactgaagcggataaagcatag

SEQ ID NO: 5296 - protein, 358 aa, Desulfococcus oleovorans Hxd3
MSNAEKTKAVESAITQIERQFGKGAIMKLGTGTVINVPSISTGSIALDVALGVGGLPRGRVTEIYGQESSGKTTIALHTVAEAQKKGGIAAFIDAEHALDTAYAKKLGVNTDELLVSQPDTGEQALEIADMLVRSGAIDILVIDSVAALVPKAEIEGEMGDSHMGLQARLMSQALRKLTGVIGKTNTSIIFINQIREKIGVFFGNPETTPGGNALKFYASVRLDIRRSAAIKDGQEVVGNRVRVKVVKNKIAPPFKTVEFDMMYGEGISKTGELLDIGVENNIIEKSGSWYSYNGERIGQGRENVKQFFADKPEVFNELYAKVRESVGLAGGQPAAVEKPDKADKADKAAKATEADKA

SEQ ID NO: 5297 - DNA, 1077 bp, Salmonella enterica subsp. arizonae serovar 62:z4,z23:--
  CDS (1)..(1077): transl_table=11
atgacaggagtaataatggctatcgacgaaaacaaacagaaagcgttggcggcagcactgggccaaattgaaaagcaatttggtaaaggctccatcatgcgtctgggtgaagaccgctctatggatgtggaaactatctccaccggttcgctttcactggatatcgcactcggtgcgggcggtctgccgatgggccgtatcgtcgaaatttacgggccggaatcttccggtaaaacgaccctgacgctgcaagtcattgccgcagcgcagcgtgaaggtaaaacctgtgcgtttatcgatgcggaacacgcgcttgaccccgtttacgcccgcaagctgggagtcgatatcgataacctgctctgttctcagccggacaccggcgagcaggcgctggaaatctgtgacgcgctggcgcgttcaggcgcggtggacgtcattgtggtcgactccgtagcggcgctaacgccgaaagcggaaattgaaggcgaaatcggcgactctcacatgggcctcgcggcgcgtatgatgagccaggcgatgcgtaagctggcggggaacctgaaacagtccaacacgctgttgattttcatcaaccagatccgtatgaagattggcgtgatgttcggcaacccggaaaccaccaccggcggtaacgcgctgaaattctacgcctctgttcgtcttgatatccgtcgtatcggcgcggtgaaagagggagataacgtcgtgggtagcgaaacgcgcgtgaaagtagtgaaaaacaaaatcgccgcgccgtttaagcaggccgagttccagatcctctatggcgaaggtatcaacttctatggcgaactggttgacctgggcgtgaaagagaagctgatcgagaaagcgggcgcatggtacagctacaacggcgagaagattggtcagggtaaagcgaacgcgaccacgtggctgaaagagaacccggcgacagcgaaagagatcgagaaaaaagtgcgtgaattactgttaagcaatcagaattcttcgcccgatttcgccgttgacgatagcgaaggcgtagcagagaccaacgaagatttttaa

SEQ ID NO: 5298 - protein, 358 aa, Salmonella enterica subsp. arizonae serovar 62:z4,z23:--
MTGVIMAIDENKQKALAAALGQIEKQFGKGSIMRLGEDRSMDVETISTGSLSLDIALGAGGLPMGRIVEIYGPESSGKTTLTLQVIAAAQREGKTCAFIDAEHALDPVYARKLGVDIDNLLCSQPDTGEQALEICDALARSGAVDVIVVDSVAALTPKAEIEGEIGDSHMGLAARMMSQAMRKLAGNLKQSNTLLIFINQIRMKIGVMFGNPETTTGGNALKFYASVRLDIRRIGAVKEGDNVVGSETRVKVVKNKIAAPFKQAEFQILYGEGINFYGELVDLGVKEKLIEKAGAWYSYNGEKIGQGKANATTWLKENPATAKEIEKKVRELLLSNQNSSPDFAVDDSEGVAETNEDF

SEQ ID NO: 5299 - DNA, 1041 bp, Mycobacterium abscessus
  CDS (1)..(1041): transl_table=11
atggcgcaggcaccggatcgcgagaaggctctcgagctcgcgctcgcacaaatcgacaagagcttcggcaagggctcggtcatgcggctcggcgacgaggtgcgccagcccatctccgtgatcccgaccggctccatcgcactggacgtggcgctcggcatcggcggtctgccccgcggccgtgtcatcgagatctatggtccggagtcctcgggtaagaccaccgtggctctgcatgccgtcgccaacgcgcagcgtgccggcggtatcgccgcgttcatcgacgctgagcacgcactcgatccggagtacgccaagaagctcggtgtcgatactgactcgctgttggtatcgcagcccgataccggtgagcaggctctggaaatcgccgacatgctggtgcgttccggcgccatcgacctcatcgtcattgactcggtggccgcgctggtgccacgcgccgagatcgaaggtgagatgggtgacagccatgtcggtctgcaggcccgcttgatgagccaggcgttgcgcaagatgactggtgcgctgaacaactccggtaccaccgcaatcttcatcaaccagctgcgcgagaagatcggcgtgatgttcggttcacccgaaaccaccaccggtggtaaggctttgaagttctactcctcggtgcgcctggatgtgcgtcgcatcgagactctcaaggacggcaccgatgcggtgggtaaccgcacccgcgtcaaggtggtcaagaacaaggtgtcgccgccgttcaagcaggccgagttcgacatcctctacggcaagggcatctcgaaggagggctcgctcatcgatatgggcgtggagcagggctttattcgtaagtccggttcctggttcacctatgaaggcgagcagctgggccagggcaaggagaacgcccgtaacttcctgctggagaacgtcgatgtcgccaatgagatcgagaagaagatcaaggaaaagcttggtatcggagcggtgctgaccgatgacgaagtcgtcccggccccagtcgatttctga

SEQ ID NO: 5300 - protein, 346 aa, Mycobacterium abscessus
MAQAPDREKALELALAQIDKSFGKGSVMRLGDEVRQPISVIPTGSIALDVALGIGGLPRGRVIEIYGPESSGKTTVALHAVANAQRAGGIAAFIDAEHALDPEYAKKLGVDTDSLLVSQPDTGEQALEIADMLVRSGAIDLIVIDSVAALVPRAEIEGEMGDSHVGLQARLMSQALRKMTGALNNSGTTAIFINQLREKIGVMFGSPETTTGGKALKFYSSVRLDVRRIETLKDGTDAVGNRTRVKVVKNKVSPPFKQAEFDILYGKGISKEGSLIDMGVEQGFIRKSGSWFTYEGEQLGQGKENARNFLLENVDVANEIEKKIKEKLGIGAVLTDDEVVPAPVDF

SEQ ID NO: 5301 - DNA, 1218 bp, Clavibacter michiganensis subsp. sepedonicus
  CDS (1)..(1218): transl_table=11
atgtcggcggcgccgcataacgtgcacctcgcggagatcacccgtcgccttgtcggcaccggaccccgcggccagcgggagcggagcgacagcctgcaggcaacccaccttcgacacgaggagcaccccatggcatcatcggcagaccgcgagaagtcactcgagaccgcgctcgcacagatcgaccggcagttcggcaagggctcggtcatgcgactgggcagcgacgagcgtgcgcctgtcgccgtcatccccaccggctccgtcgcgctggacgtggcgctcggcatcggtgggctcccgcgcggacgcatcgtcgagatctacggcccggagtcctcgggaaagaccacgctcacgctgcacgccatcgccaacgcgcagcgcgccggcggcatcgcggcgttcatcgacgcggagcacgcgctcgacccggagtacgcgaagaagctcggcgtcgacatcgacgcgctcctcgtctcccagccggacacgggtgagcaggcgctggagatcgccgacatgctcgtgcgctccggctccatcgacctcgtcgtcatcgactccgtcgcggcgctcgtgccgcgtgccgagatcgagggcgagatgggcgactcgcacgtgggcctccaggcgcgcctcatgtcgcaggcgctccgcaagctcaccggtgggctcaaccagacgcagaccaccatgatcttcatcaaccagctccgcgagaagatcggcgtgttcttcggcagccccgagaccaccgcgggcggcaaggcgctcaagttctacgcgtcggtccgcctcgacatccgccgcatcgagaccctcaaggacggcaccgacgcggtcggcaaccgcacccgcgtcaaggtcgtcaagaacaagatggcgccgcccttcaagcaggcggagttcgacatcctctacggcacgggcatctcccgcgagggcagcctcatcgacttcggcgtcgagcacgagatcgtccgcaagtcgggcgcctggtacacgtacgatggcgaccagctgggccagggcaaggagaattcgcgcaagcacctcctgaacaacccggagatcgcggcggagatcgagcagaagattaaggtcaagctcggcctcgtgaaggacccgaacgccgacgcagctgccgcggccgacgccgcgccggctcccgtcgtggccgtggcgcccaaggcgtccgcacgcaagagcgcctga

SEQ ID NO: 5302 - protein, 405 aa, Clavibacter michiganensis subsp. sepedonicus
MSAAPHNVHLAEITRRLVGTGPRGQRERSDSLQATHLRHEEHPMASSADREKSLETALAQIDRQFGKGSVMRLGSDERAPVAVIPTGSVALDVALGIGGLPRGRIVEIYGPESSGKTTLTLHAIANAQRAGGIAAFIDAEHALDPEYAKKLGVDIDALLVSQPDTGEQALEIADMLVRSGSIDLVVIDSVAALVPRAEIEGEMGDSHVGLQARLMSQALRKLTGGLNQTQTTMIFINQLREKIGVFFGSPETTAGGKALKFYASVRLDIRRIETLKDGTDAVGNRTRVKVVKNKMAPPFKQAEFDILYGTGISREGSLIDFGVEHEIVRKSGAWYTYDGDQLGQGKENSRKHLLNNPEIAAEIEQKIKVKLGLVKDPNADAAAAADAAPAPVVAVAPKASARKSA

SEQ ID NO: 5303 - DNA, 1065 bp, Cupriavidus taiwanensis
  CDS (1)..(1065): transl_table=11
atggacgacaagaaggcaggtgccggcgtgagcgccgagaagcaaaaggcgcttgccgccgcgctctcccagatcgagaagcagttcggcaagggctcgatcatgcgcctgggcgacggcgaggtcgaaaaggacattcaggtggtttccaccggttcgctcggcctggacatcgcacttggcgtcggtggcctgccgcgcggccgcgtggtcgagatctacgggccggaatcctcgggcaagaccacgctgacgctgcaggtggtggccgagatgcagaagctgggcggcacctgcgcctttatcgatgccgagcacgcactggacgtcaattacgcttccaagctcggcgtcaatgtcggcgacctgctgatctcgcagcccgacaccggcgagcaggccctggaaatcaccgacgcgctggtgcgttcgggttcgatcgacctgatcatcatcgactcggtggccgcactggtgcccaaggccgaaatcgaaggcgaaatgggcgattcgctgcccggcctgcaggcccgcctgatgagccaggcgctgcgcaagctgaccggcaccatcaagcgcaccaactgcctggtgatcttcatcaaccagatccgcatgaagatcggcgtgatgttcggctcgcccgaaaccaccaccggcggcaatgcgctgaagttctacgcctcggtgcgcctggacatccgccgcatcggctcgatcaagaagggcgacgacgtgatcggcaacgagaccaaggtcaaggtggtcaagaacaaggtctcgccgccgttccgcgaggccttcttcgacatcctctacggccagggcatctcgcgccagggcgagatcatcgacctgggcgtggatgccaagatcgtcgagaagtccggcgcctggtacagctacaacggcgagaagatcggccagggcaaggacaacgcccgcgaatacctgcgcgagaaccccgacattgccgccgaaatcgaaaacaaggtgcgcgcggcactgggtgtggtcgccatgaaccccacggccgcagccgtggcggcaacggtcgaagactga

SEQ ID NO: 5304 - protein, 354 aa, Cupriavidus taiwanensis
MDDKKAGAGVSAEKQKALAAALSQIEKQFGKGSIMRLGDGEVEKDIQVVSTGSLGLDIALGVGGLPRGRVVEIYGPESSGKTTLTLQVVAEMQKLGGTCAFIDAEHALDVNYASKLGVNVGDLLISQPDTGEQALEITDALVRSGSIDLIIIDSVAALVPKAEIEGEMGDSLPGLQARLMSQALRKLTGTIKRTNCLVIFINQIRMKIGVMFGSPETTTGGNALKFYASVRLDIRRIGSIKKGDDVIGNETKVKVVKNKVSPPFREAFFDILYGQGISRQGEIIDLGVDAKIVEKSGAWYSYNGEKIGQGKDNAREYLRENPDIAAEIENKVRAALGVVAMNPTAAAVAATVED

SEQ ID NO: 5305 - DNA, 1044 bp, Exiguobacterium sibiricum 255-15
  CDS (1)..(1044): transl_table=11
gtgagtgatcgtaaagcagcacttgaaatggcattgcgtcagattgagaaacaatttggtaaaggttcaatcatgaaactaggtgaaagtgcagatcagagagtatccgtaatctcttctggatcaatcacattagatatagcactcggtgcaggtggatatccacgtggacgggtaatcgaagtctatggtccggaatcttccggtaaaacgacagtttcgcttcatgcgattgctgaagtccaaaaacaaggcggacaggcggcattcatcgatgccgagcacgcacttgatccggcttatgccagcaaactcggtgtcaacattgacgaattactgttatcacaaccggatacaggagagcaggcgcttgaaatcgcagaggcattagtccgttctggtgctgttgatatcctcgtcgtcgactcagtagcggcacttgtcccgaaagccgagatcgaaggcgaaatgggtgactcgcacatgggtctccaggctcgtttgatgagtcaggcgttgcgtaaattgtccggtgcgacaaacaaatccaaaacaatcgtcatcttcatcaaccagattcgtgaaaaaatcggtgtcatgttcggtaacccggaaacgactccaggtggacgtgccttgaaattctattcatcggtccgtcttgaagtccgtcgtgcagaagcactgaaaaacggaacagatatcgtcggaaaccggacgaaactgaaagtcgttaaaaacaagatcgctccgccgttcaaacaagcggaagtcgacatcatgtacggacaaggaatctctaaattcggcgagttgattgatcttggaacagatctcgatatcgtccaaaaaagtggtgcttggtattcatacaattcagagcgtcttggtcaaggacgtgaaaatgcgaaacaatacatgattgaacatccggatgttgcggatgaggtcgaacgattgattcgtgaacatcacggtctcgtcgaccggaaagaaccggttgactttgaagaaggtcaagacgaagatctgtttgcagaataa

SEQ ID NO: 5306 - protein, 347 aa, Exiguobacterium sibiricum 255-15
MSDRKAALEMALRQIEKQFGKGSIMKLGESADQRVSVISSGSITLDIALGAGGYPRGRVIEVYGPESSGKTTVSLHAIAEVQKQGGQAAFIDAEHALDPAYASKLGVNIDELLLSQPDTGEQALEIAEALVRSGAVDILVVDSVAALVPKAEIEGEMGDSHMGLQARLMSQALRKLSGATNKSKTIVIFINQIREKIGVMFGNPETTPGGRALKFYSSVRLEVRRAEALKNGTDIVGNRTKLKVVKNKIAPPFKQAEVDIMYGQGISKFGELIDLGTDLDIVQKSGAWYSYNSERLGQGRENAKQYMIEHPDVADEVERLIREHHGLVDRKEPVDFEEGQDEDLFAE

SEQ ID NO: 5307 - DNA, 1041 bp, Mycobacterium marinum M
  CDS (1)..(1041): transl_table=11
atggcgcaagctcccgaccgcgaaaaggcactcgaactggcgatggcccagatcgagaagagttatggcaaaggttcggtgatgcgccttggcgacgaggtacggcaaccgatttcgatcatcccgaccggatccatcgcactcgatgttgccctgggcatcggcggtctgccacgtggccgggtgatcgagatctacggcccggaatcctcgggtaagaccaccgtggcattgcacgcggtggccaacgcccaggccgccggcggcgtcgcggcattcatcgatgccgagcatgcgctggatcccgagtacgccaaaaagcttggtgtcgataccgattccctgctggtcagccagccggacaccggtgaacaggcgctcgagatcgccgacatgctgatccgttcgggggcgctcgacatcgtggtgatcgactcggtggccgcactggtgccacgcgcggagctcgaaggcgaaatgggggatagccatgtcggcctgcaggcccggctgatgagccaggcgctgcggaagatgactggcgcattgaacaattcgggaaccacggcgatcttcatcaaccagctccgcgacaagatcggggtgatgttcggctcacccgagacgacgacgggtggaaaggcgctgaagttctacgcgtcggtgcgcatggatgtgcgtcggatcgaaacgctcaaggacggcaccaatgcggtcggtaaccgcacccgggtcaagatcgtcaagaacaaggtctcgccaccgttcaaacaggccgagttcgacatcctctacggcaggggtatcagcagggaaggctcgctgatcgatatgggtgtggatcagggcttcatccggaaatccggtgcgtggttcacctacgagggcgaacagctcgggcagggcaaggagaatgcccgcaacttcctgctggagaacggcgaagtggccaacgagatcgagaagaagatcaaagaaaagctcggtatcggtgcagtggtgactgatgacggtgtccttcccgcccccgtcgacttctga

SEQ ID NO: 5308 - protein, 346 aa, Mycobacterium marinum M
MAQAPDREKALELAMAQIEKSYGKGSVMRLGDEVRQPISIIPTGSIALDVALGIGGLPRGRVIEIYGPESSGKTTVALHAVANAQAAGGVAAFIDAEHALDPEYAKKLGVDTDSLLVSQPDTGEQALEIADMLIRSGALDIVVIDSVAALVPRAELEGEMGDSHVGLQARLMSQALRKMTGALNNSGTTAIFINQLRDKIGVMFGSPETTTGGKALKFYASVRMDVRRIETLKDGTNAVGNRTRVKIVKNKVSPPFKQAEFDILYGRGISREGSLIDMGVDQGFIRKSGAWFTYEGEQLGQGKENARNFLLENGEVANEIEKKIKEKLGIGAVVTDDGVLPAPVDF

SEQ ID NO: 5309 - DNA, 1080 bp, Nostoc punctiforme PCC 73102
  CDS (1)..(1080): transl_table=11
atggctatcaacaccgatacttctggcaagcaaaaagcgctgactatggtgctcaaccagattgagcgcagctttggtaaaggagcaattatgcgcctgggcgatgccacccggatgcgggtggagacaatttccagtggggcgcttaccctagatttagcattgggtggtggtttacccaaggggcgggtaatagaaatttatgggccggaaagttccggtaagactacagtagcgctacatgcgctcgccgaagtgcaaagaaatggcggtattgctgcctttgttgatgctgaacacgccctagaccctacttatgctgctgcattgggtgtagatattgacaatttgctgatttcccaacctgacactggcgaatcagctttagaaattgtcgatcagcttgttcgctctgctgcggttgatattgtagttattgactcagtagcagcactggttccccgcgctgaaattgaaggcgacatgggtgatgcccatgttggtctacaagcgcgattaatgagccaagctctacgtaaaattacgggtaatattggtaaatctggttgtaccgtaattttcattaaccagttgcggcaaaaaatcggtgttacttacggtagcccagaaactactactggtggtaacgcattgaaattttacgcttcggtgcgcttggatattcgtcggattcaaaccttgaaaaaaggtacagatgaatatggtaatcgcgttaaggtcaaagtcgccaaaaataaagtagcgccgccttttagaatagcggaatttgacattatttttggtaaaggtatttctaccttgggttgtgttgttgacctagcagaagaaactggcattattatccgcaaaggagcttggtatagttacaacggcgataatatctcccaaggacgagacaacgccattaagtatctagaagaaaagcctgaatttgctgaagaaattaagaaactggtgcgtgaaaagttagataaaggcgctgttgtttctgctaactccgtagctaaagccagtgaagaagatgaagaggaagaagttgatttagagccagaagaataa

SEQ ID NO: 5310 - protein, 359 aa, Nostoc punctiforme PCC 73102
MAINTDTSGKQKALTMVLNQIERSFGKGAIMRLGDATRMRVETISSGALTLDLALGGGLPKGRVIEIYGPESSGKTTVALHALAEVQRNGGIAAFVDAEHALDPTYAAALGVDIDNLLISQPDTGESALEIVDQLVRSAAVDIVVIDSVAALVPRAEIEGDMGDAHVGLQARLMSQALRKITGNIGKSGCTVIFINQLRQKIGVTYGSPETTTGGNALKFYASVRLDIRRIQTLKKGTDEYGNRVKVKVAKNKVAPPFRIAEFDIIFGKGISTLGCVVDLAEETGIIIRKGAWYSYNGDNISQGRDNAIKYLEEKPEFAEEIKKLVREKLDKGAVVSANSVAKASEEDEEEEVDLEPEE

SEQ ID NO: 5311 - DNA, 1257 bp, Bifidobacterium longum DJO10A
  CDS (1)..(1257): transl_table=11
atggcatgtccgtcatacggtggaggcatccgattcgcacacgacttcgacaaggagaagatcatggcacttgagaccaagccggccaaggacccggcagccgaggacaagcacgagctcgatcccaagcgcaaggcggcgctggacaccgcgctggcgcaggtcgagaagagttttggcaaaggttccgcaatgcgactgggcgaccagcccgagcagaacgtcgaggtgattcccaccggttcgttggctctcgatatggcgctcggcatcggcggcctacccaagggccgcatcgtggagatctacggccccgaatcatccggtaagaccacgctcgcattgcatgtggtggccaatgcccagaagaagggcggcgtggcggcctacatcgatgccgaacacgcgctcgacccggcctacgcccgcaagctcggcgtggacaccgactcactcatcgtctcccagccggataacggcgagcaggccctcgaaatcgctgacatgctgattcgctccggtgcgcttgacgtcatcgtcatcgactcggtcgccgctttggtgccgaaggccgaaatcgaaggcgaaatgggagacagccatgttggtttgcaggcccgactcatgagtcaggcgctgcgcaagatgaccggcgcgttggctcaggccggcaccaccgccatcttcatcaaccagctgcgtgagaagatcggcgtgttcttcggcaaccctgaaaccaccaccggtggtaaagctctgaagttctacgcctccgtgcgtctcgacatccgccgcatccagaccttgaagaacggcgacgaagcggtgggcaaccgcacgcgcgtcaaggtggtcaagaacaagatggccccgcctttcaagtccgccgaattcgacatgctctacggtgaaggcatttcccgtgagggctcggtgatcgacatggcccagcaggttggcgtggttaagaagtccggttcgtggttcacctatgagggtgatcagctcggtcagggacgagagaaggtccgtcagttccttaaggacaacccggccatcaccgaggagattgagaacaaggtcaaggccgagttcggtctgatcggttccgccgatcagttcgcggaagatggcgaagccgcagcagcggccgccgtcagcgaggctgctgcggctgacgtggccaaggacagcaaggccgcagcggcgcctgctgccaaaacgacccgtgccaaggccggcacagctaaggcctga

SEQ ID NO: 5312 - protein, 418 aa, Bifidobacterium longum DJO10A
MACPSYGGGIRFAHDFDKEKIMALETKPAKDPAAEDKHELDPKRKAALDTALAQVEKSFGKGSAMRLGDQPEQNVEVIPTGSLALDMALGIGGLPKGRIVEIYGPESSGKTTLALHVVANAQKKGGVAAYIDAEHALDPAYARKLGVDTDSLIVSQPDNGEQALEIADMLIRSGALDVIVIDSVAALVPKAEIEGEMGDSHVGLQARLMSQALRKMTGALAQAGTTAIFINQLREKIGVFFGNPETTTGGKALKFYASVRLDIRRIQTLKNGDEAVGNRTRVKVVKNKMAPPFKSAEFDMLYGEGISREGSVIDMAQQVGVVKKSGSWFTYEGDQLGQGREKVRQFLKDNPAITEEIENKVKAEFGLIGSADQFAEDGEAAAAAAVSEAAAADVAKDSKAAAAPAAKTTRAKAGTAKA

SEQ ID NO: 5313 - DNA, 1068 bp, Wolbachia pipientis
  CDS (1)..(1068): transl_table=11
atggcacataatccagaagaaagaaataatgataagcaaaaagcactagataatgcaataagtcaaattgaaaaagcattcggtaaaggtgcaataatgaaactaaagcaaaatcctgtagaaaaaatagacacgatatctacagggtcgattgcacttgattcagctctgggtgttgggggattgccaaaaggacgtataattgagatatttggccctgagagttctggtaaaactacccttgctttgcatgtaattgctgaagcacagaaaaaaggaggtttatgtgcatttatcgatgcggaacacgcactggatgttatatatgctcgtaaacttggagtgaaaactgatgatttggtaatttcacaaccagacactggagagcaggcgttgcatattgttgagtatttagtgtgttctagtgcagttgatgtaatagttattgattctgttgcagcactaactccaagagctgaaattgaaggggatatgggcgatcagcacatgggactacaagcaagacttctaagccatggactcaggaaactaacttctgtagtttcaaaagcaaactgtatattgatatttatcaaccaaattcgtatgaaaataggagtagtatatggaaatcctgaaactaccactggtggaaatgcgttaaaattctatacttctataagacttgatataagaaaagttggtgcgataaaggataaggagaatattacgggtaatgaaacgagagttaaagttgtaaaaaataaagttgctcctccgtttagagaggcaaaatttgatataatgtacaatgaaggcatatcaaaacttggagaaataatagatataggagcaaaacttggtgtacttgaaaaggcaggtgcttattattcatataacaatacgcgtcttggccaaggaagagaaaatgtaaaaagttacctcaaggcaaacaaagaaattgcaagtgaaatagaaacaaaaatcagagatttatttaaaaatcatgataattccattgcaatagaagaggaacgcgaacaacttctagaagaatcagtattctaa

SEQ ID NO: 5314 - protein, 355 aa, Wolbachia pipientis
MAHNPEERNNDKQKALDNAISQIEKAFGKGAIMKLKQNPVEKIDTISTGSIALDSALGVGGLPKGRIIEIFGPESSGKTTLALHVIAEAQKKGGLCAFIDAEHALDVIYARKLGVKTDDLVISQPDTGEQALHIVEYLVCSSAVDVIVIDSVAALTPRAEIEGDMGDQHMGLQARLLSHGLRKLTSVVSKANCILIFINQIRMKIGVVYGNPETTTGGNALKFYTSIRLDIRKVGAIKDKENITGNETRVKVVKNKVAPPFREAKFDIMYNEGISKLGEIIDIGAKLGVLEKAGAYYSYNNTRLGQGRENVKSYLKANKEIASEIETKIRDLFKNHDNSIAIEEEREQLLEESVF

SEQ ID NO: 5315 - DNA, 1125 bp, Leifsonia xyli subsp. xyli str. CTCB07
  CDS (1)..(1125): transl_table=11
atgtcccccgtaccgtcgaactcgtcagcgaagtccaaaggagaaccgcacatgccatcacccgcagaccgcgagaaggcgctcgtgaccgcgctcgcacagatcgaccgtcagttcggaaaaggctcggtcatgcgactgggcagcgacgagcgcgctcctgtcgaggtcgtcccgaccgggtcgatcgccctggatgtcgcgcttggcatcggcggtcttccgcgtggccgcatcgtcgagatctatggcccggaatcgtcgggtaagaccaccctgaccctgcacgcgatcgccaacgcgcagcgcgcgggcggcatcgctgccttcatcgacgcggagcacgcgctcgacccggactacgcccgcaagctcggcgtcgacatcgacgcactgctggtctcccagccagacaccggtgagcaggcgctggagatcgcggacatgctggtgcgttccggctcgatcgacttgatcgtcatcgactccgtcgccgcgctcgtcccccgtgccgagatcgagggcgagatgggcgacgcgcacgtcggtctgcaggcccgtctcatgtcgcaggcgctccgtaagctcaccggtgcgctcagccagacgaacaccacgatgatcttcatcaaccagctccgcgagaaagtgggagtgttcttcggcagcccggagaccacagccggtggaaaggcgctcaagttctacgcctcggtccgtctcgacatccgccgcatcgagacgctcaaagacggcaccgacgcggtcggaaaccgcacccgcgttaaggtcgtcaagaacaagatggcaccgcccttcaaacaggcggaattcgacatcctgtacggtgtcggcatctcccatgagggcagccttctcgatttcggtgtggagcacgcgctcgtcaagaagtccggtgcctggtacacttacgagggcgaccagctgggccagggcaaagagaactcgcgcaactttctcatcgccaacccggacatcgccgcggagatcgagaacaaaatcaagatcaagctcggcatcgtggccgatccgaacgccgacgccgaaccgaccgctgcggccggctctctggaggagaagctgccggcccgcaagggcgcctga

SEQ ID NO: 5316 - protein, 374 aa, Leifsonia xyli subsp. xyli str. CTCB07
MSPVPSNSSAKSKGEPHMPSPADREKALVTALAQIDRQFGKGSVMRLGSDERAPVEVVPTGSIALDVALGIGGLPRGRIVEIYGPESSGKTTLTLHAIANAQRAGGIAAFIDAEHALDPDYARKLGVDIDALLVSQPDTGEQALEIADMLVRSGSIDLIVIDSVAALVPRAEIEGEMGDAHVGLQARLMSQALRKLTGALSQTNTTMIFINQLREKVGVFFGSPETTAGGKALKFYASVRLDIRRIETLKDGTDAVGNRTRVKVVKNKMAPPFKQAEFDILYGVGISHEGSLLDFGVEHALVKKSGAWYTYEGDQLGQGKENSRNFLIANPDIAAEIENKIKIKLGIVADPNADAEPTAAAGSLEEKLPARKGA

SEQ ID NO: 5317 - DNA, 1095 bp, Thiobacillus denitrificans ATCC 25259
  CDS (1)..(1095): transl_table=11
atgcggacgctgctccgcttccatttaaacccaggagagagaaccatggcatcccccgcattgacagacgacaaatcgaaggcactcgccgccgcgctcggacagatcgaaaagcagttcggcaagggctcggtcatgcgcttgggcgaccatgacgtttcgcgcgacatccaggccgtctccaccggctcgctcggactcgacatcgcgctcggcgtcggcggcctgccgcgcggccgcgtgatcgagatctacggcccggagtcgtccggcaagaccacgctcacgctgcaggtcatcgccgaaatgcaaaaaatgggcggcactgccgcgttcatcgacgccgaacacgcgctcgatccgagctacgcgcacaagctcggcgtcgacgtcgacaacctgctggtctcgcaacccgacaccggcgaacaggcgctcgaaatcgccgacatgctggtgcgctcgggcagcgtcgacgtcgtcgtcgtcgactcggtcgccgccttgacgccgaaggccgaaatcgaaggcgagatgggcgactcacacatggggctccaggcgcggctgatgagccaggccctgcgcaagctcaccgccaacatcaagcggacgaatacgctggtcatctttattaatcaaattcgcatgaagatcggcgtcatgttcggcaaccccgagacgactaccggcggcaatgcactcaagttctacgccagcgtgcgcctcgacatccgccgcaccggcgcgatcaagaagggcgacgagatcatcggcaacgaaaccaaggtcaaggtcgtcaagaacaaggtctcgccgccgttcaaggaagcctacttcgacatcctctacggccagggcatctcgcgcgaaggcgagatcatcgaactcggcgtcgcccacaaactcgtcgacaagtccggcgcctggtacgcctacaacggcgaaaagatcggccagggcaaggacaacgcgcgcgaattcctaaaagaacacccggaaatcgcgcacgagatcgaggccaaggttcgcgctgccgtcggcgtcaacaaccccacgatcgcggtcgaggatgaagacgaagtcgaggcctga

SEQ ID NO: 5318 - protein, 364 aa, Thiobacillus denitrificans ATCC 25259
MRTLLRFHLNPGERTMASPALTDDKSKALAAALGQIEKQFGKGSVMRLGDHDVSRDIQAVSTGSLGLDIALGVGGLPRGRVIEIYGPESSGKTTLTLQVIAEMQKMGGTAAFIDAEHALDPSYAHKLGVDVDNLLVSQPDTGEQALEIADMLVRSGSVDVVVVDSVAALTPKAEIEGEMGDSHMGLQARLMSQALRKLTANIKRTNTLVIFINQIRMKIGVMFGNPETTTGGNALKFYASVRLDIRRTGAIKKGDEIIGNETKVKVVKNKVSPPFKEAYFDILYGQGISREGEIIELGVAHKLVDKSGAWYAYNGEKIGQGKDNAREFLKEHPEIAHEIEAKVRAAVGVNNPTIAVEDEDEVEA

SEQ ID NO: 5319 - DNA, 1032 bp, Carboxydothermus hydrogenoformans Z-2901
  CDS (1)..(1032): transl_table=11
atgaatgataaactaaaagccttagagcttaccatttcccaaattgaaaagcagtttgggaaaggctcaattatgcgcctgggtgaaaacaccggaaaatttcaggtggaagtaattcctactggttctctggctctggatttagccttaggggtaggtggagttcccagaggccgggtggttgaaatttttggccccgaatcttccggaaaaactaccgtggctttgcatattatagcggaagcgcaaaaaatgggtggtatcgcagcatttattgatgccgaacatgcgttagatccggtttatgcccaaaaattaggagttgatattgaaaatctcttagtttcccagcccgataccggcgaacaggctttagagatagccgaaagcttggtgagaagcggtgcgattgacgtgattgtgattgattcggtggctgctttagttccgcgggcggagattgaaggagaaatgggtgatgctcatgtcggtttacaggcccgccttatgtctcaggctttaagaaagctcaccggggccataagtaaatcaaaaactgtggcgatctttatcaaccaaatgcgggaaaaagtaggggttatgtttggaaacccggaaactactcccggaggacgggccctgaaattttatgcgtcaattcgcatggatgttcggaagatagatgtcataaaacaaggaaatgatattattggcagccgcacgcgggtaaaaatcgttaaaaacaaagttgcccctccttttaaacaggcggattttgatattatgtacggggaagggatttccaaggaaggaagtttgttggatgttgctgttgagttaaaaattgttcaaaaggtcgggtcttggtattcttacaatgatgagcgattgggtcagggccgggaaaatgccaaagagtttttacggcagaacccggaaatttacagagaaattgagcaaaagatccgggagcaagtattgaactctccagaatcgtcgagttttaaaaattccgaggagtttgaggaataa

SEQ ID NO: 5320 - protein, 343 aa, Carboxydothermus hydrogenoformans Z-2901
MNDKLKALELTISQIEKQFGKGSIMRLGENTGKFQVEVIPTGSLALDLALGVGGVPRGRVVEIFGPESSGKTTVALHIIAEAQKMGGIAAFIDAEHALDPVYAQKLGVDIENLLVSQPDTGEQALEIAESLVRSGAIDVIVIDSVAALVPRAEIEGEMGDAHVGLQARLMSQALRKLTGAISKSKTVAIFINQMREKVGVMFGNPETTPGGRALKFYASIRMDVRKIDVIKQGNDIIGSRTRVKIVKNKVAPPFKQADFDIMYGEGISKEGSLLDVAVELKIVQKVGSWYSYNDERLGQGRENAKEFLRQNPEIYREIEQKIREQVLNSPESSSFKNSEEFEE

SEQ ID NO: 5321 - DNA, 1047 bp, Moorella thermoacetica ATCC 39073
  CDS (1)..(1047): transl_table=11
atgcaacgcgtggtcataaatgaaaaacaacgggctctggaaatggccctgagccagattgagcgccatttcggtaaaggttccatcatgcggctgggtgaaaccggcgcccgcctcaatgttgaggccatctccaccggagccctgcccctggatctggccctgggagtaggggggttgccccgggggcgggtaatagagatctttggcccggaatcctccggtaaaactactgtagccctacatgtcattgccgaagcccagcgggccgggggtacagcagcctttatcgatgccgaacatgccctggacccagtctacgcccacaacctgggagtagatacggataacctgctggtgtcccagcccgataccggggaacaggccctggagatagctgaagccttggtacgcagcggggctattgacgttatcgtcatcgactcggtggccgccctggtaccccgggccgaactggagggagagatgggcgatgcccatgtaggtctccaggcgcggttaatgtcccaggctttgcgtaaattggcagggattatctccaaatcgcggacggtggccattttcatcaaccagctacgggaaaaggtgggagtcctcttcggcaaccctgagactacccccggtggccgtgccctgaagttttatgcttccgtacgtctggatgtccgtaaagtagaacagctaaaagccgggacagagatagtcggcaatcgaaccagggtcaaggttgttaagaataaggtagcaccaccttttcgccaggccgaatttgacattatctacggccggggaatcgaccgcgagggctgcctcctggatatggggactgaactggatatcattaaaaagagcggtgcctggtattccctgggggaagaccgcctgggacagggacgcgaagccgccaaggatttcctccgagaacaccccgatctggctgccgccctcgagaccaagatccgggaaaaagcaggcttaattaactttacggccgggaaagaagatgccacttcgggggaagactga

SEQ ID NO: 5322 - protein, 348 aa, Moorella thermoacetica ATCC 39073
MQRVVINEKQRALEMALSQIERHFGKGSIMRLGETGARLNVEAISTGALPLDLALGVGGLPRGRVIEIFGPESSGKTTVALHVIAEAQRAGGTAAFIDAEHALDPVYAHNLGVDTDNLLVSQPDTGEQALEIAEALVRSGAIDVIVIDSVAALVPRAELEGEMGDAHVGLQARLMSQALRKLAGIISKSRTVAIFINQLREKVGVLFGNPETTPGGRALKFYASVRLDVRKVEQLKAGTEIVGNRTRVKVVKNKVAPPFRQAEFDIIYGRGIDREGCLLDMGTELDIIKKSGAWYSLGEDRLGQGREAAKDFLREHPDLAAALETKIREKAGLINFTAGKEDATSGED

SEQ ID NO: 5323 - DNA, 1071 bp, Burkholderia thailandensis E264
  CDS (1)..(1071): transl_table=11
atggaagaaagcaagaaaggctccgggctgactgccgaaaagagcaaggcgcttgccgccgcgctcgcgcagatcgagaagcagttcggcaaagggtcgatcatgcggctcggcgacggcgaggcggtcgaggatatccaggtggtgtccacgggctcgctcggtctcgatatcgcgctcggcgtcggcggcctgccgcgcggccgcgtggtcgaaatctacgggccggaatcgtccggcaagacgacgctcacgctgcaggtggttgccgagatgcagaagctcggcggcaccgcggcgttcatcgacgcggagcatgcgctcgacgtccagtatgcgtcgaagctcggcgtgaacgtgccggagctgctgatctcgcagccggacacgggcgagcaggcgcttgaaatcgtcgacgcgctggttcgctcgggctcgatcgacatgatcgtcatcgactcggtcgcggcgctcgtgccgaaggccgaaatcgaaggcgagatgggcgacgcgctgcccggcctgcaggcccgcctgatgtcgcaggcgctgcgcaagctgacgggctcgatcaagcgcacgaactgcctcgtgatcttcatcaaccagatccggatgaagatcggcgtgatgttcggcaatccggaaaccacgacgggcggcaacgcgctcaagttctattcgtcggtgcgtctcgacatccgccggatcggctcgatcaagaagaacgacgaggtgatcggcaacgaaacgcgcgtgaaggtcgtcaagaacaaggtgtcgccgccgttccgcgaggcgatcttcgacatcctgtacggcgaaggcatttcgcgccagggcgagatcatcgatctcggcgtgcaggcgaagatcgtcgacaaggcgggcgcatggtacagctataacggcgagaagatcggccagggcaaggacaatgcgcgcgaattcctgcgtgagaatccggaaatcgcgcgcgagatcgagaatcgcattcgcgagtcgcttggtgtcgccgtgatgccgcaggacgccggttccgaagccgagatcatggacgaagaggagtaa

SEQ ID NO: 5324 - protein, 356 aa, Burkholderia thailandensis E264
MEESKKGSGLTAEKSKALAAALAQIEKQFGKGSIMRLGDGEAVEDIQVVSTGSLGLDIALGVGGLPRGRVVEIYGPESSGKTTLTLQVVAEMQKLGGTAAFIDAEHALDVQYASKLGVNVPELLISQPDTGEQALEIVDALVRSGSIDMIVIDSVAALVPKAEIEGEMGDALPGLQARLMSQALRKLTGSIKRTNCLVIFINQIRMKIGVMFGNPETTTGGNALKFYSSVRLDIRRIGSIKKNDEVIGNETRVKVVKNKVSPPFREAIFDILYGEGISRQGEIIDLGVQAKIVDKAGAWYSYNGEKIGQGKDNAREFLRENPEIAREIENRIRESLGVAVMPQDAGSEAEIMDEEE

SEQ ID NO: 5325 - DNA, 1071 bp, Novosphingobium aromaticivorans DSM 12444
  CDS (1)..(1071): transl_table=11
atggcggctcagctcaagctcatcgaggaaggtaagaccaaggacatggatcgtcagaaggcgctcgacgcggcccttgcgcagattgaccgcgcgttcggcaagggatcggccatgcggctcggttcgaaggaagcgatgcaggtggaagccgtttctaccggatcgctggggctggacatcgcgctcggcatcggcggcctgccgcgcggccgcatcatcgagatctacgggccggaaagctcgggcaagaccacgctggcgctccacgccatcgcggaagcgcagaagggcggcggcaccgcagccttcatcgacgcagaacacgcgctggacccggtctatgcccgcaagctcggcgtcgacatcgacaatctgatcgtctcgcagcccgacacgggcgagcaggcacttgaaatcaccgacacgctggtgcgttcgaacgcgatcgacgtgctggtggtggactcggtcgccgcgctcgttccccgcgccgaaatcgagggtgagatgggcgatagccacgtcggcctccaggcccgcctgatgagccaggccctgcgcaagctgaccggttcgatcagccgttcgcgctgcatggtgatcttcatcaaccaggtgcgcatgaagatcggtgtgatgtacggcaacccggaaacgacgacgggcggcaacgcgctcaagttctatgcttcggtccgcctcgacatccgccgcaccgggcagatcaaggatcgcgacgagatcgtaggcaacgccacgcgcgtgaaggtcgtcaagaacaaggtcgcgccgccgttcaagcaggtcgaattcgacatcatgtatggcgaaggcatctcgaagatcggcgaaattctcgatctcggcgtgaaggccgggctggtcgagaagtcgggcgcctggttcagctatgattccattcgcatcgggcaggggcgtgagaacgccaagaacttcctgcgcgaaaatcccgaagtttgcagccgtctggaagccgcgatccgcggccgcaccgatcaggttgccgaaggactgatggcgggcccggacgcggacgacgacatctga

SEQ ID NO: 5326 - protein, 356 aa, Novosphingobium aromaticivorans DSM 12444
MAAQLKLIEEGKTKDMDRQKALDAALAQIDRAFGKGSAMRLGSKEAMQVEAVSTGSLGLDIALGIGGLPRGRIIEIYGPESSGKTTLALHAIAEAQKGGGTAAFIDAEHALDPVYARKLGVDIDNLIVSQPDTGEQALEITDTLVRSNAIDVLVVDSVAALVPRAEIEGEMGDSHVGLQARLMSQALRKLTGSISRSRCMVIFINQVRMKIGVMYGNPETTTGGNALKFYASVRLDIRRTGQIKDRDEIVGNATRVKVVKNKVAPPFKQVEFDIMYGEGISKIGEILDLGVKAGLVEKSGAWFSYDSIRIGQGRENAKNFLRENPEVCSRLEAAIRGRTDQVAEGLMAGPDADDDI

SEQ ID NO: 5327 - DNA, 1065 bp, Anaplasma phagocytophilum HZ
  CDS (1)..(1065): transl_table=11
atgaaggactccccctctgataagcagcgggctgttgatgctgctattggtcagattgaacgcgcttttgggcgtggatctattatgaggctgcagaatagccctgtagaagctgttgagtgtgtttctactgggtctattgctctagatgcagctctaggtgttggggggcttcctaggggccgtatcattgagatttttggccctgaaagctcgggtaagactaccttagctcttcatgttattgctgaggctcagaaaaacggtggagcttgcgcctttattgatgccgaacatgctttggatacgttatacgcgagaaagctaggggtatctgtaggagatttgatcgtatctcagcctgacaccggagaacaggcgttgcacattgttgagcatcttgtgaactcgggtgcggtggacgttattgttgtggattctgttgctgctttaactcctcgtgctgaaattgaaggggatatgggagatcagcacatgggtttgcaggctcgtctattgagtcacgcgcttcggaaattgacttctatagtttctaaagccaactgcttgctcgtgtttattaaccaaattcgcatgaaaataggggttgtgtacggtaatcctgaggtcactactggtggtagtgcgctgaagttttacacctctatacgtcttgatattcgcaaggttagtgcactgaaggaaaaagaaaatgttactggacacttggcgcgcgtaaaagtagtcaagaataaggttgcgcctcctttcaagcaagctgagtttgatatcatgtatagtgaaggtatctccaaagttggggagattctggatatgggtgtaagatttggctttatagaaaaagctggctcttattattcacatgaaggtatcaagcttggacaaggccgggagacagctagaagttatctcaagaacaatgctgatctttctcataagttagaagggttgattagggcgaaattattggaaagcatgcgtagcagcgacgtttttggttctgatggacgcgcgccttccgaggaaatagaggaatctttctag

SEQ ID NO: 5328 - protein, 354 aa, Anaplasma phagocytophilum HZ
MKDSPSDKQRAVDAAIGQIERAFGRGSIMRLQNSPVEAVECVSTGSIALDAALGVGGLPRGRIIEIFGPESSGKTTLALHVIAEAQKNGGACAFIDAEHALDTLYARKLGVSVGDLIVSQPDTGEQALHIVEHLVNSGAVDVIVVDSVAALTPRAEIEGDMGDQHMGLQARLLSHALRKLTSIVSKANCLLVFINQIRMKIGVVYGNPEVTTGGSALKFYTSIRLDIRKVSALKEKENVTGHLARVKVVKNKVAPPFKQAEFDIMYSEGISKVGEILDMGVRFGFIEKAGSYYSHEGIKLGQGRETARSYLKNNADLSHKLEGLIRAKLLESMRSSDVFGSDGRAPSEEIEESF

SEQ ID NO: 5329 - DNA, 984 bp, Neorickettsia sennetsu str. Miyayama
  CDS (1)..(984): transl_table=11
atgaacagggaagatgcgcttaagggcgttgtggttcaaattgaaaaaatgtttgggaaaggttccataatgacctttagtcaggagccagcttcagtggagtgcatttctacgggttccataggattggatagtgctcttggtggaggtataccaaaggggcgaattattgagatatttggaccggaaagttctgggaagacgacacttacgcttcacataatagctgaagcgcagaaaaacggcgggacgtgtgcgtttattgacgctgagcatgctttggatcctgtttatgcaagaaggttgggtgtcaaaattgaggagctgttaatttcgcagccggatactggggagcaggctttggaaatagtagatagtcttattaagtctggtgcagtcgatgtgatagttgtcgattctgttgctgctcttactccgaaagcagaaatagaaggagaaatgggagatctacatgttgggcttcaggctagattgcttagtcaggcactgcgaaagatcacagcttctgtatcccgtagtaactgcgttgtggtcttcatcaaccagatccggatgaagatcggtgtcatgtttggtagtcctgaaacaacgacagggggtaatgcattgaaattctattcgtccgttagaattgatattcgcaagattggttcaattaaggataaagaagatgttgtgggtaaccagacacgggtgaaggtggttaaaaataaggtagcgcctccgtttaagcaggctgagtttgatatcatttacactgagggcatttcgaagcttggtgaaataatcgagattggtgtgcgcaataagataatagaaaaggcaggttcgtattattcatacggggatgtcaagcttggtcagggtaaggaaaatgtgaagcagttcttaaaagagaataaagagttagcagcggagttagagaggaaagtgagggattccatgctgcttattgcaacgtag

SEQ ID NO: 5330 - protein, 327 aa, Neorickettsia sennetsu str. Miyayama
MNREDALKGVVVQIEKMFGKGSIMTFSQEPASVECISTGSIGLDSALGGGIPKGRIIEIFGPESSGKTTLTLHIIAEAQKNGGTCAFIDAEHALDPVYARRLGVKIEELLISQPDTGEQALEIVDSLIKSGAVDVIVVDSVAALTPKAEIEGEMGDLHVGLQARLLSQALRKITASVSRSNCVVVFINQIRMKIGVMFGSPETTTGGNALKFYSSVRIDIRKIGSIKDKEDVVGNQTRVKVVKNKVAPPFKQAEFDIIYTEGISKLGEIIEIGVRNKIIEKAGSYYSYGDVKLGQGKENVKQFLKENKELAAELERKVRDSMLLIAT

SEQ ID NO: 5331 - DNA, 1077 bp, Burkholderia xenovorans LB400
  CDS (1)..(1077): transl_table=11
atggaagaaagcaagaaaggctcggctggactgactgctgaaaagagcaaggcactcgctgccgcactcgcgcagatcgaaaagcagttcggcaaagggtcggtcatgcggctcggcgcaggtgaggtaatcgaagacatccaggtggtctcaaccggatcgctcggtctcgacatcgcgctgggcgtcggcggtttgccgcgtggccgtgtggtcgaaatctatggcccggaatcatccggtaaaaccacgctgacgctgcaagtcattgccgaaatgcagaagatcggcggcacggcggcgtttatcgacgcggaacacgcgctggatatccagtacgcgagcaagctcggcgtgaacgtgaacgacctgctggtttcgcagcccgacacaggcgagcaggcgctcgaaattgctgacgcactggtgcgttcgggctcgatcgacatgatcgtgatcgactcggtcgcggcactcgtgccgaaggctgaaatcgaaggcgaaatgggcgactcgctgccgggtctgcaagcgcgtctcatgtcgcaggcgctgcgcaagctcaccggcacgatcaagcgcacgaactgtctcgtgatcttcatcaaccagatccgcatgaagatcggtgtgatgttcggcaatccggaaaccaccacgggcggtaacgcgctgaagttctacgcatcggtgcgtctggacattcgccgcatcggttcgatcaagaagaacgacgaagtgatcggcaacgaaacgcgcgtgaaggttgtcaagaacaaggtatcgccaccgttccgggaagcgattttcgacattctgtacggcgaaggcatctcgcgtcagggcgaaatcatcgacttgggcgtacaggccaagatcgtcgacaaggccggcgcgtggtacagctacagcggcgaacggatcggtcagggcaaggacaacgcgcgtgaattcctgcgtgaaaatccggatatcgctcgcgagatcgaaaaccgtatccgcgaatcgctgggcgtgaatgctatggctgaagccgcgaccgtcgcaagcgctgaagtcgcggacgaagaagagtaa

SEQ ID NO: 5332 - protein, 358 aa, Burkholderia xenovorans LB400
MEESKKGSAGLTAEKSKALAAALAQIEKQFGKGSVMRLGAGEVIEDIQVVSTGSLGLDIALGVGGLPRGRVVEIYGPESSGKTTLTLQVIAEMQKIGGTAAFIDAEHALDIQYASKLGVNVNDLLVSQPDTGEQALEIADALVRSGSIDMIVIDSVAALVPKAEIEGEMGDSLPGLQARLMSQALRKLTGTIKRTNCLVIFINQIRMKIGVMFGNPETTTGGNALKFYASVRLDIRRIGSIKKNDEVIGNETRVKVVKNKVSPPFREAIFDILYGEGISRQGEIIDLGVQAKIVDKAGAWYSYSGERIGQGKDNAREFLRENPDIAREIENRIRESLGVNAMAEAATVASAEVADEEE

SEQ ID NO: 5333 - DNA, 1074 bp, Silicibacter sp. TM1040
  CDS (1)..(1074): transl_table=11
atggcggatctattgaccatgaaggacgacaagaagagcggcgacaagcagaaggccttggacagcgcgcttgcccagatcgaacggcagttcggcaagggctcgatcatgaaactcggcgatggcacagccttgcaagagatcgaggcaagctctaccggctctcttgggctggatattgcgcttggcattggtggtctgccgatgggccggatcgtcgagatctacgggccggaaagctccgggaaaaccacgctgacgctgcactgtattgctgagcagcagaaaaagggcggcgtttgcgcctttgtggatgccgaacacgcgctggacccgcaatatgccaaaaagctgggcgtcgatctggacgagctgctgatttcgcagcccgacaccggcgaacaggcgcttgagatcaccgacacgctggtgcgctccggtgcggtcaacatggtgatcgtcgactcggtggcggctttgaccccgaagtcagagctcgagggcgacatgggtgacagcaacgtcggcgtgcaggcccgcctgatgagtcaggcgatgcgcaagctcaccggttccatcagccgctccaaatgcatggtgatctttatcaaccagattcgcatgaagatcggcgtgatgttcggctcgcccgagaccaccaccggcggcaacgcgctgaagttctactcctcggtgcgactggacatccgccgcatcgggtcgatcaaggaccgcgacgaggttgtcggcaacgccacccgcgtgaaggtcgtcaagaacaaggtcgcaccgccgttcaaacaggtggaattcgacatcatgtatggcgaaggcatctccaagatgggcgaattgctcgatctgggtgtggccgcaggcgtggtcaacaagtccggtgcctggttctcttatggggacgagcggatcgggcaggggcgcgagaatgccaaagggtatctgcgcgaaaactcccgcatcgcactggagatcgaagacaagatccgcgctgcgcatgggcttgatttcgacatgccccccgaagcgcaagacgacgatgttctgtttgaaggctga

SEQ ID NO: 5334 - protein, 357 aa, Silicibacter sp. TM1040
MADLLTMKDDKKSGDKQKALDSALAQIERQFGKGSIMKLGDGTALQEIEASSTGSLGLDIALGIGGLPMGRIVEIYGPESSGKTTLTLHCIAEQQKKGGVCAFVDAEHALDPQYAKKLGVDLDELLISQPDTGEQALEITDTLVRSGAVNMVIVDSVAALTPKSELEGDMGDSNVGVQARLMSQAMRKLTGSISRSKCMVIFINQIRMKIGVMFGSPETTTGGNALKFYSSVRLDIRRIGSIKDRDEVVGNATRVKVVKNKVAPPFKQVEFDIMYGEGISKMGELLDLGVAAGVVNKSGAWFSYGDERIGQGRENAKGYLRENSRIALEIEDKIRAAHGLDFDMPPEAQDDDVLFEG

SEQ ID NO: 5335 - DNA, 1092 bp, Myxococcus xanthus DK 1622
  CDS (1)..(1092): transl_table=11
atggccgtgaatcaggagaaggaaaaggcgatcgaactggcgatgtccgcggtggagcgccagttcggcaaggggtccatcatgcggctcggcaacgacgagccaatgatgcgagacgttcaggccatcccgacgggctccatctcgctggacatcgccctgggcgtgggtggcgtgcccaagggccgcatcatcgaaatcttcgggccggagtcgtccggtaagacgacgctgtgtctccacatcgtcgccgaagcgcagaagcgcggcggcatctgcggctacgtggacgcggagcacgcgctggacgtgggctacgcgcgcaagctgggcgtgcgcaccgatgacctgctgctgagccagccggacaccggtgagcaggcgctggaaatcgcggagatgctggtgcgctcgggcgccatcgacgtgctggtggtggactcggtggccgcgctcgtgccgaaggcggagctcgagggtgagatgggcgacgcgcacatgggtgtgcaggcccgcctcatgagccaggcgctccgcaagctgacgggcaccatcgccaagagccagacgtgcgtcatcttcatcaaccagattcgcatgaagattggcgtgatgttcggcaacccggagacgacgacgggcggtaacgcgctgaagttctacgcgtcgcagcgcctggacatccgccgcatcggcgccatcaagaatggcgacaacgtggtgggcagccgcacccgcgtgaaggtggtgaagaacaaggtcgcgccgccgttcaaggaagtcgagttcgacatcatgtacggcacgggcatctcccgtgagggcgacctcatcgacctcgcctccaacgagaacatcgtggagaagagcggcagctggttctccttcaatggtgagcgcatcggccagggccgggagaacgtgaaggagtacctgcgcgagcacccggagatcgcgaaggacatcgaaggccgcgtgctggagaagtacggcatcggcaagtcgggtgcgcccgtcgccgcggcgccggacgagtccgcgccggccgaaggtggcagcgagaagcgcggccgtgtgaaggccgtgaagtag

SEQ ID NO: 5336 - protein, 363 aa, Myxococcus xanthus DK 1622
MAVNQEKEKAIELAMSAVERQFGKGSIMRLGNDEPMMRDVQAIPTGSISLDIALGVGGVPKGRIIEIFGPESSGKTTLCLHIVAEAQKRGGICGYVDAEHALDVGYARKLGVRTDDLLLSQPDTGEQALEIAEMLVRSGAIDVLVVDSVAALVPKAELEGEMGDAHMGVQARLMSQALRKLTGTIAKSQTCVIFINQIRMKIGVMFGNPETTTGGNALKFYASQRLDIRRIGAIKNGDNVVGSRTRVKVVKNKVAPPFKEVEFDIMYGTGISREGDLIDLASNENIVEKSGSWFSFNGERIGQGRENVKEYLREHPEIAKDIEGRVLEKYGIGKSGAPVAAAPDESAPAEGGSEKRGRVKAVK

SEQ ID NO: 5337 - DNA, 1071 bp, Hyphomonas neptunium ATCC 15444
  CDS (1)..(1071): transl_table=11
gtggacaaggaatccggtgtggataagcaaaaggccctcgaaacggcgctcggcaacattgagcggtcctttggcaagggctccgtcatgcgcctcggcgacaagaaaaccctggatatcgaggcggtttcgaccggctcgctggggctcgacattgcgctcggcattggcggtttgcccaaaggccggatcatcgagatttttggcccggaaagctccggcaagaccacgctgtcgctgcattgtgtagccgaagcccagaagaatggcggcgtctgcgcctttatcgacgcagaacatgcgcttgacccggtctatgcctcgaaactcggcgtcgatctggacgatctgctgatctctcagccagatactggcgaacaggcgcttgagattgccgatacgctcgtgcgttcgggcgctgtggaccttgtggtcatcgactcggttgcggccctcaccccgcgtgcggagattgaaggcgagatgggcgaccagcttcccggcctgcaggcccgcctgatgagccaggcgctgcgcaagctgaccggctcgatctccaagtcgaaatgcatggtcatcttcatcaaccagatccggatgaagatcggtgtgatgtttggcaacccggagacgacgacaggcggtaacgccttgaaattctactcttctgtacgcctcgacatccgccgcatcggccagatcaaggaccgcgaggaggtcatcggcaaccagacgcgcgtcaaggttgtgaagaacaaggtggctccgcctttccggcaggtcgaattcgatattatttatggtgagggcatctccaagacgggcgagcttgtggatctcggcgtcaaggcgaatgtcgtggaaaaatcgggctcctggttctcctataacggggagcgtattggccagggccgcgaaaaggcacggcaattcctcaaggataacccggcggtcgcaaacgagattgaagatgcggttcgccggaatgcgggtcttctcgcagaagagctcctgtctgccggtatggtggctggtgaaggcgatgatgacgccgaggccgccgagggctga

SEQ ID NO: 5338 - protein, 356 aa, Hyphomonas neptunium ATCC 15444
MDKESGVDKQKALETALGNIERSFGKGSVMRLGDKKTLDIEAVSTGSLGLDIALGIGGLPKGRIIEIFGPESSGKTTLSLHCVAEAQKNGGVCAFIDAEHALDPVYASKLGVDLDDLLISQPDTGEQALEIADTLVRSGAVDLVVIDSVAALTPRAEIEGEMGDQLPGLQARLMSQALRKLTGSISKSKCMVIFINQIRMKIGVMFGNPETTTGGNALKFYSSVRLDIRRIGQIKDREEVIGNQTRVKVVKNKVAPPFRQVEFDIIYGEGISKTGELVDLGVKANVVEKSGSWFSYNGERIGQGREKARQFLKDNPAVANEIEDAVRRNAGLLAEELLSAGMVAGEGDDDAEAAEG

SEQ ID NO: 5339 - DNA, 1173 bp, Magnetococcus sp. MC-1
  CDS (1)..(1173): transl_table=11
atgcgactgccatcaaaaggaaacattatggctttggataaagataagagcaaagcactggatgccgcgctggctcaaattgaacgtcagtttggtaaaggcagcatcatgcgcatgagcgaaggtgccgcgaccgatattcctgtggtctccaccggttccctcggcttggatattgccttgggtgtgggcggcctgccccgtggccgtattgtcgaagtgtatggaccagaatcctccggcaaaaccaccatggccctgcatgtggccgcagaaattcagaaagtgggtggggtggccgctttcgtcgatgccgagcatgcactggatcctatctatgcgcgcaagttgggtgtcaatgtggatgagctgatcatctcccagcccgataccggggaacaggccctggaaattaccgatatgctggtacgctctggcgcggtggacttggtggtggtggactcggtggcggcgctgacgccacgggccgagttggaaggggagatgggggactctcacgtgggtctacaagcccgtctgatgtcccaagcgctgcgcaaattaaccggtagcattagccggtcgagctcattggtgctgtttattaaccagatccgtatgaaaatcggtgtcatgtttggtagcccagagaccaccaccggggggaatgccctcaagttctatgcctcggtacgtctggatattcgccgcattggctccattaaggataaagaagaggtggtgggcaaccgcacccgcgtcaaagtggtaaaaaataaaatggcccctcccttccgccagtgcgaatttgatatcacctatggacagggggtctctctgcatggcgaactgctggatatgggcgtggagatgggcgtggtcgaaaagtccggcgcttggtactcctatgacggtgagcgcatcggccaaggccgagaaaatgccaaacgctacatggcagaaaaccccagtgcagccatgaaactggaagatcaaatccgtcttaaagagggcttaagcgctaaacatggtgcgggccaaagccccgcaaccgaaaccaaaggcgtgcccagccccaagagtggttcctctgccaaaggctcgtcgagagcagccaaagccgccgcagccgaagaggattcaaccgaagatagctttgccgacgatgcctaa

SEQ ID NO: 5340 - protein, 390 aa, Magnetococcus sp. MC-1
MRLPSKGNIMALDKDKSKALDAALAQIERQFGKGSIMRMSEGAATDIPVVSTGSLGLDIALGVGGLPRGRIVEVYGPESSGKTTMALHVAAEIQKVGGVAAFVDAEHALDPIYARKLGVNVDELIISQPDTGEQALEITDMLVRSGAVDLVVVDSVAALTPRAELEGEMGDSHVGLQARLMSQALRKLTGSISRSSSLVLFINQIRMKIGVMFGSPETTTGGNALKFYASVRLDIRRIGSIKDKEEVVGNRTRVKVVKNKMAPPFRQCEFDITYGQGVSLHGELLDMGVEMGVVEKSGAWYSYDGERIGQGRENAKRYMAENPSAAMKLEDQIRLKEGLSAKHGAGQSPATETKGVPSPKSGSSAKGSSRAAKAAAAEEDSTEDSFADDA

SEQ ID NO: 5341 - DNA, 1122 bp, Acidovorax sp. JS42
  CDS (1)..(1122): transl_table=11
atggacgccaccgtcaaaggcaacgcaaccgccgtcaacagcgaaaaggccaaggccctgcaagccgccctcgcgcagatcgaaaagcagttcggcaagggcaccatcatgcgcctgggcgagggcgaggccattgaggacatccaggtggtctccaccggctcgctgggcctggacatcgccctgggcgtgggcggcctgccgcgcggccgcgtgatcgagatctacggaccggaaagctcgggcaagaccacgctcacgctgcaggtcatcgccgagatgcagaagcaaggcggccagtgcgctttcgtggatgccgagcatgcgctggatgtgcagtacgccagcaagctcggcgttcagctcaccgacctgctcatcagccagccggacacgggcgagcaggcgctggagatcgtggacagcctggtgcgctcgggtgccgtggacctgatcgtggtggactcggtcgccgccctcacgcccaaggccgaaatcgagggcgagatgggcgacgccctgcccggcctgcaggcacgcctgatgagccaggcgctgcgcaagctcaccgccaccatcaagaagaccaactgcatggtcatcttcatcaaccagatccgcatgaagatcggcgtgatgttcggcagccccgagaccaccaccggcggcaacgcgctgaagttctacgcctcggtgcgcctggacatccgccgtaccggcaccatcaagaagggcgacgaggcgatcggcaacgagaccaaggtgaaggtggtgaagaacaaggtctcgcccccgttcaagacggccgaattcgacatcctgttcggcgagggcatctcgcgcgagggcgagatcatcgacatgggcgtgaacgcgcgcatcctggaaaagagtggcgcctggtatgcctacaacggcgaaaagatcggccagggccgcgacaacgcccgcgagttcctgcgcgagaaccctggcctggccgtggagatcgagaacaaggtgcgcgaaagcctgggcatcgcactgctgcccacgggccacgcgagcccggcggccgatctgcccgaagacaagcctgcgcgcggcaagaaggccgacaagacgggcgagatcgaggcgtaa

SEQ ID NO: 5342 - protein, 373 aa, Acidovorax sp. JS42
MDATVKGNATAVNSEKAKALQAALAQIEKQFGKGTIMRLGEGEAIEDIQVVSTGSLGLDIALGVGGLPRGRVIEIYGPESSGKTTLTLQVIAEMQKQGGQCAFVDAEHALDVQYASKLGVQLTDLLISQPDTGEQALEIVDSLVRSGAVDLIVVDSVAALTPKAEIEGEMGDALPGLQARLMSQALRKLTATIKKTNCMVIFINQIRMKIGVMFGSPETTTGGNALKFYASVRLDIRRTGTIKKGDEAIGNETKVKVVKNKVSPPFKTAEFDILFGEGISREGEIIDMGVNARILEKSGAWYAYNGEKIGQGRDNAREFLRENPGLAVEIENKVRESLGIALLPTGHASPAADLPEDKPARGKKADKTGEIEA

SEQ ID NO: 5343 - DNA, 1131 bp, Actinobacillus pleuropneumoniae serovar 1 str. 4074
  CDS (1)..(1131): transl_table=11
atggcatcggataacaaaaaagcgcaaaagaacacagtaacaaaacaaatcgatccggaacaaaaagaaaaagcattagctgctgctcttgcccaaattgaaaaacaatttggtaaaggttctattatgcgcttaggcgacacgcaagcgcttgatattgaagcggtttcaaccggttcaatcggtttagacgccgcattaggtatcggtggcttaccgatgggacgtatcgttgagatctatgggccggaatcttcaggtaaaacgacgctgactttatcggtcattgcgcaagcacaaaaatcaggtaaaacttgtgcgtttattgatgcggaacacgcgcttgatccggtttatgcacgtaaattaggcgtggataccgatgcattgttaatttcacaaccggataacggtgaacaagcgctcgagatttgtgatgcgttggttcgttccggtgcggttgatgtaattattgtggactcggttgctgcattaacgccgaaagcggaaattgaaggcgatatgggcgattctcatatgggcttacaagcacgtttaatgtcacaagcgttacgtaaattaacggcaaacattaaggcgactaactgcttagtggtgtttatcaaccaaattcgtatgaagatcggtgtgatgttcggtaaccctgaaacaacaaccggcggtaacgcacttaaattctacgcttcggttcgtttagatattcgtcgttcaggtgtagtaaaagacggagatgaagtggtcggtagcgaaacgaaagtgaaaattgtgaaaaataaagttgcgccgccgttccgtgaagttcaattcgacattatgtatggtgaaggtatttcacgtatgaatgaactattaattcttgccgaagcgaatggctttatccaaaaagcgggtgcatggttctcatacgaaggtacgaaaatcggtcaaggtaaaaataatgcaattaaatggttaaaagaaaatccggagattgcagagaaaattgaacaagatattcgtgagcaacttatttcaacaccggaaaaaacatcggcaggtgaacaaaatgtgctagatgccgatgatgtgaatgactttgaagacgaagcgtttaacgaagaagaactataa

SEQ ID NO: 5344 - protein, 376 aa, Actinobacillus pleuropneumoniae serovar 1 str. 4074
MASDNKKAQKNTVTKQIDPEQKEKALAAALAQIEKQFGKGSIMRLGDTQALDIEAVSTGSIGLDAALGIGGLPMGRIVEIYGPESSGKTTLTLSVIAQAQKSGKTCAFIDAEHALDPVYARKLGVDTDALLISQPDNGEQALEICDALVRSGAVDVIIVDSVAALTPKAEIEGDMGDSHMGLQARLMSQALRKLTANIKATNCLVVFINQIRMKIGVMFGNPETTTGGNALKFYASVRLDIRRSGVVKDGDEVVGSETKVKIVKNKVAPPFREVQFDIMYGEGISRMNELLILAEANGFIQKAGAWFSYEGTKIGQGKNNAIKWLKENPEIAEKIEQDIREQLISTPEKTSAGEQNVLDADDVNDFEDEAFNEEEL

SEQ ID NO: 5345 - DNA, 1032 bp, Rickettsia sibirica 246
  CDS (1)..(1032): transl_table=11
atgtcaaatacagataaggaaagagccattgccgcagcactcgcacaaattgaaaaaagctacggtaaaggttcggtaatgaaactagggcagcgtccgcatgttgatatagaggccgtatcaaccggctcacttgggctagatatagctcttggaatcggcggtgttcccaaaggtagaatcatcgaaatttttggtcctgaaagctcaggtaaaaccactctaacattgcatttaattgcagaagctcaaaaaaagggtggtacatgtgcttttattgatgccgagcatgcattagaccctgcttatgctaaaaaattaggcgtaaatattgatgagcttattatttcacagcccgatacaggtgaacaagccctagaaattgccgatacgttaattcgctccagcggtattgatatgataataatagatagtgttgcggctttagtaccgaaatcagagattgagggcgaaatgggtgacgctcaaatggcttctcaagcaaggttaatgagccaggctttgcgtaaacttactgcatcaattaatcgcaccaattgtattgctgttttcatcaatcaaatcagaatgaaaataggtgtgatgttcggtagtcctgaaaccacgacaggcggtaatgccttaaaattctatgcttctgttaggatcgatataagaagaatcggctccattaaagataaagaagaagtaataggcagccaaaccaaagtaaaagtagtcaaaaacaaagtatctcctccatttaaaactgcagattttgatataatgtacggttcaggtatttcaaaagaaggcgagataatcgaccttggagttaagcttgatattgttgagaaatccggctcttggttttcctacaagaacgtacgcataggtcaagggcgtgaaaacgtcaaacaatatttaaaagaacatccacaaatttccaacgaaattgagaaaataatacgtgaaaaatcgtcaaaaattactaatataaatcttgaccaaacggaggaagaaaatgattga

SEQ ID NO: 5346 - protein, 343 aa, Rickettsia sibirica 246
MSNTDKERAIAAALAQIEKSYGKGSVMKLGQRPHVDIEAVSTGSLGLDIALGIGGVPKGRIIEIFGPESSGKTTLTLHLIAEAQKKGGTCAFIDAEHALDPAYAKKLGVNIDELIISQPDTGEQALEIADTLIRSSGIDMIIIDSVAALVPKSEIEGEMGDAQMASQARLMSQALRKLTASINRTNCIAVFINQIRMKIGVMFGSPETTTGGNALKFYASVRIDIRRIGSIKDKEEVIGSQTKVKVVKNKVSPPFKTADFDIMYGSGISKEGEIIDLGVKLDIVEKSGSWFSYKNVRIGQGRENVKQYLKEHPQISNEIEKIIREKSSKITNINLDQTEEEND

SEQ ID NO: 5347 - DNA, 1134 bp, Fusobacterium nucleatum subsp. vincentii ATCC 49256
  CDS (1)..(1134): transl_table=11
atggcagcaaaaaaagataaaaatatcccagattcaaagataacagataaagaggggaaagagaaagcagtcaaagatgcaatggcatcaattacaaaagattttggagctgggcttattatgaaattgggagaaaaaagttctatgaatgtagaatctatcccaacaggaagtataaatttggatatagctttgggaataggtggagtccctaagggaagaattattgaagtttatggtgctgaaagttcaggtaagacaactcttgctttgcatattatagctgaagcacaaaaacaaggtggaacagttgcatttattgatgctgaacatgcacttgacccagtttatgcaaaagcattaggtgttgatatagatgaacttttaatctctcaaccagattatggagaacaagcacttgaaattgcagatactcttgttagatcaggagctattgacttaatagtaattgactcagttgcagcacttgttccaaaggcagaaatagatggggaaatgtctgatcaacaaatgggattacaagcaagattaatgtcaaaaggtttaagaaaattgacaggtaatcttaataaatataagactacaatgatttttattaaccaaatcagagaaaaaattggagtaagttatggacctacaactacaactactggtggaaaagcacttaaattctactcatcagttagaatggaagtaaaaaagatgggtacagtaaaacaaggtgatgatccaataggaagtgaagttatagtaaaagtaactaagaacaaggttgcacctccgtttaaagaagcagcatttgaaatactatatggaaaaggaatttcaaagattggagaaattatagatgcagctgttgcaagagatgtaatagttaaagctggttcttggttcagttttagggatcaaagtataggacaaggaaaagaaaaagtaagagcagaattagaaacaaatctagaattattagcacaagttgaagcagatttaaaagaagctattgcaaaaggtcctgttgataagaaaaagaaaaagtctaaaaaagaagttgcttctgatgatactggtgaaaataatgaagtagatgatgatacagttgaaaataacgattaa

SEQ ID NO: 5348 - protein, 377 aa, Fusobacterium nucleatum subsp. vincentii ATCC 49256
MAAKKDKNIPDSKITDKEGKEKAVKDAMASITKDFGAGLIMKLGEKSSMNVESIPTGSINLDIALGIGGVPKGRIIEVYGAESSGKTTLALHIIAEAQKQGGTVAFIDAEHALDPVYAKALGVDIDELLISQPDYGEQALEIADTLVRSGAIDLIVIDSVAALVPKAEIDGEMSDQQMGLQARLMSKGLRKLTGNLNKYKTTMIFINQIREKIGVSYGPTTTTTGGKALKFYSSVRMEVKKMGTVKQGDDPIGSEVIVKVTKNKVAPPFKEAAFEILYGKGISKIGEIIDAAVARDVIVKAGSWFSFRDQSIGQGKEKVRAELETNLELLAQVEADLKEAIAKGPVDKKKKKSKKEVASDDTGENNEVDDDTVENND

SEQ ID NO: 5349 - DNA, 1032 bp, Bacillus cereus G9241
  CDS (1)..(1032): transl_table=11
atgagtgatcgtcaagcggcattagatatggcgttaaaacaaatagagaagcaattcggtaaaggttcaattatgaaattaggagaacaagcggagcgtagagtttctacagtttctagtggttctttagcacttgatgtggcattaggggtaggcggatacccacgcggccgtattatcgagatttatggacctgagagttcaggtaaaacaacagtttcattacatgcaattgcagaggtacagcgccaaggtggacaagcggcattcattgatgcggagcatgcaatggatcctgtatatgcacaaaaattaggtgttaacatcgatgaattattattatcacaacctgatacaggggagcaaggtttagaaatcgcagaagcacttgtacgaagtggtgcggttgatattatcgtaattgactctgtggcagctcttgtaccgaaagctgagattgaaggagacatgggtgactcacacgtaggtttacaagctcgtttaatgtctcaagcgcttcgtaaactttcaggtgcaatcaataaatcaaaaacaatcgcaatctttattaaccaaattcgtgaaaaagttggggttatgttcggaaacccagaaacaactccaggtggtcgtgcgttgaaattctattcaactgttcgtcttgaagtgcgtcgtgcggagcaattaaaacaaggtaacgacattgttggtaataaaacaaaagtaaaagtagttaaaaataaagtggcaccaccattccgtgttgcggaagttgatattatgtacggagaaggtatttcaagagaaggtgaaatcttggatatggcttctgaacttgatatcgttcaaaagagcggtgcttggtactcttataatgaagaacgcttaggacaaggtcgtgaaaattctaagcagttcttaaaagaaaatacggatttaagagaagaaattgccttctttattcgtgagcatcacggaattagcgaagattctggtgctgaaggtatggaagatccaagtcttcttgattaa

SEQ ID NO: 5350 - protein, 343 aa, Bacillus cereus G9241
MSDRQAALDMALKQIEKQFGKGSIMKLGEQAERRVSTVSSGSLALDVALGVGGYPRGRIIEIYGPESSGKTTVSLHAIAEVQRQGGQAAFIDAEHAMDPVYAQKLGVNIDELLLSQPDTGEQGLEIAEALVRSGAVDIIVIDSVAALVPKAEIEGDMGDSHVGLQARLMSQALRKLSGAINKSKTIAIFINQIREKVGVMFGNPETTPGGRALKFYSTVRLEVRRAEQLKQGNDIVGNKTKVKVVKNKVAPPFRVAEVDIMYGEGISREGEILDMASELDIVQKSGAWYSYNEERLGQGRENSKQFLKENTDLREEIAFFIREHHGISEDSGAEGMEDPSLLD

SEQ ID NO: 5351 - DNA, 1044 bp, Xylella fastidiosa Ann-1
  CDS (1)..(1044): transl_table=11
atggatgagaacaagaaacgcgccctttctgtcgctttaagccagattgaaaaacagttcggcaaggggtctgtgatgcggatgggcgatcgcgtgatcgaagccgtagaggcgatcccgacaggttcgctcatgttggatctggccttggggataggtggtttgccaaagggacgtgtcgtggaaatctatgggccggaatcttctgggaagaccacattgactttgcaggcgatcgctcaatgccagaagaagggaggtacagcagcgttcattgatgctgagcatgccttggatccgatttatgcgggcaagttaggcgtcaatgttgatgatttgttgttgtctcagccagatactggggagcaggctctggaaatcgctgacatgctggtgcgctcgggctcaatcgatatcatggttattgattcggttgcggcactcacgccaaaggcggagattgagggtgagatgggagatcagttgcccggtcttcaggcgcgattgatgagccaggcgctgcgtaaattgaccggcaatatcaagcgctctaatacgctagtgatttttatcaaccagttgcgtatgaaaattgggatcatgatgccgggtcaaagccctgaaactacgacagggggtaatgcgctgaagttctatgcttcagtgcgtttggatattcgccgtattggcgcgatcaagaagggtgacgaaattatcgggaatcaaaccaaaatcaaggttgttaaaaacaagttggcgcctcccttcaaacaagtcgtgactgagattctctatggtgaaggcatcagtcgtgaaggggaattgattgaaatgggcgtggaggccaagttggttgagaaagccggcgcttggtatagctatggtggtgagcggatcgggcaaggaaaagataatgcgcgtggctatctacgcgaaaacccgcatcttgcggccaagcttgaggctgatttgcgtgagaaatttgagccgaccgagctttctcgagaagagggcgatgaagatgcgctcgaagatgcaatgtaa

SEQ ID NO: 5352 - protein, 347 aa, Xylella fastidiosa Ann-1
MDENKKRALSVALSQIEKQFGKGSVMRMGDRVIEAVEAIPTGSLMLDLALGIGGLPKGRVVEIYGPESSGKTTLTLQAIAQCQKKGGTAAFIDAEHALDPIYAGKLGVNVDDLLLSQPDTGEQALEIADMLVRSGSIDIMVIDSVAALTPKAEIEGEMGDQLPGLQARLMSQALRKLTGNIKRSNTLVIFINQLRMKIGIMMPGQSPETTTGGNALKFYASVRLDIRRIGAIKKGDEIIGNQTKIKVVKNKLAPPFKQVVTEILYGEGISREGELIEMGVEAKLVEKAGAWYSYGGERIGQGKDNARGYLRENPHLAAKLEADLREKFEPTELSREEGDEDALEDAM

SEQ ID NO: 5353 - DNA, 1071 bp, Sulfitobacter sp. EE-36
  CDS (1)..(1071): transl_table=11
atggcaacggcagatcttttgactatggacaacaagaaacaagctgaaaagcaaaaggccctggacagcgcgctggcacagattgaacgccagttcggcaaagggtcgatcatgaagctgggggccgaaggggccattcaggacatcaaggcgagctcgaccggttcgttagggctggatatcgcacttggtatcggcggtctgcccatggggcggatcatcgagatttatggcccggaatcctcgggtaagaccacattgaccctgcattgtgttgcggagcagcagaaaaacggcggcgtttgtgcctttgttgacgcggaacacgcgcttgatccgcaatacgcgcgcaaattgggcgttgatatcgacgagctgctgatttcccagcctgacaccggcgaacaagcgcttgaaattacggatacgttggtccgctccggtgcggtgaatatggtggtggtcgactccgttgcggccttgacgcccaaatccgagttggaaggcgatatgggcgacagctctgtcggggtgcaggcccgtctgatgagccaggccatgcggaaactgacaggctcgatctcgcggtcgaactgcatggtgattttcatcaaccagatccggatgaaaatcggcgtcatgttcgggtcgcccgaaacgacgaccggcgggaacgcgttgaaattctattcttccgtgcgtctggacatccgccgcattggcgcgctcaaggatcgtgacgaggtggtcggcaacgccacacgggtcaagatcgttaagaacaaggtggccgcaccattcaagcaggtcgaattcgacatcatgtatggggaagggatctccaagatgggcgagctgctggatcttggggtcaaggctggcgtggttgataaatcgggatcgtggttcagctatggcgatgaacggatcgggcaggggcgtgaaaacgccaagaccttcctgaaagaaaacaccgccatggcaaatgagatcgaagacaagatccgcgcggcccatgggctggacttcgacggctccgacagcgacgacgcggatatcctcgaagcgtaa

SEQ ID NO: 5354 - protein, 356 aa, Sulfitobacter sp. EE-36
MATADLLTMDNKKQAEKQKALDSALAQIERQFGKGSIMKLGAEGAIQDIKASSTGSLGLDIALGIGGLPMGRIIEIYGPESSGKTTLTLHCVAEQQKNGGVCAFVDAEHALDPQYARKLGVDIDELLISQPDTGEQALEITDTLVRSGAVNMVVVDSVAALTPKSELEGDMGDSSVGVQARLMSQAMRKLTGSISRSNCMVIFINQIRMKIGVMFGSPETTTGGNALKFYSSVRLDIRRIGALKDRDEVVGNATRVKIVKNKVAAPFKQVEFDIMYGEGISKMGELLDLGVKAGVVDKSGSWFSYGDERIGQGRENAKTFLKENTAMANEIEDKIRAAHGLDFDGSDSDDADILEA

SEQ ID NO: 5355 - DNA, 1059 bp, Roseovarius nubinhibens ISM
  CDS (1)..(1059): transl_table=11
atggacagcaagcgtaaccccgacaagcaaaaggcgctggacagcgccctggcgcagatcgagcggcaatttggcaagggctcgatcatgaagctcggggccgacaacccggttcaggagatcgaggccacctcgaccggctcgctcgggctcgacatcgcgctcgggatcggcggcctgcccaaggggcggatcatcgaaatttacgggcccgaaagctcgggcaaaaccacgctgacactgcattgcgtggccgaagagcagaaaaaaggcggcgtttgcgcctttgtcgacgcggaacatgcgctcgacccgatctatgcgcggaaacttggcgtcgatctcgatgaattgctgatctcgcagcccgacaccggggaacaggcgctcgagattgtcgatacgctcgtccgctcgggcgcggtgagcatggttgtggtcgactcggttgcggcgctgacgccgaaatccgagcttgaaggtgacatgggcgacagcaatgtcggcgtgcaggcgcggctcatgagccaggcgatgcgcaagctgaccggctcgatcagccggtcgaaatgcacggtgatcttcatcaaccagatccgcatgaaaatcggcgttatgttcggcagccccgagaccacgacgggcggcaatgcgctcaaattctacagctcggttcggctcgacattcgtcgcatcggcgcgctcaaggatcgtgacgaggtggtcggcaacgcgacccgcgtcaaggtcgtcaaaaacaaggtcgcgccgcccttcaagcaggtggaattcgacatcatgtatggcgaaggtatctcgaaaatgggcgagctgctcgatctcggggtcaaggccggggtggtcgagaaatccggcagctggttcagctatggcgacgagcggatcgggcaggggcgtgagaacgccaagaccttcctgaaggaaaacagcgccattgcgctggccatcgaggataaaattcgcgcggcccatgggctcgaattcgacatgcccgagatcgagaaacagggtgacgaggacgacatcctcgaaggctga

SEQ ID NO: 5356 - protein, 352 aa, Roseovarius nubinhibens ISM
MDSKRNPDKQKALDSALAQIERQFGKGSIMKLGADNPVQEIEATSTGSLGLDIALGIGGLPKGRIIEIYGPESSGKTTLTLHCVAEEQKKGGVCAFVDAEHALDPIYARKLGVDLDELLISQPDTGEQALEIVDTLVRSGAVSMVVVDSVAALTPKSELEGDMGDSNVGVQARLMSQAMRKLTGSISRSKCTVIFINQIRMKIGVMFGSPETTTGGNALKFYSSVRLDIRRIGALKDRDEVVGNATRVKVVKNKVAPPFKQVEFDIMYGEGISKMGELLDLGVKAGVVEKSGSWFSYGDERIGQGRENAKTFLKENSAIALAIEDKIRAAHGLEFDMPEIEKQGDEDDILEG

SEQ ID NO: 5357 - DNA, 1080 bp, Oceanicola batsensis HTCC2597
  CDS (1)..(1080): transl_table=11
atggcaacggcagatcttctctccatggatagcaagcgcgacgcgaacaagcagaaggcgctcgacagtgcgctggcccagatcgaacgccagttcggcaagggctcgatcatgaaactgggcggcgacaacccgttccgggacatcgaggcgacctcgaccggctcgctcgggctcgacatcgccctcgggatcggcggcctgcccaagggccggatcatcgagatctacggccccgaatcctcgggcaagacgacgctcaccctgcattgcgtggccgaggaacagaaaaagggcggcgtctgcgccttcgtcgacgccgaacacgcgctcgacccgcaatacgcaaggaaactgggcgtcgatctcgacgagctgctgatctcgcagcccgataccggcgaacaggcgctggaaatcaccgacacgctggtccggtccggcgccgtgtcgatggtgatcgtagattccgtcgccgccctgaccccgaaatccgagctcgagggcgacatgggcgacagttccgtcggcgtccatgcccggctgatgtcccaggccatgcgcaagctgaccgggtccatcgcgcgctcgaactgcatggtgatcttcatcaaccagattcgcatgaagatcggcgtcatgttcggctcgcccgagaccaccaccggcggcaatgcgctcaagttctattcctcggtccgcctcgacatccgccgcatcggcgcgatcaaggaacgcgacgaggtcgtgggtaaccagacacgcgtcaaggtcgtcaagaacaaggtcgcaccgcccttcaagcaggtggaattcgacatcatgtacggcgagggcatctccaagaccggcgaattgctggacctcggcgtcaaagccggggtggtcgagaaatccggctcctggtattcttacggcgacgagcgcatcggacagggccgcgagaacgccaaggtcttcctcagggaaaacggcgaaatcgcctatgccatcgaagacaagatccgcgccgcgcatggcctggacttcggcatcgagggcgagggcggcgacagcgcggacgacgtgctggacgcctga

SEQ ID NO: 5358 - protein, 359 aa, Oceanicola batsensis HTCC2597
MATADLLSMDSKRDANKQKALDSALAQIERQFGKGSIMKLGGDNPFRDIEATSTGSLGLDIALGIGGLPKGRIIEIYGPESSGKTTLTLHCVAEEQKKGGVCAFVDAEHALDPQYARKLGVDLDELLISQPDTGEQALEITDTLVRSGAVSMVIVDSVAALTPKSELEGDMGDSSVGVHARLMSQAMRKLTGSIARSNCMVIFINQIRMKIGVMFGSPETTTGGNALKFYSSVRLDIRRIGAIKERDEVVGNQTRVKVVKNKVAPPFKQVEFDIMYGEGISKTGELLDLGVKAGVVEKSGSWYSYGDERIGQGRENAKVFLRENGEIAYAIEDKIRAAHGLDFGIEGEGGDSADDVLDA

SEQ ID NO: 5359 - DNA, 1065 bp, Erythrobacter sp. NAP1
  CDS (1)..(1065): transl_table=11
atggctaccaatctcaagctcgtagagaaggaaaaagacgtggaccgtcaaaaggcgctcgacgccgcccttgcacagattgatcgcgctttcggcaagggctcggcgatgaagctcggctcgaaagaggcgatgcaggttgaatcgatttcgaccgggtcgctgggcctcgatattgctcttggtattggcggcctgcctaaaggccgcgtgatcgaagtctacggcccggaaagctcgggtaagacgacgctcgcactgcactgcattgcagaggctcagaaagccggcggtacggcggccttcgtcgatgccgagcatgcgcttgacccggtctatgcgaagaagctgggcgtcgacatcgacgaactggtcgtctcgcagcccgacacgggtgagcaggcactcgaaattaccgacacgctggtccgctcgaacgcggttgacgtgctggtggtcgactcggtcgcggcgcttgtcccgcgcgcagaaattgaaggcgagatgggcgattcccacgtcggcctgcaagcgcgcctgatgtcccaatctctgcgcaagctgaccgggtcgatcaatcgttccaagtgcatggtgatcttcatcaaccagctgcggatgaagatcggcgtcatgtacggcaaccccgaaactacgaccggcggtaacgcgctcaagttctacgcttcggttcgcctcgacattcgccgcaccggccagatcaaggaccgcgacgaggtgatcggcaactcgactcgcgtgaaagtggtcaagaacaaggtcgccccgccgttcaagcaggtcgaattcgacatcatgtatggcgaaggcatctccaagatcggcgagattctcgatctcggcgtgaaggccggcatcgtcgagaagtcgggcagctggtattcctatgacagcgtccgcatcggccagggccgcgagaatgccaagacctacctcaaggaaaatcctgaagtttgcgacaagttggaagccgccattcgcggtaaaaccgacgaggtcgccgaggaaatgatgacgggcccggacgcggataccgacagctga

SEQ ID NO: 5360 - protein, 354 aa, Erythrobacter sp. NAP1
MATNLKLVEKEKDVDRQKALDAALAQIDRAFGKGSAMKLGSKEAMQVESISTGSLGLDIALGIGGLPKGRVIEVYGPESSGKTTLALHCIAEAQKAGGTAAFVDAEHALDPVYAKKLGVDIDELVVSQPDTGEQALEITDTLVRSNAVDVLVVDSVAALVPRAEIEGEMGDSHVGLQARLMSQSLRKLTGSINRSKCMVIFINQLRMKIGVMYGNPETTTGGNALKFYASVRLDIRRTGQIKDRDEVIGNSTRVKVVKNKVAPPFKQVEFDIMYGEGISKIGEILDLGVKAGIVEKSGSWYSYDSVRIGQGRENAKTYLKENPEVCDKLEAAIRGKTDEVAEEMMTGPDADTDS

SEQ ID NO: 5361 - DNA, 1062 bp, Pseudoalteromonas tunicata D2
  CDS (1)..(1062): transl_table=11
atgaacgataataaagaaaaagcattaagcgcagcactatctcaaattgaacgccaatttggtaaaggttcaattatgaaattaggtgatagtcaggcacttgatattgaatctatttcaactggctcacttggtattgatattgcgctgggtataggtggtttacctgctggtcgtattgttgaaatttttggtcctgaatcgtcaggtaaaacaacgttaacgttacaagttattgcagaagcccagaaaaaaggcaaaacatgtgcctttattgatgctgaacatgcccttgaccctgtttatgctgaaaagttgggtgtaaatattaaagatttactggtatctcagcctgataccggtgagcaagcgcttgagatttgtgacatgttagtgcgctctggtgctgttgatgtggtgatcattgactcggtggcagcattaacaccaaaagctgaaattgaaggcgatatgggtgatcaccatgttggcttacaagctcgtttaatgtcacaagcattacgtaagctaactggtaatatcaaacgttcaaatactttagttatttttatcaaccaaatacgtatgaaaattggcgtgatgtttggtaatccagaaacaaccacaggtggtaatgcactgaagttttatgcttcagttcgtatcgatattcgtcgtaccggctctgttaaagagggtgatgaagtggtaggtaatgagacgcgtgtaaaaattgttaaaaacaaagttgcgccgccatttaaacaagcagaatttattattatgtatggagaaggtatctctaaacatggtgagctaattgatttgggtgttcagcacaaatttgttgaaaaagccggtgcatggtacagctatcagggtaataaagttggtcaaggtaaatcaaactcaattaaattcttaaaagaaaatccagcaattgctgatgaaattgaaaagaaattacgcgatatgttgttattaaaagcaacaattaaaccagaggatgggattgcaagtttagctgctgaagccgaaggtagcattgaagaagacttttaa

SEQ ID NO: 5362 - protein, 353 aa, Pseudoalteromonas tunicata D2
MNDNKEKALSAALSQIERQFGKGSIMKLGDSQALDIESISTGSLGIDIALGIGGLPAGRIVEIFGPESSGKTTLTLQVIAEAQKKGKTCAFIDAEHALDPVYAEKLGVNIKDLLVSQPDTGEQALEICDMLVRSGAVDVVIIDSVAALTPKAEIEGDMGDHHVGLQARLMSQALRKLTGNIKRSNTLVIFINQIRMKIGVMFGNPETTTGGNALKFYASVRIDIRRTGSVKEGDEVVGNETRVKIVKNKVAPPFKQAEFIIMYGEGISKHGELIDLGVQHKFVEKAGAWYSYQGNKVGQGKSNSIKFLKENPAIADEIEKKLRDMLLLKATIKPEDGIASLAAEAEGSIEEDF

SEQ ID NO: 5363 - DNA, 1050 bp, Photobacterium sp. SKA34
  CDS (1)..(1050): transl_table=11
atggacgacaacaaacaaaaggctcttgccgcagcgttaggccagattgagaagcagttcggtaaaggttcaatcatgaagttgggcgataaccgtacgatggatatcgaaaccatttcaaccggttcattatcgctagatattgcactgggagctggtggtctaccaatggggcgtattgttgaaatttacggtccagaatcatcaggtaaaacaaccttaacccttgaaacgattgcagcagctcagcgtaaaggaaaaacctgtgctttcatcgatgctgaacacgcacttgatcctatttatgcacagaaactaggtgttgatatcgatcagctattagtttctcagccagatacaggtgagcaagcgcttgaaatttgtgatgcattagcacgctctggtgctgttgatttaatcgttgttgactcagtagcagctctaacacctaaagctgaaatcgaaggtgaaatgggcgactcacacatgggtctgcaagcacgtatgctttcacaagcgatgcgtaagttaacgggtaaccttaagcagtcaaactgtatgtgtatcttcatcaaccagatccgtatgaagatcggtgtgatgtttggtaacccagaaactacgacaggtggtaatgcactgaagttctacgcttctgttcgtcttgatatccgccgtactggcgcaatcaaagaaggtgacgaagttgttggtaacgaaactcgtattaaagtagttaaaaataaaattgcagcaccgtttaagcaagctgaaactcaaattctttatggtcaaggtttcaaccgtaatggtgagctaattgatttaggcgttaagcataagctagtagaaaaagcgggtgcttggtatagttaccaaggtaataaaattggtcaaggtaaggcaaactcttgtaagtaccttgtagaaaatcctgcgattgccgctgaaattgagaaaaaattacgtgacttgctgctaacacctgtaactgagggggatcaagttgacgagaataaggctgatattaaagaagacgaagcattctaa

SEQ ID NO: 5364 - protein, 349 aa, Photobacterium sp. SKA34
MDDNKQKALAAALGQIEKQFGKGSIMKLGDNRTMDIETISTGSLSLDIALGAGGLPMGRIVEIYGPESSGKTTLTLETIAAAQRKGKTCAFIDAEHALDPIYAQKLGVDIDQLLVSQPDTGEQALEICDALARSGAVDLIVVDSVAALTPKAEIEGEMGDSHMGLQARMLSQAMRKLTGNLKQSNCMCIFINQIRMKIGVMFGNPETTTGGNALKFYASVRLDIRRTGAIKEGDEVVGNETRIKVVKNKIAAPFKQAETQILYGQGFNRNGELIDLGVKHKLVEKAGAWYSYQGNKIGQGKANSCKYLVENPAIAAEIEKKLRDLLLTPVTEGDQVDENKADIKEDEAF

SEQ ID NO: 5365 - DNA, 1041 bp, Neptuniibacter caesariensis
  CDS (1)..(1041): transl_table=11
atggacgcgaatcgtaaaaaagcacttgatgcggcgttgagtcagattgaacgtcagtttggtaaaggcgcagtcatgcgtatgggtgatcagccacgtgaagcgattccatcagtttccacgggttctcttgggctggatattgctctgggtataggtggtcttccctatggtcgtatcgttgagatctatgggcctgaatcttctggtaaaaccacgctgacccttcaggttgttgctgaagcccagaaacagggtaagacatgtgcctttgttgatgcggagcatgctctagatccgatttatgctgaaaagcttggcgttgatgtggatagcttgctggtatcacagcctgatacgggtgagcaggcgctagaaattaccgatatgctggttcgttccaatgctgttgatgtgatcattgttgactcggtagcagcgctaacgccaaaagctgagattgaaggcgatatgggtgattcacacgtaggtctccaggctcgtttgatgtctcaggcgctacgtaagttaaccggtaatgttaaaagctctaactgtttgcttgtctttatcaaccagattcgtatgaaaatcggggttatgtttggcaaccctgaaacaacaacgggtggtaatgcactgaaattctactcttctgttcgtctggatattcgccgtacgggtgcaatcaaacaaggcgatgaagtggttggtaacgagacgcgagtaaaggttgttaagaataaggtgtcaccgccattcaggcaggctgagttccagatcatgtatggtcagggtatctatcacatgggcgaagtgatcgacctgggtgttaaagaaggacttgtggataagtcaggtgcttggtacgcctataatggcgataagattggtcagggtaaggccaatgcctctaaattcctggaagagaacccgcagatcgctaacgagatagaaacggaactacgcagtcgtttgctatctaacccactggataagcctgctgaagaagatgagtcagaaaacctggatctgatctaa

SEQ ID NO: 5366 - protein, 346 aa, Neptuniibacter caesariensis
MDANRKKALDAALSQIERQFGKGAVMRMGDQPREAIPSVSTGSLGLDIALGIGGLPYGRIVEIYGPESSGKTTLTLQVVAEAQKQGKTCAFVDAEHALDPIYAEKLGVDVDSLLVSQPDTGEQALEITDMLVRSNAVDVIIVDSVAALTPKAEIEGDMGDSHVGLQARLMSQALRKLTGNVKSSNCLLVFINQIRMKIGVMFGNPETTTGGNALKFYSSVRLDIRRTGAIKQGDEVVGNETRVKVVKNKVSPPFRQAEFQIMYGQGIYHMGEVIDLGVKEGLVDKSGAWYAYNGDKIGQGKANASKFLEENPQIANEIETELRSRLLSNPLDKPAEEDESENLDLI

SEQ ID NO: 5367 - DNA, 1089 bp, Oceanobacter sp. RED65
  CDS (1)..(1089): transl_table=11
atggaccagaatcgccaaaaagccctagacgcggctcttagtcagattgaacgtcaattcggtaaaggcgccatcatgaaaatgggcgagcaaccccgtgaggcgattccttctgtatcaaccggttcactatcattggacattgctctaggtataggcggcttgccatttggtcgtatcgttgagatttatggtcctgagtcttctggtaaaaccaccatgtgtttgtccgccatggcagaagcgcaaaaggatggtaaaacggttgcgatcgttgatgcggagcatgccttagatccttcttatgcggaaaagctgggtgtggatcttgatagcctgttggtatctcaaccggatactggtgaacaagctctagagattgttgatagcctagtgcgctccaatgcggtggatctgattgttgttgactctgtggcagcgttaacaccaaaagcagaaattgaaggtgacatgggtgactcccacgtaggcttgcaggctcgtcttatgtcacaagcgttacgtaaactaacggcgaatgtaaaaaatgctaactgtatggtgatcttcattaaccagattcgtatgaagattggtgtgatgtttggtaaccctgaaaccacaaccggtggtaacgcacttaagttctactcttctgtccgcttggatattcgtcgcacaggtgctgttaagaacggtgacgaagtggtaggtaacgaaactcgcgttaaagtagtgaaaaacaaggttgctccaccgtttaaacaagcggaattccaaatcatgtataaccaaggtatcaaccgtcaggcggaaatcattgatttgggtgtgaagcttggtttagtggataagtctggtgcttggtacgcttacaagggcgataagattggtcagggtaaagccaatgcttgtgtctatcttcaggagaacccagaagttagtaaagaacttgaaaagcaaatccgtgatcaactgttagtggttgctaagccagcagaagaaaaagcggaagcggaagcacaagcggaagcgcctgctgcagaggcgaaacccgcaaaaaagactaaagcgaaagaagaagcatag

SEQ ID NO: 5368 - protein, 362 aa, Oceanobacter sp. RED65
MDQNRQKALDAALSQIERQFGKGAIMKMGEQPREAIPSVSTGSLSLDIALGIGGLPFGRIVEIYGPESSGKTTMCLSAMAEAQKDGKTVAIVDAEHALDPSYAEKLGVDLDSLLVSQPDTGEQALEIVDSLVRSNAVDLIVVDSVAALTPKAEIEGDMGDSHVGLQARLMSQALRKLTANVKNANCMVIFINQIRMKIGVMFGNPETTTGGNALKFYSSVRLDIRRTGAVKNGDEVVGNETRVKVVKNKVAPPFKQAEFQIMYNQGINRQAEIIDLGVKLGLVDKSGAWYAYKGDKIGQGKANACVYLQENPEVSKELEKQIRDQLLVVAKPAEEKAEAEAQAEAPAAEAKPAKKTKAKEEA

SEQ ID NO: 5369 - DNA, 1041 bp, Desulfitobacterium hafniense DCB-2
  CDS (1)..(1041): transl_table=11
atggccggtaacgataaattaaaagccctggatatggctttaagtcagattgaaaagcaatttggaaaagggtcgattatgagattgggggaggcttctgccaaaatggcggtggaagtgattccgacgggctgtctggccattgatatagcccttggggtgggtggagtgcccagggggcgtgttatagaaatctatggacctgagtcttccggtaagaccaccgttgcattgcatattgcggcagaagcccagaagctgggcggcgttgctgcttttatcgatgcggagcatgctcttgacccggtctatgccaaggccttaggggtcaacatcgacaatcttctggtatcccagccggatacaggggagcaggctctggagatttgcgaagctttagtgcgcagtggggctatcgacgtcattatcattgactctgtggcagctcttgttccccgggcagagattgaaggagaaatgggagattcccatgtgggtttacatgcccgcttaatgtctcaagccttgagaaaattgaccggtgccatcagtaagagcaatacctgcgttatctttatcaaccaaattcgggaaaaagtgggaattatgtttggtaatccagagaccacaaccggcggacgggctttgaagttctatgcctccgtccgtttggaagtacgccgtgcggataccctgaagcaaggtcaggatatgattggcaaccgtaccaaagtcaaggttgttaagaataaggtggctccgccctttaaacaagccgaatttgacattatgtacggagaaggtatttcccgtgaaggcagcatggtggatgtgggtgcggagttggatatcattaataagtccggggcttggtactcttataaaggtgagcgcttaggtcagggaagagagaatgtcaaggagtttctgaagaagaatcctgagattgccgccgaaatcgaacaagggatccgggccagcattgctaacgtaagcgctccggttgcagatgatgtccaagaggagccggaagacatctaa

SEQ ID NO: 5370 - protein, 346 aa, Desulfitobacterium hafniense DCB-2
MAGNDKLKALDMALSQIEKQFGKGSIMRLGEASAKMAVEVIPTGCLAIDIALGVGGVPRGRVIEIYGPESSGKTTVALHIAAEAQKLGGVAAFIDAEHALDPVYAKALGVNIDNLLVSQPDTGEQALEICEALVRSGAIDVIIIDSVAALVPRAEIEGEMGDSHVGLHARLMSQALRKLTGAISKSNTCVIFINQIREKVGIMFGNPETTTGGRALKFYASVRLEVRRADTLKQGQDMIGNRTKVKVVKNKVAPPFKQAEFDIMYGEGISREGSMVDVGAELDIINKSGAWYSYKGERLGQGRENVKEFLKKNPEIAAEIEQGIRASIANVSAPVADDVQEEPEDI

SEQ ID NO: 5371 - DNA, 1044 bp, Alteromonadales bacterium TW-7
  CDS (1)..(1044): transl_table=11
atgaacgataacaaacaaaaagcgttagacgctgcactatcacaaattgagcgtcaatttggtaaaggttcaatcatgaagctgggcgacaataaagccctgaacattgatgcagtatctacaggttcattagggatcgacattgctttaggcataggcggtttaccaatgggtcgtattgttgaagtatatggtcctgaatcttcaggtaaaacaacactgactttgcaagttatcgcacaagctcaaaaagaaggtaaaacatgtgcctttgttgatgctgagcatgctctagatcctgtatacgctcaaaagctaggtgttaacattgatgagctgttagtttctcaaccagatacgggtgagcaagcgttagaaatttgtgacatgttagtgcgttcaagtgctgtagatgttgtgattgtcgattcagttgcagccctaacacctaaagctgaaattgaaggcgacatgggcgactcgcacatgggcttacaagcacgtttaatgtcgcaagcattacgtaagcttacgggtaatattaaacgttcaaatacattatgtattttcattaaccaaattcgtatgaaaattggtgtaatgtttggtaacccagaaacaacaaccggtggtaacgcgcttaagttttacgcatcagttcgtattgatattcgtcgtattggttcggtgaaagaaggtgatgaagttgttggtaacgaaacgcgcgttaaaattgttaaaaacaaagtagcgcctccgtttaaacaagccgaatttatcatcatgtatggtgaaggtatttctaagcaaggcgagctaattgatttaggtgttaagcacaaaattgttgaaaaagcaggtgcttggtacagctacaatggtaacaaggtaggccaaggtaaaaacaattcaattaaattcttaaaagaaaacgtagaaattgcaaacgaaattgaaggcaaactacgcgatatgttattgcttaaagcaacaattgaaccagaagatggtgaagatgtacttggtgatgacgctgacctttaa

SEQ ID NO: 5372 - protein, 347 aa, Alteromonadales bacterium TW-7
MNDNKQKALDAALSQIERQFGKGSIMKLGDNKALNIDAVSTGSLGIDIALGIGGLPMGRIVEVYGPESSGKTTLTLQVIAQAQKEGKTCAFVDAEHALDPVYAQKLGVNIDELLVSQPDTGEQALEICDMLVRSSAVDVVIVDSVAALTPKAEIEGDMGDSHMGLQARLMSQALRKLTGNIKRSNTLCIFINQIRMKIGVMFGNPETTTGGNALKFYASVRIDIRRIGSVKEGDEVVGNETRVKIVKNKVAPPFKQAEFIIMYGEGISKQGELIDLGVKHKIVEKAGAWYSYNGNKVGQGKNNSIKFLKENVEIANEIEGKLRDMLLLKATIEPEDGEDVLGDDADL

SEQ ID NO: 5373 - DNA, 1116 bp, Marinobacter sp. ELB17
  CDS (1)..(1116): transl_table=11
atggaagacaaccgcaagaaagctttatccgccgctctgacccagattgaacgccagtttggtaaaggcgccatcatgaagatgggcgaccacccccgtgaggcaatcccgtccgtttctaccggttctcttggtctggacgttgctcttggcattggtggcctgccttatggccgggtttgtgaaatctacggccctgaaagctctggtaaaactacgctgactttgcaggttattgccgaagcccagaagcagggcaaaacgtgtgcttttgttgatgctgagcacgcccttgatcctcaatatgctgaaaagctgggcgtgaacgttgatgagctgctggtttcccagcccgacaccggtgagcaggcgttagaaatctgcgacatgctggtgcgctccaacgcggtggatgtcatcatcgtggactccgttgccgcattgacgccaaaagctgaaattgaaggcgaaatgggcgactctcatgttggtcttcaggcccgcctgatgtcacaggctctgcgcaaactgaatggcaacgtcaagaatgccaacgtcctgctgattttcatcaaccagatccgcatgaaaataggcgtgatgtttggcagccccgaaaccactaccggcggcaacgcgttgaaattctatgcctctgtgcgtctggatatccgccgcattggcgcagtgaaagacggcgacgaagtcaccggtaacgaaacccgggtgaaagtggttaaaaacaaagtggcaccgccgttccgccaggccgaattccaaattttgtacggcaagggcatttaccgcatggccgaagtggtggacatgggtgtaaaggaaggctttgtagataaggctggcgcctggtacgcctacaacggtgacaaaattggccaaggcaaagccaacgcttgcaaattcctggaagaaaacccggaaatggcgaaagaaattgaagccaaagtgcgcgacaagctgatgcccaaaccagtgaaaaaagacgcggcaaaggatgcagggaaagatgcagggaaagacgcaggaaagaatgtagggaaaaatgcaggaaaagatgccgcagtggcgcctgcagaagccagcgacgaactactgtaa

SEQ ID NO: 5374 - protein, 371 aa, Marinobacter sp. ELB17
MEDNRKKALSAALTQIERQFGKGAIMKMGDHPREAIPSVSTGSLGLDVALGIGGLPYGRVCEIYGPESSGKTTLTLQVIAEAQKQGKTCAFVDAEHALDPQYAEKLGVNVDELLVSQPDTGEQALEICDMLVRSNAVDVIIVDSVAALTPKAEIEGEMGDSHVGLQARLMSQALRKLNGNVKNANVLLIFINQIRMKIGVMFGSPETTTGGNALKFYASVRLDIRRIGAVKDGDEVTGNETRVKVVKNKVAPPFRQAEFQILYGKGIYRMAEVVDMGVKEGFVDKAGAWYAYNGDKIGQGKANACKFLEENPEMAKEIEAKVRDKLMPKPVKKDAAKDAGKDAGKDAGKNVGKNAGKDAAVAPAEASDELL

SEQ ID NO: 5375 - DNA, 1026 bp, Unknown
  Unidentified
  CDS (1)..(1026): transl_table=11
gtggacgcagaccgccagaaggcattggacgccgcgcttgcgcagatcgatcgcgcattcggcaagggctcggcgatgaagctgggccaaaaggaagcgatgaatgtggaggcgatctccaccggttcgctcggcctcgacatcgcattgggcatcggcggcttgcccaagggccgcgtcatcgaagtctacggtccggaaagttcgggcaagaccacgctggcgctgcacgccatcgccgaggcgcagaaagcgggcggcacggcggccttcgtcgatgcggaacacgcgctcgatccggtctatgccaagaagctgggcgtcgatgtggacgaactgatcgtctcgcagcccgacaccggcgaacaggcgctcgagatcaccgatacgctggtgcgttcgaacgccatcgacatcctagtggtcgactcggtcgccgcgctggttccccgagccgaaatcgaaggcgagatgggcgacagccatgtgggcctccaggcgcgcctcatgtcccagtcgctgcgcaagcttaccggttcgatcaaccgttccaagtgcatggtgatcttcatcaaccagctgcgtatgaagatcggcgtgatgtacggtaatcccgaaaccaccaccggcggcaacgcgctcaagttctacgcttcggttcgtctcgacatccgtcgcaccggccagatcaaggaccgcgacgaggtgatcggcaactcgacccgcgtaaaggtcgtcaagaacaaggtcgccccgccgttcaagcaggtcgaattcgacatcatgtatggcgaagggatctccaagatcggcgagatcctcgatctgggcgtgaaagccggcgtggtcgaaaagtcgggcagctggttcagctacgacagcgtccgcatcggccagggccgcgagaacgccaagaccttcctgaaggaaaaccccgaaatgtgcgccaagttggaagctgcgatccgcggcaaaaccgacgaggtcgccgaagagatgatggctggtccggacgcggaagactga

SEQ ID NO: 5376 - protein, 341 aa, Unknown
  Unidentified
MDADRQKALDAALAQIDRAFGKGSAMKLGQKEAMNVEAISTGSLGLDIALGIGGLPKGRVIEVYGPESSGKTTLALHAIAEAQKAGGTAAFVDAEHALDPVYAKKLGVDVDELIVSQPDTGEQALEITDTLVRSNAIDILVVDSVAALVPRAEIEGEMGDSHVGLQARLMSQSLRKLTGSINRSKCMVIFINQLRMKIGVMYGNPETTTGGNALKFYASVRLDIRRTGQIKDRDEVIGNSTRVKVVKNKVAPPFKQVEFDIMYGEGISKIGEILDLGVKAGVVEKSGSWFSYDSVRIGQGRENAKTFLKENPEMCAKLEAAIRGKTDEVAEEMMAGPDAED

SEQ ID NO: 5377 - DNA, 1041 bp, Moritella sp. PE36
  CDS (1)..(1041): transl_table=11
atggacgcgaataaagaaaaagccttagctgcagcacttggacaaattgaaaaacaatttggtaaaggttctatcatgaagctaggtgataaccgtaccatggacgtagaaactgtttctacaggttcactttctcttgatatcgcgttgggagcaggtggcttaccgatggggcgtatcgttgaaatttatggtcctgaatcaagtggtaaaacgacgttaacgttagaagtcatcgcctcagcacaacgtgaaggtaaagtttgtgcctttattgatgctgagcatgcactggatccgatttacgcgggtaaactgggtgttgatgtgaatgaactattgatatcgcaaccagataccggtgaacaagctctcgagatcactgacatgttagcgcgctcaggtgcagtcgatattatcgtgattgactcggttgcggcattaacgccaaaagctgagattgaaggcaacatgggcgacagccacatgggtctgcaagcgcgtatgttatcgcaagcgatgcgtaaattaacgggtaacttaaaaacgagtaataccatgtgtatcttcattaaccaaattcgtatgaagattggtgtgatgtttggttcacctgaaaccaccacaggtggtaatgcccttaaattttacgcgtcagtacgtttagatattcgtcgtattggttcggttaaagatggcgatgagatcacgggtaatgaaacgcgtgtaaaagtggttaaaaacaaaattgcagcaccgtttagacaagctgaatttcaaatcctatacggtaaaggcttcaaccgtaatggtgagctagttgatttaggtgtaaaagaaaaactgattgaaaaagccggcgcttggtactcatacaagggtgacaagattggtcaaggtaaagcgaaagcatcacagtaccttgctgataatccgaagattgctgctgaaatagacggtatgatccgtgctaacctactgggtaataaaggcgacgaagtggctgacgttaagactcctgaagttgaaacagaattttaa

SEQ ID NO: 5378 - protein, 346 aa, Moritella sp. PE36
MDANKEKALAAALGQIEKQFGKGSIMKLGDNRTMDVETVSTGSLSLDIALGAGGLPMGRIVEIYGPESSGKTTLTLEVIASAQREGKVCAFIDAEHALDPIYAGKLGVDVNELLISQPDTGEQALEITDMLARSGAVDIIVIDSVAALTPKAEIEGNMGDSHMGLQARMLSQAMRKLTGNLKTSNTMCIFINQIRMKIGVMFGSPETTTGGNALKFYASVRLDIRRIGSVKDGDEITGNETRVKVVKNKIAAPFRQAEFQILYGKGFNRNGELVDLGVKEKLIEKAGAWYSYKGDKIGQGKAKASQYLADNPKIAAEIDGMIRANLLGNKGDEVADVKTPEVETEF

SEQ ID NO: 5379 - DNA, 1038 bp, Thauera sp. MZ1T
  CDS (1)..(1038): transl_table=11
atggacgaaaacaaggccaaagccctctccgcggcgctgtcgcagatcgaaaagcagttcggcaagggttcgatcatgcgcatgggcgacggcagcatcgagcgcgacatccagaccgtctccaccggctcgctcggactcgacatcgcgctcgggctcggcggtctgccgcgcggtcgggtggtcgagatctacggccccgaatcctccggcaagaccacgctcaccctgcaggtcatcgccgagatgcagaagctcggcggcaccgcggccttcatcgacgccgagcacgcgctcgacgtcggctacgcggaaaaactcggcgtcgacatcgaggatctgctgatctcgcagcccgacaccggcgaacaggcgctcgagatcgccgacatgctggtgcgctcgggcggcgtggacatcgtggtcatcgactcggtcgccgcgctcacccccaaggccgagatcgagggcgagatgggcgaccagctccccggcctgcaggcccgcctgatgtcgcaggcactgcgcaagctcaccgccaacatcaagcgcaccaataccctggtgatcttcatcaaccagatccgcatgaagatcggcgtgatgttcggcagcccggagaccaccaccggcggcaacgcgctcaagttctacgcctcggtgcgcatggacatccgccgcaccggcacgatcaagaagggtgacgaggtggtcggctccgagacccgcgtcaaggtggtcaagaacaaggtctcgccaccgttcaaggaagcccacttcgacatcctttacggcgagggcatctcgcgcgaaggcgagatcatcgacctcggcgtcgagcacaagatcgtcgacaagtcgggcgcctggtacgcctacaagggcgacaagatcggccagggcaaggacaactcgcgcgagttcctgcgcgccaacccggtgctggcccgcgagatcgagaacaaggtgcgggtcgcggtcggcctgcccgagctgccgcccgccgccgcgtccgccccggcgccggccgaggcctga

SEQ ID NO: 5380 - protein, 345 aa, Thauera sp. MZ1T
MDENKAKALSAALSQIEKQFGKGSIMRMGDGSIERDIQTVSTGSLGLDIALGLGGLPRGRVVEIYGPESSGKTTLTLQVIAEMQKLGGTAAFIDAEHALDVGYAEKLGVDIEDLLISQPDTGEQALEIADMLVRSGGVDIVVIDSVAALTPKAEIEGEMGDQLPGLQARLMSQALRKLTANIKRTNTLVIFINQIRMKIGVMFGSPETTTGGNALKFYASVRMDIRRTGTIKKGDEVVGSETRVKVVKNKVSPPFKEAHFDILYGEGISREGEIIDLGVEHKIVDKSGAWYAYKGDKIGQGKDNSREFLRANPVLAREIENKVRVAVGLPELPPAAASAPAPAEA

SEQ ID NO: 5381 - DNA, 1293 bp, Oryza sativa subsp
  CDS (1)..(1293)
atggccagggccctcctcctccggcgcggccaccccttcctccgccgcctcctgcggcctcccccgcctcccacctcctctgtactggaatcctgcaatagaaatgtgtcaccaagagttcagttgtggagattctctgcagaagggaaagaccagacaaattcaagtgaagatggttacagtgaggcaaacattaagaagaaggactttgcgctacaacaagctttggaccaaattaagtctgcatttggtgaggagtcaattatgtggctaaatcactcttacggtcctaaagaagttcctgtcatatctactggatcctttgcattggacatggctttaggaattggtgggctcccgaagggaagggttgttgaaatttatggtccagaggcatcaggaaaaaccactttagcacttcatatcatagctgaagcacagaagaatggaggatattgtgcttttattgatgccgagcatgccctggatccaacattagcagaatctataggtgttaaggcagaacacctgttattatctcaaccagactgtggtgaacaggcccttggtcttgctgatatcttaatccgaagtggctctattgatgttgtggttgtggacagtgtagcagctcttgttccaaaaactgaactggatggtgagatgggagatgcccatgttgcacttcaagcaaggcttatgagtcaagcacttcgcaagttgagccattctctttctcgctccaggacaatgttggtgtttattaatcaggtaagatcgaaattaagcacatttagtggattcggagcaccagcagaagtaacctgtggagggaatgccttaaagttctatgcttctgtccgcttgaacaccaaaaggattggtcttataaaaaagtcagaagaggttgtaggcacacaaattcaggtcaagattgtcaagaacaagcatgcacccccatttaagactgtacaccttgagcttgagtttggtaagggcctgagtcgtgaattggagattattgaattaggcttcaaacacaagttcataacaaaatcaggagtattctatcacttgaacgggcaaaatttccatggaaaggatgctcttaaatgttatctcgctgaaaacaagaatgtcctggaatctctgatgtcaatgataaaggaaagcataatgcaacaggagtcccatccagatagaaacatggaggatgccaacccagatacgagcataacagaagagttcgtttcagcaacagatgaacaagtacctgaagaggttgaggcctga

SEQ ID NO: 5382 - protein, 430 aa, Oryza sativa subsp
MARALLLRRGHPFLRRLLRPPPPPTSSVLESCNRNVSPRVQLWRFSAEGKDQTNSSEDGYSEANIKKKDFALQQALDQIKSAFGEESIMWLNHSYGPKEVPVISTGSFALDMALGIGGLPKGRVVEIYGPEASGKTTLALHIIAEAQKNGGYCAFIDAEHALDPTLAESIGVKAEHLLLSQPDCGEQALGLADILIRSGSIDVVVVDSVAALVPKTELDGEMGDAHVALQARLMSQALRKLSHSLSRSRTMLVFINQVRSKLSTFSGFGAPAEVTCGGNALKFYASVRLNTKRIGLIKKSEEVVGTQIQVKIVKNKHAPPFKTVHLELEFGKGLSRELEIIELGFKHKFITKSGVFYHLNGQNFHGKDALKCYLAENKNVLESLMSMIKESIMQQESHPDRNMEDANPDTSITEEFVSATDEQVPEEVEA

SEQ ID NO: 5383 - DNA, 1347 bp, Oryza sativa subsp
  CDS (1)..(1347)
atggcgaacctcctgaggcgcgcgtcgctgcggcgcgccgtcgccgccgtcgcggcagcagccgcgccctgccccgagacttgtaggtatttgtatgcacttaagacaaatactggatcatttgtgacacacacaagctataagcaagggatctgtggctctactttccactgccggtatttctcgtctaaagccaaaaagaagacaaagtccagtggaactgactctggtgaagagaatctgtcaaagaaagacttggctctacaccaggctattgatcaaataacatctgcatttgggaagggcgcaataatgtggcttggtcgttctgaaggtcgtagagaagtacctgttgtgtcaactgggtctttctctttggatttggcattgggaactggtggacttccaaagggtcgtgttatagaggtgtatggtccagaagcttcaggcaagacaactcttgcacttcacgttattgcagaagcacaaaagcatggcggttattgtgccttcgtagatgcagagcatgccttagatccagctctggctgaatcaattggggtcaacaccagtaatttacttctctctcagccagactgtggcgagcaggcactcagtcttgtggacacactgattcgaagcggctctgttgatgttgttgttgttgatagtgtagcagctcttgtccctaagagtgagcttgacggggagatgggtgatgcacatgttgctctccaggctagattgatgagccaagctcttcgcaagctgagccactctctctcactttcccagacaattttgttattcattaaccagatcaggtctaaagtgaccacatttggaggatttggaggtccaatggaggttacttctggtggaaatgcccttaaattctatgcttccgttagaatgaacatcaagcgtattggtttggtaaagaaaggcgaagagactataggtagtcaagtgcttgtgaagattgtgaaaaacaagcatgccccaccgttcaagacagcacagtttgagctggaatttggtaaagggatatgccgcagttcagagcttattgaacttggattaaagcacaagcttgtcaaaaagttgggtggtgcattttattctttcaacgaagagtcatatcgtggtaaagatgcccttaaatcttacctcaacgaaaatgaaagtatcgcaaaagaactggagacgaatttaaggaaattgatggaaactcaagcacctaaaaagcaggaggatgaaggtgatttcctgagtgatctgcctgaagagagtctcgccactgaaacatcctccgaggaggaactggcagctgtaatagaagcttaa

SEQ ID NO: 5384 - protein, 448 aa, Oryza sativa subsp
MANLLRRASLRRAVAAVAAAAAPCPETCRYLYALKTNTGSFVTHTSYKQGICGSTFHCRYFSSKAKKKTKSSGTDSGEENLSKKDLALHQAIDQITSAFGKGAIMWLGRSEGRREVPVVSTGSFSLDLALGTGGLPKGRVIEVYGPEASGKTTLALHVIAEAQKHGGYCAFVDAEHALDPALAESIGVNTSNLLLSQPDCGEQALSLVDTLIRSGSVDVVVVDSVAALVPKSELDGEMGDAHVALQARLMSQALRKLSHSLSLSQTILLFINQIRSKVTTFGGFGGPMEVTSGGNALKFYASVRMNIKRIGLVKKGEETIGSQVLVKIVKNKHAPPFKTAQFELEFGKGICRSSELIELGLKHKLVKKLGGAFYSFNEESYRGKDALKSYLNENESIAKELETNLRKLMETQAPKKQEDEGDFLSDLPEESLATETSSEEELAAVIEA

SEQ ID NO: 5385 - DNA, 1308 bp, Physcomitrella patens
  CDS (1)..(1308)
atggcgggagctctgcgagtacttagatctcgccacctctttcagcgcgtatgtgctgcttgtgcggatccttccacctcctatgctctggagactgttaccattcccacgccaggttacttccgcaacaactctggctctgctacagagccaaagagaggcaggcgggtgaagaaggcagcgagggtaatcgaccctgacaaccccaatttggaccatgaatactcgaaacagagtctaatacaagccgcaatcgaccagattgctaagaagcatgggaaggagacagttatgtggcttgggcgggagagtcgtgactttattgatgtcgttcctactggctctctaaacctcgacattgctctaggtgttggcggtctgccaaagggccgggtagtggagatctttggtcaagaagcctctgggaagacgacgattgctcttcacgtgattgcacaggcccaaaaaatgggaaaaggacattgcctatttgtggatgcagagcatgcattagatatgcaatttgctgaaggcatcggtgtgaacacgaaagatcttttgtttgttcagccagattatgctgagcaggccctggatactgtcgatcacttcgttcgctctactggtgtcgatgttattgttgttgacagcgttgctgcacttgtaccgaaagctgaacttgaaggagacatgggtgattctcagatggctttgcaggctcgcctgatgagcaaagcgctccgcagacttactcactctcttaactcctccaattgtctgcttatcttcatcaatcagacacgagcaaagctcaatacgtatggaggtggtggaccaacagctgaggtgacagctggaggaaatgctcttaagttctatgcatccgtgcgcttacaagtcaggaaaaaagaacaactaagacgtggagatgtgccctttggaagttcggttattgtaaaagtggtgaagaacaaagtatcaccaccatttaggactgcggaattcgatattgaatatgggaaaggtatatctcgtgatggtgaagtcctcgatctaggtgtgaagcatggcttgctagggcaatcaggttcatggtattcgtacgagggtaagaacttcgcaaatggaagagaaggtgcgaagaagtacctgcaagaacacacagatctgactgatgctttggtggtagcaatcaaggagaagattttaggccaaccacgtgctagtggggatttggacgacgatgggttcattcaagaggaggacgcttttgaagccgatgctgataatctagaggtgacagggtag

SEQ ID NO: 5386 - protein, 435 aa, Physcomitrella patens
MAGALRVLRSRHLFQRVCAACADPSTSYALETVTIPTPGYFRNNSGSATEPKRGRRVKKAARVIDPDNPNLDHEYSKQSLIQAAIDQIAKKHGKETVMWLGRESRDFIDVVPTGSLNLDIALGVGGLPKGRVVEIFGQEASGKTTIALHVIAQAQKMGKGHCLFVDAEHALDMQFAEGIGVNTKDLLFVQPDYAEQALDTVDHFVRSTGVDVIVVDSVAALVPKAELEGDMGDSQMALQARLMSKALRRLTHSLNSSNCLLIFINQTRAKLNTYGGGGPTAEVTAGGNALKFYASVRLQVRKKEQLRRGDVPFGSSVIVKVVKNKVSPPFRTAEFDIEYGKGISRDGEVLDLGVKHGLLGQSGSWYSYEGKNFANGREGAKKYLQEHTDLTDALVVAIKEKILGQPRASGDLDDDGFIQEEDAFEADADNLEVTG

SEQ ID NO: 5387 - DNA, 1383 bp, Physcomitrella patens
  CDS (1)..(1383)
atggcagcaatagctgtgcagtcgaattgctgctccttcagctccgactgctgctctcagcgatgggatccattcaaaggcaatgggagggtacagcgtggactcttagctggtcccatcaacctgcgcatgccaagcccgtctcagctagtccaacaaggatcatgttccatcagctgcaaggctggcggaacttcaaagcagtctggctctgctcttcgagcaaaagccaagaaaggatcctctgatattaatcctgatgactacctatctgatgaccagttgcaatatgtcgaccggcaaaaggcattagaagccgcgatgagcgacatcaatggctcatttggcaaaggaagtgtgaccaggcttggtagtgctggcggagcgcttgtagagaccttccccagtggttgcctcactttggaccttgcattaggtggtggttttcccaaaggacgtattgtggagatatttggtcccgaaagtagtgggaaaaccacgttagcgcttcatgccatagctgagatacagaagaaaggtgggaacgcaatgttggtggatgctgagcactgttttgatccgtattattcgaaggctctcggtgttgacgtggaaagcttgattgtttgtcaacccgacaatggtgaaatggctttagaaactgctgacaggatgtgcagatctggtgctgtggacataatcgtcattgactctgtatctgcacttaccccccgagctgagattgagggagagattgggatgcaacaaatgggactacaggcccggttaatgagtcaagctcttcgtaagatgtctgccaatgctgcacgcgctaactgcacgattattttcttgaatcagattcgatacaagatagctgttatgtacggaaatcctgaagttacaagtggtggtcttgctctcaagttttttgcttctttgcgccttgacattcgcaacacgggcaagattaagtcgccaagaggtgaggatgatattggcataagggctcgagttcgagtacagaagagcaaggtttcaagaccttacaaacaagcagaattcgatataatatttggcgaaggcatttgcaaattggggagcttactggactcagcagagacagtcggtgttgttgtgaggaaaggtgcttggtacagttatggagaaaccaggttaggtcaagggcgagataaagttgttcaattcctccgagactacccggaagtgtgtgcagacattgagaaggtcgttcgagaaagaattgcagaaatcatgacaacaaagcgagattataacggtcccaatgggagtgctgtggttcatgctggaatggacatcgaggaaatgatgggcgaagacaatttgggagagcttgactga

SEQ ID NO: 5388 - protein, 460 aa, Physcomitrella patens
MAAIAVQSNCCSFSSDCCSQRWDPFKGNGRVQRGLLAGPINLRMPSPSQLVQQGSCSISCKAGGTSKQSGSALRAKAKKGSSDINPDDYLSDDQLQYVDRQKALEAAMSDINGSFGKGSVTRLGSAGGALVETFPSGCLTLDLALGGGFPKGRIVEIFGPESSGKTTLALHAIAEIQKKGGNAMLVDAEHCFDPYYSKALGVDVESLIVCQPDNGEMALETADRMCRSGAVDIIVIDSVSALTPRAEIEGEIGMQQMGLQARLMSQALRKMSANAARANCTIIFLNQIRYKIAVMYGNPEVTSGGLALKFFASLRLDIRNTGKIKSPRGEDDIGIRARVRVQKSKVSRPYKQAEFDIIFGEGICKLGSLLDSAETVGVVVRKGAWYSYGETRLGQGRDKVVQFLRDYPEVCADIEKVVRERIAEIMTTKRDYNGPNGSAVVHAGMDIEEMMGEDNLGELD

SEQ ID NO: 5389 - DNA, 1077 bp, Magnetospirillum gryphiswaldense
  CDS (1)..(1077): transl_table=11
atgtctcaggctgcgttgcgtctcgtggataaggacaccatggatcgtcagaaggcactggaagccgccgtcagccagattgagcgggcgttcggcaagggctccatcatgaagatggggcaaaaggaaacggtcgagaccgaggtggtttccaccggctcgctgggtttggacatcgctttgggcatcggcggcttgccgcgcggtcgcatcatcgagatttacggaccggaaagctcgggcaagaccaccttggccctgcacgttctggccgaggcgcagaaaaagggcggcacctgcgccttcatcgatgccgaacatgcccttgacccgtcctatgcccgcaagctgggggtcaacctggatgatctgctgatcagccagcccgacgccggcgaacaggccttggaaatctgcgataccctggtgcgatccggcgccgtcgacgtgctggtggtcgattcggtcgccgccttggtgccgcgtgccgaacttgaaggcgagatgggcgattcccacgtcggtctgcacgcccgcctgatgagccaggccttgcgcaagctgaccggttcggtgtccaaatccaagaccatcgtcatcttcatcaaccagatccgcatgaagatcggcgtcatgttcggcaacccggaaaccaccactggcggcaacgcgctgaagttctatgcctcggtgcgcatggaaatccgccgtgtcggcgccatcaaggaccgcgacgaggtggtgggcaaccagacccgcgtcaaggtggtcaagaacaagctggcgccgccctttaaggtggttgatttcgacatcatgtatggcgagggcatttccaagaccggcgaattgatcgatctgggcgtcaaggccaacgtggtggaaaagtcgggcgcctggttctcgtacaactcgacccgtgtcggtcagggccgcgagaacgccaagcaattcctgcgtgacaacccggccatggctggcgagatcgaagccaccatccgcgccaatgccggtctggtggccgaagccctggccgccggccccggtgacctggacggcaacgccgccgaggattga

SEQ ID NO: 5390 - protein, 358 aa, Magnetospirillum gryphiswaldense
MSQAALRLVDKDTMDRQKALEAAVSQIERAFGKGSIMKMGQKETVETEVVSTGSLGLDIALGIGGLPRGRIIEIYGPESSGKTTLALHVLAEAQKKGGTCAFIDAEHALDPSYARKLGVNLDDLLISQPDAGEQALEICDTLVRSGAVDVLVVDSVAALVPRAELEGEMGDSHVGLHARLMSQALRKLTGSVSKSKTIVIFINQIRMKIGVMFGNPETTTGGNALKFYASVRMEIRRVGAIKDRDEVVGNQTRVKVVKNKLAPPFKVVDFDIMYGEGISKTGELIDLGVKANVVEKSGAWFSYNSTRVGQGRENAKQFLRDNPAMAGEIEATIRANAGLVAEALAAGPGDLDGNAAED

SEQ ID NO: 5391 - DNA, 1047 bp, Propionibacterium acnes
  CDS (1)..(1047): transl_table=11
atggcagcgaccgctgaccgcgaaaaggcccttgccacggccttgcagcagatcgagaagcagcacggcaagggctctatcatgcgccttggcgagcaggagaccgttaagatcgccgctatccccacgggctcggtggccctcgacgtcgcgttgggtgtcggaggcctcccacgtggcaggatcgtggagatctatggtcccgaatcctccggcaagacgacggtggctttgcacgcaatcgctaatgcccaggctgaaggcggcatctgtgcctttattgacgccgagcacgctctcgacccggaatacgcacgcaaactcggggtcgatacagattccctgctggtgagccagcctgacaatggtgagcaggctctcgagattgctgacaccctcgtccgctcgggtgccttggagctcatcgttgttgactcggtggccgctctgaccccgaaggctgagatcgagggcgagatgggtgattcccatgttggtttgcaggcccgccttatgagccaggccctgcgcaagatgaccggtgcgttgaatgcggccggtaccactgccatcttcattaatcagctgcgcgagaagatcggtgtcatgtttggctccccggagacaacgacaggtggtcgcgccctcaagttctactcatccgtgcgcctcgacgtgcggcgtgtcgaaactcttaaagacggatcagagatggtcggtaaccgcactcgtgtcaaggttgccaagaacaaggtcgccccaccttttaagcaggcagagtttgacatcctctacggacagggcatttctcgcgagggaagcctcatcgacatgggcgtagattgtggcattatcaccaaatccggttcgtggttcagctacaacaatgagcagttgggtcagggcaaggagaacgtccgaaagttcctcaaaggtaacccggatgttgccaatgagattgaggacaagatcctgactcacctcggcctgcgcgaagccgaggttcctgagggtgtcgatccccgaaccggcgaggtggaattctga

SEQ ID NO: 5392 - protein, 348 aa, Propionibacterium acnes
MAATADREKALATALQQIEKQHGKGSIMRLGEQETVKIAAIPTGSVALDVALGVGGLPRGRIVEIYGPESSGKTTVALHAIANAQAEGGICAFIDAEHALDPEYARKLGVDTDSLLVSQPDNGEQALEIADTLVRSGALELIVVDSVAALTPKAEIEGEMGDSHVGLQARLMSQALRKMTGALNAAGTTAIFINQLREKIGVMFGSPETTTGGRALKFYSSVRLDVRRVETLKDGSEMVGNRTRVKVAKNKVAPPFKQAEFDILYGQGISREGSLIDMGVDCGIITKSGSWFSYNNEQLGQGKENVRKFLKGNPDVANEIEDKILTHLGLREAEVPEGVDPRTGEVEF

SEQ ID NO: 5393 - DNA, 1050 bp, Staphylococcus xylosus
  CDS (1)..(1050): transl_table=11
atggataacgatcgtcaaaaggctttagatacagtaattaaaaatatggagaaatcatttggtaaaggcgcggtaatgaaattgggtgataacgaggcacgcaaagtttcaagtgtttcaagtggttctgtaacattagataatgctttaggagtaggtggttaccctaagggtagaatcgtagaaatttatggtccagaaagttctggtaaaacgactgtggctcttcatgccattgcggaagttcaaagaaatggaggcgtggcagcttttattgacgctgaacacgcattagacccagtttacgcagaagcattgggtgttgatattcaaaatttatacctatctcaacctgaccatggggaacaaggtttagagattgcagaagcgtttgttagaagtggagctgtagacatagttgttgttgattccgttgcagcattaacacctaaagcagaaattgaaggtgaaatgggagatacacacgttggtttacaagcgcgtttgatgtcacaagccctaagaaaactttcaggtgcgatatctaaatcaaatacgactgctgtattcattaaccaaattcgtgagaaagtcggtgttatgttcggtaatcctgaagttacaccaggtggccgtgcactgaaattctacagttctgttcgtttagaagtacgccgtgcagaacaattaaaacaaggacaagatattgtcggtaatagaactaaaattaaagttgttaagaataaagtggcaccaccatttagagttgctgaagtcgatattatgtacggtaaaggtatctctaaagagggagaattgatcgatttaggtgttgaaaatgaaatcgttgataagtcaggtgcttggtattcttataatggcgacagaatgggacaaggtaaagaaaacgtaaaatcttaccttaaagaaaaccctactgtcaaagcagaaatagatagaaaactaagagaaaaattaggaatatttgatggagatgttgaagagccagaagctaacaatacagcgacacttttggatgaagaagaatag

SEQ ID NO: 5394 - protein, 349 aa, Staphylococcus xylosus
MDNDRQKALDTVIKNMEKSFGKGAVMKLGDNEARKVSSVSSGSVTLDNALGVGGYPKGRIVEIYGPESSGKTTVALHAIAEVQRNGGVAAFIDAEHALDPVYAEALGVDIQNLYLSQPDHGEQGLEIAEAFVRSGAVDIVVVDSVAALTPKAEIEGEMGDTHVGLQARLMSQALRKLSGAISKSNTTAVFINQIREKVGVMFGNPEVTPGGRALKFYSSVRLEVRRAEQLKQGQDIVGNRTKIKVVKNKVAPPFRVAEVDIMYGKGISKEGELIDLGVENEIVDKSGAWYSYNGDRMGQGKENVKSYLKENPTVKAEIDRKLREKLGIFDGDVEEPEANNTATLLDEEE

SEQ ID NO: 5395 - DNA, 1101 bp, Vitis vinifera
  CDS (1)..(1101)
atggaaaaagagctggccctacgacaagccctggatcagattactacctcatttggaaaaggatctatcatgtggcttggtcggtctgtttcttctaaacatgttccagtggtctccacaggatcatttgccttggatatagtattggggattggtggacttccaaagggacgggttgtagagatatatggtccagaggcttctggaaaaacaactcttgctctacatgtaattgctgaagcacaaaagcaaggaggttactgtgtatttgttgatgctgagcatgctcttgatccagcgcttgctgaggccattggggtaaacactcaaaatttgcttctctcgcaaccagattgtggtgaacaagctctcagtcttgtggacaccctaatccggagtggttcggttgatgttgttgttgtagacagtgtagctgccctagtgcctaaaggtgaacttgatggtgagatgggtgatgcacacatggcaatgcaagccagattgatgagtcaggcgcttcgcaaattgagccactctttgtcactatcacaaactattttaatatttataaatcaggtgagagcaaagctatcaacatttggagggtttggtggacccactgaagttacttgtggtggtaatgccttgaagttctatgcttcagtgcgcctaaatattaagagaataggacttgtcaagaaaggagaagagaccattggaagtcaagttcttgtgaaggttgtgaagaacaagcatgcccctccgtttaaaactgctcaatttgagcttgagtttggaaagggtatatgtcgtgaatccgaaatagtagagttaggatgcaaacataaattcatcataaagggtggaggtgctatgtacagttacaatggccagagcttccgtggcaaggatgccattaaacagttcctctctcagaatgaaagtgagcgagaggagcttatgaggaagcttagggagaagctagttggtgagacaaacaaggaaaaagaattggaagcagaggccgtggatgaagatattgcagaagggactgttccacctgatactactgatgaagaagtaactgcagttgaggcatga

SEQ ID NO: 5396 - protein, 366 aa, Vitis vinifera
MEKELALRQALDQITTSFGKGSIMWLGRSVSSKHVPVVSTGSFALDIVLGIGGLPKGRVVEIYGPEASGKTTLALHVIAEAQKQGGYCVFVDAEHALDPALAEAIGVNTQNLLLSQPDCGEQALSLVDTLIRSGSVDVVVVDSVAALVPKGELDGEMGDAHMAMQARLMSQALRKLSHSLSLSQTILIFINQVRAKLSTFGGFGGPTEVTCGGNALKFYASVRLNIKRIGLVKKGEETIGSQVLVKVVKNKHAPPFKTAQFELEFGKGICRESEIVELGCKHKFIIKGGGAMYSYNGQSFRGKDAIKQFLSQNESEREELMRKLREKLVGETNKEKELEAEAVDEDIAEGTVPPDTTDEEVTAVEA

SEQ ID NO: 5397 - DNA, 990 bp, Vitis vinifera
  CDS (1)..(990)
atgaatgatatcaatagttcatttgggaaaggtagtgttacgagattggggagtgctggtggagctctcgttgaaacttttcccagtggctgtttgactttggacttcgcccttggtggtggccttcccaaagggagaattgtggagatatatggaccagaaagtagtggaaagactaccctagcactccatgctattgcagaagtgcagaagctgggaggcaatgccatgcttgttgatgctgagcatgcttttgatccagcatactccaaagcattgggagtcgatgttgaaaatttaattgtctgccaacctgatcatggggagatggcactggagattgcagaccgtatgtgcagatctggtgctatagatcttatttgtgttgattctgtctcagctctcacaccacgtgctgagattgaaggtgaaattgggatgcagcaaatgggtttgcaggcacgtcttatgagccaagctttgcgtaaaatgtcaggaaatgcttccaaagctggatgtactcttattttcttgaatcaaataagatataagattggtgtgtattacggcaatcctgaagtcaccagtggtggtattgctttaaagttctttgcttcactgcgcctggagatacgtcctataggaaaaataaataaaggtgatgaagacattgggctacgagttcgtgtgagagtgcaaaagagtaaggtatgttggccatacaagcaagctgaatttgaaataatatttggagagggagtgagtaaactgggttgcattttggattgtgctgaactgatggatgttgtggtaaagaagggctcttggtatagctatggggacaataggtatgcctttcagactcttatttttacccttggaattaatcttattgtgagttgccttcacatcactataactggattattcttgccatttacattcttcttgtattttgaacacctgtgcaaaataaggttcaatttgtga

SEQ ID NO: 5398 - protein, 329 aa, Vitis vinifera
MNDINSSFGKGSVTRLGSAGGALVETFPSGCLTLDFALGGGLPKGRIVEIYGPESSGKTTLALHAIAEVQKLGGNAMLVDAEHAFDPAYSKALGVDVENLIVCQPDHGEMALEIADRMCRSGAIDLICVDSVSALTPRAEIEGEIGMQQMGLQARLMSQALRKMSGNASKAGCTLIFLNQIRYKIGVYYGNPEVTSGGIALKFFASLRLEIRPIGKINKGDEDIGLRVRVRVQKSKVCWPYKQAEFEIIFGEGVSKLGCILDCAELMDVVVKKGSWYSYGDNRYAFQTLIFTLGINLIVSCLHITITGLFLPFTFFLYFEHLCKIRFNL

SEQ ID NO: 5399 - DNA, 1188 bp, Solanum lycopersicum
  CDS (1)..(1188)
atggtgcttcaatttcttcgtttcatttcctcttcctctcgttgcctttctgttttccccttatcttccttcaaaccggagaatggaatggtttggagaaggatgcttagtgcttatgcatcttcagcagaaggtgaacttgacgaaatccaagatgacaccaaaacatcagagaaagccagtgcactgcattcggccctctcgcagcttgaaggcgatttttgcaaagaatcaaggttgtccttgcagcgcttctttggtgctagacgtactcctgtaatacctacgggctcattgaggcttgatctagcacttgggcttggaggattacctaagggaagaattgttgaaatttacggacaagaagcatctgggaagacaacacttgcccttcatgtaattagagaggctcaaaagcttggaggttattgtgcatatctggatgtcgaaaatggaatgaacccctctcttgccgaagcaataggggtaaatgtagaaaatctccttatttcgcagccagattctgctgagaatttgctgagtattgttaataccctgacaaaaagtggatccatggatgtaatcgtggttgatagtgtggcagctcttgttccccaacttgagattgatgctacgttatgtgactctcctaaaggcttgcaatcaaagattatgacacaagcactacgtaaaattcattattcgttaggcaactctagcacactaattattttcattaatcaggtaagaagatctaacaaaggattagttcgaggctccgggtgtatggatgaagtaacttgtggtggaaatgctttgcctttttatgctgccatacggcttagaacgatcagaaaacaattgcttaagaccaggcataagattactggtcttaggatctgcgtaaaggtggttaaaaataagctagctcctgcagcaacagaagctgaactgagcatacagtacggcggaggcttttgcattgaacctgaggttttggaattggcttgtgaacatgaagtcgttctgaaagaaggagggagctacttcattgatggacaggttttaaatagtagacaggacgctgaagattatctagcttcaaatggtgacattttagctaagatagttgaaactttaagagatcagctattcatgaacaataacggagaaaagaaaactgattag

SEQ ID NO: 5400 - protein, 395 aa, Solanum lycopersicum
MVLQFLRFISSSSRCLSVFPLSSFKPENGMVWRRMLSAYASSAEGELDEIQDDTKTSEKASALHSALSQLEGDFCKESRLSLQRFFGARRTPVIPTGSLRLDLALGLGGLPKGRIVEIYGQEASGKTTLALHVIREAQKLGGYCAYLDVENGMNPSLAEAIGVNVENLLISQPDSAENLLSIVNTLTKSGSMDVIVVDSVAALVPQLEIDATLCDSPKGLQSKIMTQALRKIHYSLGNSSTLIIFINQVRRSNKGLVRGSGCMDEVTCGGNALPFYAAIRLRTIRKQLLKTRHKITGLRICVKVVKNKLAPAATEAELSIQYGGGFCIEPEVLELACEHEVVLKEGGSYFIDGQVLNSRQDAEDYLASNGDILAKIVETLRDQLFMNNNGEKKTD

SEQ ID NO: 5401 - DNA, 1191 bp, Ostreococcus tauri
  CDS (1)..(1191)
atggtcgcgcgaacgctcacgacgacgcgcggtggggtcgtcatggccaaggcgcgagcgagcaaggcgagcaacgcggatgacgcgaaatctggctcgccagacgcgaagaagaaggcgctgcaacgcgtgctggatgagattgatagtaatttcggcgcgggcgcgatcatgcgcctgggcgaggctggcaaggcgaaagtggcgacgtttccgtccggggcgctgacgctggacatggcgctcggtggtggactcccgagaggacgtatcgttgaggtgtatggaccagagagctcggggaagaccacgctggcgctgcacgcgatggcggagatgcaggcgatcggcggtacggtggcaatcatcgacgcggagcacgcgttcgatccggagtactcggcgagactggggttgaacctggatgatgtcatcgtgtgtcagccagaaacgggcgagatggcgctcgaggtcgtggacacgctcgtgcgatcgtcggctgttgatttgatcgtcgtggactctgtcgccgcgctcgtgccgcgaagcgaaatcgaaggcgagatcggcatggtccaggtcggtgcgcacgcacgattgatgtctcaggcgctgagaaagattaacgtcaacgccgccaaggctggaacgacgatcatcttcttgaaccagctccgctcaaaggttggggtgatttacggaagcccggaggtgacgacgggcggcaatgcgctcaagtactacgcgagcgttcgtctcgacattcgacgcaaggaggtcatcaagggtaagagcggcgaggacgacctcggcgtgagatgcaaggtcaaggtggcgaagaacaaggtggcaccgccgtacaaggtggctgagtttgacatgcttttcggccgcggaatctccaaggacggctgcctcctggacgccggcgagcaagtcggtgtcgtcgaccgcaagggtgcttattactactacaacggtgaaaagctcggccaaggccgcgagaagacgctcgcgttcttggacgaaaacctcccggtgaagggcaccatcgaagcggatgttcgccgaaaggtggctgagaagatggccggtctctcgaacaagcccgtcgccgaggaagaggaagagattcccgatgacgccttcttcggcgatgacgaagagatcgtcgctgccgaggcgcgataa

SEQ ID NO: 5402 - protein, 396 aa, Ostreococcus tauri
MVARTLTTTRGGVVMAKARASKASNADDAKSGSPDAKKKALQRVLDEIDSNFGAGAIMRLGEAGKAKVATFPSGALTLDMALGGGLPRGRIVEVYGPESSGKTTLALHAMAEMQAIGGTVAIIDAEHAFDPEYSARLGLNLDDVIVCQPETGEMALEVVDTLVRSSAVDLIVVDSVAALVPRSEIEGEIGMVQVGAHARLMSQALRKINVNAAKAGTTIIFLNQLRSKVGVIYGSPEVTTGGNALKYYASVRLDIRRKEVIKGKSGEDDLGVRCKVKVAKNKVAPPYKVAEFDMLFGRGISKDGCLLDAGEQVGVVDRKGAYYYYNGEKLGQGREKTLAFLDENLPVKGTIEADVRRKVAEKMAGLSNKPVAEEEEEIPDDAFFGDDEEIVAAEAR

SEQ ID NO: 5403 - DNA, 1074 bp, Anaplasma centrale
  CDS (1)..(1074): transl_table=11
atgtcaggcagtaagaaagatgttgaatctgacaagcaaaaggcgttggatgccgctataagtcagatagaaagagcgttcgggcgcggcgccatcatgaagttgaaacagcaccctgcagagaaaatggatagtgtatctactggctcaatagctctggatgcagcgctgggtattggaggcctaccaaagggtaggatagtggaaatcttcggtccagaaagctcaggaaaaaccacacttgcacttcatgttattgctgaagcacagaaacaaggaggtaactgtgccttcatcgatgcagaacacgcattggacactgtgtatgccaggaagttgggtgtgagcgtgggtgatttgatagtctcgcagcccgacactggtgagcaggctttgcacattgttgagtacctggtgtgttctggtgctatagatgtgatagtggtggattctgttgcggcgcttacccctagggctgaaatagagggtgatatgggtgatcagcacatggggttgcaggctaggttgcttagccacgcgcttcgtaagctgacttctgtggtatccaaggctaactgcatactggtgttcataaaccagatacgcataaagataggtgtgatgtacggcaacccggaagtaacaacgggcggcagtgcgctcaagttctacacatcgatacggcttgacattcgcaaggtgagtgcaattaaagacaaagacagcgttataggaaatcagacgagagtgaaagtagtcaaaaacaaggttgcgcccccgttcaagcaggcagagtttgacatcgtatacaatgaaggcatatcaaagttgggtgaaatagttgatatgggtgtcaagttcggttttgtcgagaagtctggtgcctactactcctatggcgcagttaagttggggcaagggagggagaatgccaaggcttacctgaagagcagcccagatgttgcgaatgagttggaacaaaaaatcagagcgtaccttgcggagagtatgcacaacaacgatctgtttgctgcagacgggcgtaccgatgtgctggaggaggaggttttctag

SEQ ID NO: 5404 - protein, 357 aa, Anaplasma centrale
MSGSKKDVESDKQKALDAAISQIERAFGRGAIMKLKQHPAEKMDSVSTGSIALDAALGIGGLPKGRIVEIFGPESSGKTTLALHVIAEAQKQGGNCAFIDAEHALDTVYARKLGVSVGDLIVSQPDTGEQALHIVEYLVCSGAIDVIVVDSVAALTPRAEIEGDMGDQHMGLQARLLSHALRKLTSVVSKANCILVFINQIRIKIGVMYGNPEVTTGGSALKFYTSIRLDIRKVSAIKDKDSVIGNQTRVKVVKNKVAPPFKQAEFDIVYNEGISKLGEIVDMGVKFGFVEKSGAYYSYGAVKLGQGRENAKAYLKSSPDVANELEQKIRAYLAESMHNNDLFAADGRTDVLEEEVF

SEQ ID NO: 5405 - DNA, 1131 bp, Streptomyces argillaceus
  CDS (1)..(1131): transl_table=11
atggcaggcaccgaccgcgagaaggccctggacgccgcactcgcacagattgaacggcaattcggcaagggcgcggtcatgcgcatgggcgaccgctcgaaggagcccatcgaggtcatcccgaccgggtcgaccgcgctcgacgtggccctcggcgtcggcggtctgccgcgcggccgtgtcatcgaggtctacggacccgagtcctccggcaagacgaccctgaccctgcacgcggtggcgaacgcccagagggccggcggccaggtggcgttcgtggacgccgagcacgccctcgaccccgagtacgcgcagaagctcggcgtggacatcgacaacctgatcctgtcccagccggacaacggcgagcaggccctggagatcgtggacatgctcgtccgctccggggccctcgacctgatcgtcatcgactccgtcgccgcgctcgtcccgcgtgcggagatcgagggcgagatgggcgacagccacgtgggtctgcaggcccgtctgatgagccaggccctgcggaagatcaccagcgcgctcaaccagtccaagaccaccgcgatcttcatcaaccagctccgcgagaagatcggtgtgatgttcggctccccggagaccacgaccggtggccgggcgctgaagttctacgcctccgtgcggctcgacatccggcgcatcgagacgctgaaggacggcaccgacgcggtcggcaaccgcacccgcgtcaaggtcgtcaagaacaaggtcgcgccgcccttcaagcaggccgagttcgacatcctctacgggcagggcatcagccgtgagggcggcctgatcgacatgggcgtggagcacggcttcgtccgcaaggccggcgcctggtacacgtacgagggcgaccagctcggccagggcaaggagaacgcccgcaacttcctcaaggacaaccccgacctcgccaacgagatcgagaggaagatcaaggagaagctgggggtgggcgtacgccccgagcagcccgccgaggccccgagtgcggatgacgcggccgccccgggcgcaccggcggctgacgcggccaaggcggttcccgcttccgcagccaaggccaccaagaccaaggccgcggctgccaagagctga

SEQ ID NO: 5406 - protein, 376 aa, Streptomyces argillaceus
MAGTDREKALDAALAQIERQFGKGAVMRMGDRSKEPIEVIPTGSTALDVALGVGGLPRGRVIEVYGPESSGKTTLTLHAVANAQRAGGQVAFVDAEHALDPEYAQKLGVDIDNLILSQPDNGEQALEIVDMLVRSGALDLIVIDSVAALVPRAEIEGEMGDSHVGLQARLMSQALRKITSALNQSKTTAIFINQLREKIGVMFGSPETTTGGRALKFYASVRLDIRRIETLKDGTDAVGNRTRVKVVKNKVAPPFKQAEFDILYGQGISREGGLIDMGVEHGFVRKAGAWYTYEGDQLGQGKENARNFLKDNPDLANEIERKIKEKLGVGVRPEQPAEAPSADDAAAPGAPAADAAKAVPASAAKATKTKAAAAKS

SEQ ID NO: 5407 - DNA, 1050 bp, Moraxella catarrhalis
  CDS (1)..(1050): transl_table=11
atggacgaaaataaagaaaaagcactcaaagccgccttggctcaaattgaaaaacagtttggtaaaaataccatcatgcatttgggtgatgaaacagccaagcttgatgtggatgtggtctcaacaggttcgcttgggcttgatattgcattgggtatcggtggcttgccaaaaggtcgaattattgagatttttgggcctgaaagctctggtaaaaccacactgaccttacaaaccattgccgagtgccaaaagcaaggcggtacttgtgcctttattgatgctgaacatgcacttgatccgatttatgccaaaaagcttggcgtcaatattgatgatttgcttgtctcgcagcctgacaatggcgaacaggcacttgagattgccgatatgctcgtacgctcaggtgccattgatctgattgtcgtagactcggtggctgctttgactccaaaagctgaaattgaaggtgaaatgggcgacagccacatgggtctgcaagcacgcttgatgagccaagcactgcgtaaaattactggcaacgccaagcgttcaaattgtatggtgatttttattaaccaaatccgtatgaaaattggcgtcatgtttggcagtccagaaacgaccacaggtggtaatgccctaaaattctatgcctctgtgcgtcttgatattcgacgcattggctctgtcaaagatggcgatgagattattggttcagaaacacgcgtcaaagtcatcaaaaataagatggcaccgccatttcgccaaaccgaatttcaaattatgtacggtgagggcattaaccgcctaggcgaggtgatcgatttgggtgttgatattggtgctgttggtaagtcaggtgcttggtacagttatggtgatggtaaaattggtcaaggtaaagccaatacggtcaaatatctgcaagaaaatcctgccattgccagcgaaatcgaagccaaagttcgtgagattaaattagccacagtcacacccatcgtagaatcagatgagcctgaagagcatttagaagatgataatttctaa

SEQ ID NO: 5408 - protein, 349 aa, Moraxella catarrhalis
MDENKEKALKAALAQIEKQFGKNTIMHLGDETAKLDVDVVSTGSLGLDIALGIGGLPKGRIIEIFGPESSGKTTLTLQTIAECQKQGGTCAFIDAEHALDPIYAKKLGVNIDDLLVSQPDNGEQALEIADMLVRSGAIDLIVVDSVAALTPKAEIEGEMGDSHMGLQARLMSQALRKITGNAKRSNCMVIFINQIRMKIGVMFGSPETTTGGNALKFYASVRLDIRRIGSVKDGDEIIGSETRVKVIKNKMAPPFRQTEFQIMYGEGINRLGEVIDLGVDIGAVGKSGAWYSYGDGKIGQGKANTVKYLQENPAIASEIEAKVREIKLATVTPIVESDEPEEHLEDDNF

SEQ ID NO: 5409 - DNA, 1047 bp, Propionibacterium acnes
  CDS (1)..(1047): transl_table=11
atggcagcgaccgctgaccgcgaaaaggcccttgccacggccttgcagcagatcgagaagcagcacggcaagggctctatcatgcgccttggcgagcaggagaccgttaagatcgccgctatccccacgggctcggtggccctcgacgtcgcgttgggtgtcggaggcctcccacgtggcagaatcgtggagatctatggtcccgaatcctccggcaagacgacggtggctttgcacgcaatcgctaatgcccaggctgaaggcggcatctgtgcctttattgacgccgagcacgctctcgacccggaatacgcacgcaaactcggggtcgatacaaattccctgctggtgagccagcctgacaatggtgagcaggctctcgagattgctgacaccctcgtccgctcgggtgccttggagctcatcgttgttgactcggtggccgctctgaccccgaaggctgagatcgagggcgagatgggtgattcccatgttggtttgcaggcccgccttatgagccaggccctgcgcaagatgaccggtgcgttgaatgcggccggtaccactgccatcttcattaatcagctgcgcgagaagatcggtgtcatgtttggctccccggagacaacgacaggtggtcgcgccctcaagttctactcgtccgtgcgcctcgacgtgcggcgtgtcgaaactcttaaagacggatcagagatggtcggtaaccgcactcgtgtcaaggttgccaagaacaaggtcgccccaccttttaagcaggcagagtttgacatcctttacggacagggcatttctcgcgagggaagcctcatcgacatgggcgtagattgcggcatcatcaccaaatccggttcgtggttcagctacaacaatgagcagttgggtcagggtaaggagaacgtccgaaagttcctcagaggtaacccggatgttgccaatgagattgaggacaagatcctgactcaccttggcctgcgcgaagccgaggtccctgaaggtgtcgatccccgaactggcgaggtggaattctga

SEQ ID NO: 5410 - protein, 348 aa, Propionibacterium acnes
MAATADREKALATALQQIEKQHGKGSIMRLGEQETVKIAAIPTGSVALDVALGVGGLPRGRIVEIYGPESSGKTTVALHAIANAQAEGGICAFIDAEHALDPEYARKLGVDTNSLLVSQPDNGEQALEIADTLVRSGALELIVVDSVAALTPKAEIEGEMGDSHVGLQARLMSQALRKMTGALNAAGTTAIFINQLREKIGVMFGSPETTTGGRALKFYSSVRLDVRRVETLKDGSEMVGNRTRVKVAKNKVAPPFKQAEFDILYGQGISREGSLIDMGVDCGIITKSGSWFSYNNEQLGQGKENVRKFLRGNPDVANEIEDKILTHLGLREAEVPEGVDPRTGEVEF

SEQ ID NO: 5411 - DNA, 1047 bp, Propionibacterium acnes
  CDS (1)..(1047): transl_table=11
atggcagcgaccgctgaccgcgaaaaggcccttgccacggccttgcagcagatcgagaagcagcacggcaaaggctctatcatgcgccttggcgagcaggagaccgttaagatcgccgctatccccacgggctcggtggccctcgacgtcgcgttgggtgtcggaggcctcccacgtggcaggatcgtggagatctatggtcccgaatcctctggcaagacgacggtggctttgcacgcaatcgctaatgcccaggctgaaggcggcatctgtgcctttattgacgccgagcacgctctcgacccggaatacgcacgcaaactcggggtcgatacagattccctgctggtgagccagcctgacaatggtgagcaggctctcgagattgctgacaccctcgtccgctcgggtgccttggagctcgtcgttgttgactcggtggccgctctgaccccgaaggctgagatcgagggcgagatgggtgattcccatgttggtttgcaggcccgccttatgagccaggccctgcgcaagatgaccggtgcgttaaatgcggccggtaccactgccatcttcattaatcagctgcgcgagaagatcggtgtcatgtttggctccccggagacaacgacaggtggtcgcgccctcaagttctactcgtccgtgcgcctcgacgtgcggcgtgtcgaaactcttaaagacggatcagagatggtcggtaaccgcactcgtgtcaaggttgccaagaacaaggtcgccccaccttttaagcaggcagagtttgacatcctctacggacagggcatttctcgcgagggaagcctcatcgacatgggcgtagattgcggcatcatcaccaaatccggttcgtggttcagctacaacaatgagcagttgggtcagggtaaggagaacgtccgaaagttcctcaaaggtaacccggatgttgccaatgagattgaggacaagatcctgactcacctcggcctgcgcgaagccgaggttcctgagggtgtcgatccccgaactggcgaggtggaattctga

SEQ ID NO: 5412 - protein, 348 aa, Propionibacterium acnes
MAATADREKALATALQQIEKQHGKGSIMRLGEQETVKIAAIPTGSVALDVALGVGGLPRGRIVEIYGPESSGKTTVALHAIANAQAEGGICAFIDAEHALDPEYARKLGVDTDSLLVSQPDNGEQALEIADTLVRSGALELVVVDSVAALTPKAEIEGEMGDSHVGLQARLMSQALRKMTGALNAAGTTAIFINQLREKIGVMFGSPETTTGGRALKFYSSVRLDVRRVETLKDGSEMVGNRTRVKVAKNKVAPPFKQAEFDILYGQGISREGSLIDMGVDCGIITKSGSWFSYNNEQLGQGKENVRKFLKGNPDVANEIEDKILTHLGLREAEVPEGVDPRTGEVEF

SEQ ID NO: 5413 - DNA, 1050 bp, Mycobacterium wolinskyi
  CDS (1)..(1050): transl_table=11
atggcgccccaggcccccgatcgcgaaaaagccctcgagctggcgatggcccagatcgacaagaacttcggcaaaggttcggtgatgcgcctcggtgacgaggtgcgccagccgatctcggtcatcccgaccggttcgatcgcgttggatgtggcactcggtatcggcggtctgccgaggggccgtgtcgtcgagatctacggcccggagtcctcgggtaagacgacggtcgcgctgcatgcggtggccaacgcgcaagccgcaggcggcatcgcggcgttcatcgacgccgagcacgcgctcgatccggagtacgccaagaagctcggcgtggacaccgactcgctgttggtctctcagcccgacaccggtgagcaggcgctggagatcgccgacatgctggtgcgctcgggtgcgctggacatcctggtgatcgactcggtcgccgccctggtgccccgcgccgagatcgaaggcgagatgggcgacagtcacgtcggtctgcaggcccgcctgatgagccaggcgctgcggaagatgaccggtgcgctcaacaactccggcaccaccgcgatcttcatcaaccagctccgcgagaagatcggcgtgatgttcggctcgcccgagaccacaacgggcggtaaggcgctgaagttctacgcctcggtccggatggacgtccgccgcatcgagacactcaaggacggcaccgacgccgtgggtaaccgcacccgcgtcaagatcgtcaagaacaaggtgtcgccgccgttcaagcaggccgagttcgacatcctctacggccagggcatcagccgcgaaggctcgctcatcgacatgggtgtcgagcacggcttcatccgcaagtcgggctcgtggttcacctatgagggtgagcagctgggccagggcaaggagaacgcccgcaagttcttgctggagaacgtcgatgccgccaacgagatcgagaagaggatcaaagagaagctcggcatcggtgccgacgtgaccgccgcggctgatgaagcactcccggccccagttgacttctga

SEQ ID NO: 5414 - protein, 349 aa, Mycobacterium wolinskyi
MAPQAPDREKALELAMAQIDKNFGKGSVMRLGDEVRQPISVIPTGSIALDVALGIGGLPRGRVVEIYGPESSGKTTVALHAVANAQAAGGIAAFIDAEHALDPEYAKKLGVDTDSLLVSQPDTGEQALEIADMLVRSGALDILVIDSVAALVPRAEIEGEMGDSHVGLQARLMSQALRKMTGALNNSGTTAIFINQLREKIGVMFGSPETTTGGKALKFYASVRMDVRRIETLKDGTDAVGNRTRVKIVKNKVSPPFKQAEFDILYGQGISREGSLIDMGVEHGFIRKSGSWFTYEGEQLGQGKENARKFLLENVDAANEIEKRIKEKLGIGADVTAAADEALPAPVDF

SEQ ID NO: 5415 - DNA, 1056 bp, Mycobacterium porcinum
  CDS (1)..(1056): transl_table=11
atggcgcagcaagcccctgatcgcgaaaaagcgctcgaactggcgatggcccagatcgacaagaacttcggtaaaggctcggtgatgcgcctcggcgaggaggtgcgccagccgatctcggtgatccccaccggttcgatctccctggacgtggccctcggcatcggcggcctgccgcgcggccgcgtggtcgagatctacggcccggaatcctcgggtaagaccactgtggcgctgcacgcggtggccaacgcccaggccgccggcggcatcgcggcattcatcgacgccgagcacgccctggatcccgagtacgccaagaagctcggtgtggacaccgattccctgttggtgagccagccggacaccggtgagcaggcgctggagatcgccgacatgctggtgcgctcgggtgcgctggacatcctggtgatcgactcggtggcagccctggtgccccgcgccgagatcgagggcgagatgggtgacagccacgtcggcctgcaggcccgcctgatgagccaggcgctgcgcaagatgaccggtgcgctgaacaactcgggcaccaccgcgatcttcatcaaccagctccgcgagaagatcggtgtgatgttcggctcgcccgaaaccaccacgggtggtaaggctttgaagttctacgcctcagtccgcctggacgtgcgtcgtatcgagacgctcaaggacggcaccgacgcggtcggtaaccgcacccgcgtcaaggtcgtcaagaacaaggtgtcgccgccgttcaagcaggctgagttcgacatcctgtacggccagggcatcagccgcgaaggctcgctcatcgacatgggtgtcgagcacggcttcatccgcaagtccgggtcctggttcacctacgaaggtgagcagctgggccagggcaaggagaacgcccgcaagttcctgctggagaacgtcgacgtcgccaacgagatcgagaagaagatcaaggaaaagctcggcatcggtgctgtcgtgacggccgaggcgaaggctgatgaagtccttcccgccccggttgatttctga

SEQ ID NO: 5416 - protein, 351 aa, Mycobacterium porcinum
MAQQAPDREKALELAMAQIDKNFGKGSVMRLGEEVRQPISVIPTGSISLDVALGIGGLPRGRVVEIYGPESSGKTTVALHAVANAQAAGGIAAFIDAEHALDPEYAKKLGVDTDSLLVSQPDTGEQALEIADMLVRSGALDILVIDSVAALVPRAEIEGEMGDSHVGLQARLMSQALRKMTGALNNSGTTAIFINQLREKIGVMFGSPETTTGGKALKFYASVRLDVRRIETLKDGTDAVGNRTRVKVVKNKVSPPFKQAEFDILYGQGISREGSLIDMGVEHGFIRKSGSWFTYEGEQLGQGKENARKFLLENVDVANEIEKKIKEKLGIGAVVTAEAKADEVLPAPVDF

SEQ ID NO: 5417 - DNA, 1053 bp, Mycobacterium mucogenicum
  CDS (1)..(1053): transl_table=11
atggcagcacaggccccggatcgcgagaaggcactcgagctcgcgctggcacagatcgacaagagcttcggcaagggctcggtgatgcggctgggggaagagacccgccaaccgatttcggacatcccgaccggctccatcgccctggatgtcgccctcggcatcggcggcctgccgcgcggccgcgtcatcgagatctacggcccggaatcctcgggtaagaccacggtggccctgcatgcggtggccaacgctcaggccgccggcggcatcgcggcgttcatcgacgccgagcacgcgctggatcccgagtacgccaagaagctcggtgtggacaccgacgcgctgctggtgtcccagcccgacaccggtgagcaggccctggagatcgccgacatgctggtgcgttcgggcgccatggacatcctggtcatcgactcggtcgccgccctggtgccgcgcgccgagatcgagggcgagatgggcgacagccacgtcggtctgcaggcccgcctgatgagccaggcgctgcgcaagatgaccggcgcgctgaacaactccggcaccaccgccatcttcatcaaccagctgcgcgagaagatcggcgtgatgttcggctcgcccgaaaccaccacgggtggtaaggctctgaagttctacgcctcggtgcgcatggacgtgcgccgcatcgagacgctgaaggacggcaccgacgcggtcggtaaccgcacccgcgtcaagatcgtcaagaacaaggtggcgccgccgttcaagcaggccgagttcgacatcctctacggtcgcggcatctcgcgcgagggctcgctcatcgacatgggtgtcgagcacggcttcatccgcaagtcgggttcgtggttcacctacgacggtgagcagctggggcagggcaaggagaatgcccgcaacttcctgctggagaacgtggatgccgccaacgagatcgagaagaagatcaaagagaagctcggtatcggtgcggtgctgaccgatggtgcggctgatgacgtccttcccgccccggtcgacttctga

SEQ ID NO: 5418 - protein, 350 aa, Mycobacterium mucogenicum
MAAQAPDREKALELALAQIDKSFGKGSVMRLGEETRQPISDIPTGSIALDVALGIGGLPRGRVIEIYGPESSGKTTVALHAVANAQAAGGIAAFIDAEHALDPEYAKKLGVDTDALLVSQPDTGEQALEIADMLVRSGAMDILVIDSVAALVPRAEIEGEMGDSHVGLQARLMSQALRKMTGALNNSGTTAIFINQLREKIGVMFGSPETTTGGKALKFYASVRMDVRRIETLKDGTDAVGNRTRVKIVKNKVAPPFKQAEFDILYGRGISREGSLIDMGVEHGFIRKSGSWFTYDGEQLGQGKENARNFLLENVDAANEIEKKIKEKLGIGAVLTDGAADDVLPAPVDF

SEQ ID NO: 5419 - DNA, 1053 bp, Mycobacterium mucogenicum
  CDS (1)..(1053): transl_table=11
atggcagcacaggccccggatcgcgagaaggcactcgagctcgcgctggcacagatcgacaagagcttcggcaagggctcggtgatgcggctgggggaagagacccgccaaccgatttcggtcatcccgaccggctccatcgccctggatgtcgccctcggcatcggcggcctgccgcgcggccgcgtcatcgagatctacggcccggaatcctcgggtaagaccacggtggccctgcatgcggtggccaacgctcaggccgccggcggcatcgcggcgttcatcgacgccgagcacgcgctggatcccgagtacgccaagaagctcggtgtcgacaccgacgcgctgctggtgtcccagcccgacaccggtgagcaggccctggagatcgccgacatgctggtgcgttcgggcgccatcgacatcctggtcatcgactcggtcgccgccctggtgccgcgcgccgagatcgagggcgagatgggcgacagccacgtcggtctgcaggcccgcctgatgagccaggcgctgcgcaagatgaccggtgcgctgaacaactccggcaccaccgccatcttcatcaaccagctgcgcgagaagatcggcgtgatgttcggttcgcccgaaaccaccacgggtggtaaggctttgaagttctacgcctcggtgcgtatggacgtgcgccgcatcgagacgctgaaggacggcaccgacgcggtcggtaaccgcacccgcgtcaagatcgtcaagaacaaggtggcgccgccgttcaagcaggccgagttcgacatcctctacggtcgcggcatctcgcgcgagggctcgctcatcgacatgggtgtcgagcacggcttcatccgcaagtcgggttcgtggttcacctacgacggtgagcagctggggcagggcaaggagaacgcccgcaactacctgctgcagaacgtggatgccgccaacgagatcgagaagaagatcaaagagaagctcggtatcggtgcagtgctgaccgatggtgcggctgatgacgtccttcccgccccggtcgacttctga

SEQ ID NO: 5420 - protein, 350 aa, Mycobacterium mucogenicum
MAAQAPDREKALELALAQIDKSFGKGSVMRLGEETRQPISVIPTGSIALDVALGIGGLPRGRVIEIYGPESSGKTTVALHAVANAQAAGGIAAFIDAEHALDPEYAKKLGVDTDALLVSQPDTGEQALEIADMLVRSGAIDILVIDSVAALVPRAEIEGEMGDSHVGLQARLMSQALRKMTGALNNSGTTAIFINQLREKIGVMFGSPETTTGGKALKFYASVRMDVRRIETLKDGTDAVGNRTRVKIVKNKVAPPFKQAEFDILYGRGISREGSLIDMGVEHGFIRKSGSWFTYDGEQLGQGKENARNYLLQNVDAANEIEKKIKEKLGIGAVLTDGAADDVLPAPVDF

SEQ ID NO: 5421 - DNA, 1056 bp, Mycobacterium septicum
  CDS (1)..(1056): transl_table=11
atggcgccccaggccccggatcgcgaaaaagcgctcgaactggcgatggcccagatcgacaagaacttcggtaaaggctcggtgatgcgcctcggcgaggaggtgcgccagccgatctcggtgatccccaccggttcgatttctctggatgtggcactcggcatcggtggcctgccgcgcggccgcgtagtcgagatctacggcccggaatcctcgggtaagaccactgtggcactgcacgcggtggccaacgcccaggccgccggcggcatcgcggcgttcatcgacgccgagcatgccctggatcccgagtacgccaagaagctcggggtggacaccgattcactgctggtgagccagcccgacaccggcgagcaggcgctggagatcgccgacatgctggtgcgctcgggcgcgctggacatcctggtgatcgactcggtggcagccctggtgccccgcgccgagatcgagggtgagatgggtgacagccacgtgggtctgcaggcccgcctgatgagccaggcgctgcgcaagatgaccggtgcgctgaacaactcgggcaccaccgcgatcttcatcaaccagctccgcgtgaagatcggcgtgatgttcggctcgcccgaaaccaccacgggcggtaaggctctgaagttctacgcctcggtccgtctcgacgtccggcgtatcgagacgctcaaggacggcaccgacgcggtcggtaaccggacccgcgtcaaggtcgtcaagaacaaggtctcgccgccgttcaagcaggccgagttcgacatcctgtacggccacggcatcagccgcgaaggctcgctcatcgacatgggcgtcgagcacggcttcatccgcaagtccgggtcctggttcacctatgagggtgagcagctgggccagggcaaggagaacgcccgcaagttcctgctggagaacatcgatgtcgccaacgagatcgagaagaagatcaaggaaaagctcggcatcggtgctgtcgtgacggccgaggcgaaggctgatgaagtccttcccgccccggttgatttctga

SEQ ID NO: 5422 - protein, 351 aa, Mycobacterium septicum
MAPQAPDREKALELAMAQIDKNFGKGSVMRLGEEVRQPISVIPTGSISLDVALGIGGLPRGRVVEIYGPESSGKTTVALHAVANAQAAGGIAAFIDAEHALDPEYAKKLGVDTDSLLVSQPDTGEQALEIADMLVRSGALDILVIDSVAALVPRAEIEGEMGDSHVGLQARLMSQALRKMTGALNNSGTTAIFINQLRVKIGVMFGSPETTTGGKALKFYASVRLDVRRIETLKDGTDAVGNRTRVKVVKNKVSPPFKQAEFDILYGHGISREGSLIDMGVEHGFIRKSGSWFTYEGEQLGQGKENARKFLLENIDVANEIEKKIKEKLGIGAVVTAEAKADEVLPAPVDF

SEQ ID NO: 5423 - DNA, 1056 bp, Mycobacterium peregrinum
  CDS (1)..(1056): transl_table=11
atggcgcaacaggcccctgatcgcgaaaaagcgctcgaactggcgatggcccagatcgacaagaacttcggtaaaggctcggtgatgcgcctcggcgaggaggtgcgccagcccatctcggtgatccccaccggttcgatttccctggacgtcgcgctcggtatcggtggcctgcctcgcggccgcgtggtcgagatctacggcccggaatcctcgggtaagaccactgtggcgctgcacgcggtggccaatgcccaggctgccggcggtatcgcggcgttcatcgacgctgagcacgccctggatcccgagtacgccaagaagctcggtgtggacaccgattcgctgctggtcagccagcccgacacgggtgagcaggcgctggagatcgccgacatgctggtgcgctcgggcgcgctggacatcctggtgatcgactcggtggccgccctggtgccccgcgccgagatcgagggtgagatgggcgacagccacgtcggtctgcaggcccgtctgatgagccaggcgctgcgcaagatgaccggtgcgctgaacaactcgggcaccaccgcgatcttcatcaaccagctccgcgtgaagatcggcgtgatgttcggctcgcccgaaaccaccacgggcggtaaggctctgaagttctacgcctcggtccgtctcgacgtccggcgtatcgagacgctcaaggacggcaccgacgcggtcggtaaccggacccgcgtcaaggtcgtcaagaacaaggtctcgccgccgttcaagcaggccgagttcgacatcctgtatggccacggcatcagccgcgagggctcactcatcgacatgggtgtcgagcacggcttcatccgcaagtccggctcctggttcacctacgaaggtgagcagctggggcagggcaaggagaatgcccgcaaattcatgttggagaacgtcgacgtcgccaacgagatcgagaagaagatcaaggaaaagctcggtatcggtgccgtcgtgaccgccgaggcaaaggctgatgacgtccttcccgccccggttgacttctga

SEQ ID NO: 5424 - protein, 351 aa, Mycobacterium peregrinum
MAQQAPDREKALELAMAQIDKNFGKGSVMRLGEEVRQPISVIPTGSISLDVALGIGGLPRGRVVEIYGPESSGKTTVALHAVANAQAAGGIAAFIDAEHALDPEYAKKLGVDTDSLLVSQPDTGEQALEIADMLVRSGALDILVIDSVAALVPRAEIEGEMGDSHVGLQARLMSQALRKMTGALNNSGTTAIFINQLRVKIGVMFGSPETTTGGKALKFYASVRLDVRRIETLKDGTDAVGNRTRVKVVKNKVSPPFKQAEFDILYGHGISREGSLIDMGVEHGFIRKSGSWFTYEGEQLGQGKENARKFMLENVDVANEIEKKIKEKLGIGAVVTAEAKADDVLPAPVDF

SEQ ID NO: 5425 - DNA, 1041 bp, Mycobacterium chelonae
  CDS (1)..(1041): transl_table=11
atggcgcaggcaccggatcgcgagaaggccctcgagctcgcgctcgcacaaatcgacaagagcttcggtaagggctcggtcatgcggttgggcgacgaggtgcgccagcccatctccgtgattccaaccggatccatcgcgctggacgtggcgctcggcatcggcggcctgccccggggacgcgttgtggagatctacggcccggaatcctcgggtaagaccaccgtggcgctgcatgcggtagccaatgcgcaagcggccggcggtatcgccgcgttcatcgacgccgagcatgcgctggacccggattacgccaagaagctcggtgtcgacaccgactcgctgctggtgtcccagccggacactggtgaacaggctctggagatcgccgacatgctggtgcgctccggcgccatctcccttcttgtcatcgactcggtggccgccctggtgccacgggccgagatcgagggtgagatgggtgatagccacgtcggtctgcaggcccgtctgatgagccaggcgctgcgcaagatgaccggtgcgctcaacaattcgggcaccaccgcgatcttcatcaaccagctgcgcgagaagatcggcgtcatgttcggctcgcccgaaaccaccacgggtggtaaggctttgaagttctactcttcggtgcgtctggatgtgcgtcgcattgagacccttaaggacggcaccgatgcggtgggtaaccgcacgcgcgtcaaggtcgtgaagaacaaggtgtcgccgccgttcaagcaggccgagttcgacatcctctacggcaagggcatctccaaagagggctcgctcatcgatatgggtgtggagcagggcttcatccgtaagtccggttcctggttcacctatgagggggagcagttgggtcagggcaaggagaacgcccgcaacttcctgttggagaacgtcgatgtcgccaacgagatcgagaagaagatcaaggaaaagctgggtatcggagcggtgctgaccgatgacgaagtcgtcccggccccagtcgatttctga

SEQ ID NO: 5426 - protein, 346 aa, Mycobacterium chelonae
MAQAPDREKALELALAQIDKSFGKGSVMRLGDEVRQPISVIPTGSIALDVALGIGGLPRGRVVEIYGPESSGKTTVALHAVANAQAAGGIAAFIDAEHALDPDYAKKLGVDTDSLLVSQPDTGEQALEIADMLVRSGAISLLVIDSVAALVPRAEIEGEMGDSHVGLQARLMSQALRKMTGALNNSGTTAIFINQLREKIGVMFGSPETTTGGKALKFYSSVRLDVRRIETLKDGTDAVGNRTRVKVVKNKVSPPFKQAEFDILYGKGISKEGSLIDMGVEQGFIRKSGSWFTYEGEQLGQGKENARNFLLENVDVANEIEKKIKEKLGIGAVLTDDEVVPAPVDF

SEQ ID NO: 5427 - DNA, 1041 bp, Mycobacterium immunogenum
  CDS (1)..(1041): transl_table=11
atggcgcaggcaccggatcgcgagaaggctctcgagctcgcgctcgcacaaatcgacaagagtttcggtaaaggctcggtcatgcggttgggcgacgaggtgcgccagcccatctccgtgatccccaccggatccatcgcgctggacgtggcactcggtatcggtggcctgcctcgcggccgcgtcatcgagatctacggtccggaatcttcgggtaagaccacggtggcgttgcatgccgtggccaacgcacaacgtgccggcggcatcgcggcgttcatcgatgccgagcacgctctggatcccgagtacgccaagaagctcggtgtcgacaccgattcgctgctggtatcacagcccgacaccggtgagcaggcgctggagatcgccgacatgctggtgcgctccggcgctatcgacctcatcgtcatcgactcggtggccgcgctggtgccacgcgctgagatcgagggcgagatgggcgacagccacgtcggtctgcaggctcgtctgatgagccaggcgttgcgcaagatgaccggcgcgctcaacaactccggtaccaccgcgatcttcatcaaccagctgcgtgagaagatcggcgtgatgttcggttcgcccgaaaccactactggtggtaaggctttgaagttctattcctccgtgcgcctggatgtgcgtcgtatcgagactctcaaggacggtaccgaggcggtgggtaaccgcacccgcgtcaaggttgtcaagaacaaggtgtcgccgccgttcaagcaggccgagttcgacatcctctacggcaagggcatctccaaggagggctcactcatcgacatgggtgtggagcaaggctttatccgtaagtccggttcctggttcacgtatgaaggtgaacagctgggccagggcaaggaaaatgcccgcaacttcttgctggagaacgtcgatgtcgccaatgagatcgagaagaagatcaaggaaaagcttggtatcggagcggtgctgaccgatgacgaagtcgtcccggccccagtcgatttctga

SEQ ID NO: 5428 - protein, 346 aa, Mycobacterium immunogenum
MAQAPDREKALELALAQIDKSFGKGSVMRLGDEVRQPISVIPTGSIALDVALGIGGLPRGRVIEIYGPESSGKTTVALHAVANAQRAGGIAAFIDAEHALDPEYAKKLGVDTDSLLVSQPDTGEQALEIADMLVRSGAIDLIVIDSVAALVPRAEIEGEMGDSHVGLQARLMSQALRKMTGALNNSGTTAIFINQLREKIGVMFGSPETTTGGKALKFYSSVRLDVRRIETLKDGTEAVGNRTRVKVVKNKVSPPFKQAEFDILYGKGISKEGSLIDMGVEQGFIRKSGSWFTYEGEQLGQGKENARNFLLENVDVANEIEKKIKEKLGIGAVLTDDEVVPAPVDF

SEQ ID NO: 5429 - DNA, 1050 bp, Mycobacterium senegalense
  CDS (1)..(1050): transl_table=11
atggcgcaacaggcccctgatcgcgaaaaagcgctcgaactggcgatggcccagatcgacaagaatttcggtaaaggctcggtgatgcgcctcggcgacgaggtccgccagcccatctcggtgattcccaccggctccatcgcactggatgtggcgctcggtatcggtggcctgccgcgtggccgcgtggtcgagatctacggcccggaatcctcgggtaagacgacggtggcactgcatgcggtggccaacgcccaggccgccggcggcatcgcggcgttcatcgacgccgagcacgccctggatcccgagtacgccaagaagctcggcgtcgataccgactcactgctggtgagccagcccgacaccggtgagcaggcgttggagatcgccgacatgctggtgcgctcgggcgcgctcgacatcctggtcatcgactcggtggcggcgctggtgccccgcgctgagatcgagggcgagatgggtgacagccacgtcggtctgcaggcccgcctgatgagtcaggcgctgcgcaagatgaccggcgcgctgaacaactcgggtaccaccgcgatcttcatcaaccagctgcgcgagaagatcggtgtgatgttcggctcgcccgaaaccaccacgggcggtaaggcattgaagttctacgcctcggtccggatggatgtccggcgtatcgagacgctcaaggacggcaccgacgcggtcggcaaccggacccgcgtcaagatcgtcaagaacaaggtctcgccgccgttcaagcaggccgagttcgacatcctctacggccagggcatcagccgcgaaggctcactcatcgacatgggtgtcgagcacggcttcatccgcaagtccggctcctggttcacctacgagggcgagcagctgggccagggcaaggagaacgcccgcaagttcctgctggagaacgttgacgtcgccaacgagatcgagaagaagatcaaggaaaagctcggtatcggtgccgtcgtgaccgctgaagctgatgacgtccttcccgctccggtcgacttctga

SEQ ID NO: 5430 - protein, 349 aa, Mycobacterium senegalense
MAQQAPDREKALELAMAQIDKNFGKGSVMRLGDEVRQPISVIPTGSIALDVALGIGGLPRGRVVEIYGPESSGKTTVALHAVANAQAAGGIAAFIDAEHALDPEYAKKLGVDTDSLLVSQPDTGEQALEIADMLVRSGALDILVIDSVAALVPRAEIEGEMGDSHVGLQARLMSQALRKMTGALNNSGTTAIFINQLREKIGVMFGSPETTTGGKALKFYASVRMDVRRIETLKDGTDAVGNRTRVKIVKNKVSPPFKQAEFDILYGQGISREGSLIDMGVEHGFIRKSGSWFTYEGEQLGQGKENARKFLLENVDVANEIEKKIKEKLGIGAVVTAEADDVLPAPVDF

SEQ ID NO: 5431 - DNA, 1050 bp, Mycobacterium goodii
  CDS (1)..(1050): transl_table=11
atggcgcagcaggccccagatcgcgaaaaggccctcgaactggcgatggcccagatcgacaagaatttcggcaaaggctcggtgatgcgcctcggcgaagaggtgcgccagccgatctcggtgatccccaccggctccatctccctggatgtggcgctcggcatcggcggcctgccacgcggccgcgtcatcgagatctacggcccggagtcctcgggtaagaccaccgtggccctgcatgccgtggccaacgcgcaggcggcgggcggcatcgcggcgttcatcgacgccgagcacgcgctggaccccgaatacgccaagaagctgggtgtggacaccgactcgctgctggtgtcgcagcccgacaccggtgagcaggcgctggagatcgccgacatgctggtgcggtccggtgcgctggacatcatcgtcatcgactcggtggcggctctggtaccgcgcgccgagatcgagggtgagatgggcgacagccacgtcggtctgcaggcccggctgatgagccaggcgctgcgcaagatgaccggcgcgttgaacaactcgggcaccaccgcgatcttcatcaaccagctccgcgagaagatcggcgtgatgttcggctcgcccgagaccaccacgggcggtaaggcgctgaagttctacgcctcggtccgcctcgacgtccgtcgtatcgagacgctcaaggacggcaccgacgcggtcggcaaccgcacccgcgtcaaggtcgtcaagaacaaggtctcgccgccgttcaagcaggccgagttcgacatcctctacggccagggcatcagccgcgaggggtcgctcatcgacatgggggtcgagcacggcttcatccgcaagtccgggtcgtggttcacctacgagggtgagcagctgggccagggcaaggagaacgcccgcaagttcctgctggagaacgtcgacgtcgccaacgagatcgagaagaagatcaaagagaagctcggtatcggtgccgtcgtgaccgctgaagccgatgacgtcctcccggccccggttgacttctga

SEQ ID NO: 5432 - protein, 349 aa, Mycobacterium goodii
MAQQAPDREKALELAMAQIDKNFGKGSVMRLGEEVRQPISVIPTGSISLDVALGIGGLPRGRVIEIYGPESSGKTTVALHAVANAQAAGGIAAFIDAEHALDPEYAKKLGVDTDSLLVSQPDTGEQALEIADMLVRSGALDIIVIDSVAALVPRAEIEGEMGDSHVGLQARLMSQALRKMTGALNNSGTTAIFINQLREKIGVMFGSPETTTGGKALKFYASVRLDVRRIETLKDGTDAVGNRTRVKVVKNKVSPPFKQAEFDILYGQGISREGSLIDMGVEHGFIRKSGSWFTYEGEQLGQGKENARKFLLENVDVANEIEKKIKEKLGIGAVVTAEADDVLPAPVDF

SEQ ID NO: 5433 - DNA, 1041 bp, Mycobacterium chelonae
  CDS (1)..(1041): transl_table=11
atggcgcaggcaccggatcgcgagaaggcgcttgaactcgcgctcgcacaaatcgacaagagcttcggtaagggctcggtcatgcggctgggtgacgaggtgcgtcagcccatctccgtgatcccgaccggatccatcgcgctggatgtggcgcttggtatcggtggcctgcctcgtggccgcgtggtcgagatctatggaccggaatcctcgggtaagaccaccgtcgcgctgcacgcggtcgccaacgcgcaagccgccggcggtatcgctgcgttcatcgacgccgagcatgcgctcgaccccgaatacgccaagaagctcggtgtcgataccgactcgctgctcgtctctcagccggataccggtgagcaggctctagaaatcgccgacatgctggtgcgctccggcgccatctctcttatcgtgatcgactcggtggcggccttggtgcctcgtgccgaaatcgagggtgagatgggtgacagccatgtcggtctgcaggctcgtctgatgagccaggccctgcgcaagatgaccggtgcactcaacaactcgggtaccaccgcgatcttcatcaaccagctccgcgagaagatcggtgtgatgtttggttcgcccgaaaccaccaccggtggtaaggctttgaagttctactcgtcggtgcgtcttgatgtgcgccgtatcgagaccctcaaggacggcaccgatgcggtgggtaaccgcactcgcgtcaaggtggtcaagaacaaggtgtcgccgccgttcaagcaggccgagttcgacatcctctacggcaagggcatctccaaggaggggtcgctcatcgacatgggcgtggagcagggcttcatccgcaagtccggttcctggttcacctacgagggtgagcagttgggtcagggcaaggaaaatgcccgcaacttcctgttggagaacgtcgatgtcgccaacgagatcgagaagaagatcaaggaaaagctgggtatcggagcggtgctgaccgatgacgaagtcgtcccggccccagtcgatttctga

SEQ ID NO: 5434 - protein, 346 aa, Mycobacterium chelonae
MAQAPDREKALELALAQIDKSFGKGSVMRLGDEVRQPISVIPTGSIALDVALGIGGLPRGRVVEIYGPESSGKTTVALHAVANAQAAGGIAAFIDAEHALDPEYAKKLGVDTDSLLVSQPDTGEQALEIADMLVRSGAISLIVIDSVAALVPRAEIEGEMGDSHVGLQARLMSQALRKMTGALNNSGTTAIFINQLREKIGVMFGSPETTTGGKALKFYSSVRLDVRRIETLKDGTDAVGNRTRVKVVKNKVSPPFKQAEFDILYGKGISKEGSLIDMGVEQGFIRKSGSWFTYEGEQLGQGKENARNFLLENVDVANEIEKKIKEKLGIGAVLTDDEVVPAPVDF

SEQ ID NO: 5435 - DNA, 1143 bp, Lactobacillus plantarum subsp
  CDS (1)..(1143): transl_table=11
ttggctgatgcacggaaagcagcactagatactgccctaaaaaagatcgaaaagaatttcggtaaaggggcgattatgcggatgggtgatgctgcccagacgaccatctcaacgatttcaagtggatcgttggccttagatgacgcgttgggtgttggtggctacccacgtggccggatcgtggaaatctatggtcctgaaagttcaggtaaaacgaccgtagcactacatgcggttgctgaagttcaaaagcagggtggcacggcagcgtatatcgatgccgaaaatgcactggatcccgtttacgcggaacacctcggggtcaacatcgatgacctcttactctcacaaccagacactggtgaacaagggcttgaaattgcagatgccttagtttccagtggtgcggtcgacattttagtcgttgattcagtcgcggccttagtgccacgtgccgaaattgaaggtgaaatgggtgacgcacacgttgggttacaagcgcggttgatgtcacaagcccttcggaagttatcaggaacattgaacaaaacgaagaccatcgcgttatttattaatcaaattcgtgaaaaagtcggcgtgatgtttggtaatcccgaaacgactcctggtggtcgggccttgaagttctacgccacgattcgtttggaagttcggcgggcagaacagattaaggaaggaaccaatattattggtaaccgtgtccggatcaaagtcgttaagaacaaggttgcgccgccatttaagcgtgctgaagtggatatcatgtatggtcaaggtatctcacaaaccggtgaaattgtcgacatggcagctgaaaaggatattgtcaagaagagtggttcttggtattcatatggcgacgatcgcattggtcagggtcgtgaaaatgccaagaagtatttggacgagcatcctgatgtcatgacggagattcgtcaaaaagttcgtgatgcatacggtatggatgcaaccggtgaggaagcaactgaggccgatgatcaggctaaagatggcaaggataagggaaccgctaagaatgctaacaagggtcaaaataaggccactaaggcaacaccagcggaaactgctctcgatctcggcgaccaaccaaccgaaaagtaa

SEQ ID NO: 5436 - protein, 380 aa, Lactobacillus plantarum subsp
MADARKAALDTALKKIEKNFGKGAIMRMGDAAQTTISTISSGSLALDDALGVGGYPRGRIVEIYGPESSGKTTVALHAVAEVQKQGGTAAYIDAENALDPVYAEHLGVNIDDLLLSQPDTGEQGLEIADALVSSGAVDILVVDSVAALVPRAEIEGEMGDAHVGLQARLMSQALRKLSGTLNKTKTIALFINQIREKVGVMFGNPETTPGGRALKFYATIRLEVRRAEQIKEGTNIIGNRVRIKVVKNKVAPPFKRAEVDIMYGQGISQTGEIVDMAAEKDIVKKSGSWYSYGDDRIGQGRENAKKYLDEHPDVMTEIRQKVRDAYGMDATGEEATEADDQAKDGKDKGTAKNANKGQNKATKATPAETALDLGDQPTEK

SEQ ID NO: 5437 - DNA, 1047 bp, Enterococcus cecorum
  CDS (1)..(1047): transl_table=11
atggccgatgatcgtaaaacagccttagatgctgcattgaaaaaaatagaaaaaaactttggtaaaggctctatcatgaagcttggtgaaaaagctgaccaacaaatctccaccgtaccaagtggctcgctagcattagatgtcgctttaggagtagggggttatccaagagggcggattattgaagtatacggcccagaaagttctggtaagacgacggttgctttacatgcgattgccgaagttcaaaaacaaggcggaactgcagcctttatcgatgccgaacacgctttagatccagcctatgccaaaaagctaggcgtgaatattgacgaattacttttatcacagccagataccggtgaacaaggtctagagattgctgatgcccttgtttctagtggcgcggtcgatattattgtcattgactcagttgccgctttagtgccacgtgccgaaatcgatggcgaaatgggggatacacacgttgggttacaagcccgtttaatgtctcaagccctacgtaaattatctggtacgattaataagactaagactattgcgatttttatcaaccaaatccgtgaaaaagtcggtgtgatgtttggtaatccagaaaccacacctggtggacgtgccttgaagttctatgcgaccgttcgtttagaagtgcgtcgttctgaacaattaaaacaaggtagcgatattgtcggtaaccgtaccaagattaaagtcgtgaaaaataaagtggcgccaccatttaaagtcgctgaaattgacatcatgtatggcgaaggaatttctcaagaaggggaattactagatatggcggtcgatgttgatttagttgataagagtggtgcttggtattcgtacaatggtgagcgaattggacaaggtcgcgaaaatgtcaaaaactatatgaaagatcacccagagatggtcagtgagcttttagtcaaagttcgtgatgcctatggtattggtgatggtacgaccattgaagcgacagaagaaaccgaacaagaaacattagatttagaataa

SEQ ID NO: 5438 - protein, 348 aa, Enterococcus cecorum
MADDRKTALDAALKKIEKNFGKGSIMKLGEKADQQISTVPSGSLALDVALGVGGYPRGRIIEVYGPESSGKTTVALHAIAEVQKQGGTAAFIDAEHALDPAYAKKLGVNIDELLLSQPDTGEQGLEIADALVSSGAVDIIVIDSVAALVPRAEIDGEMGDTHVGLQARLMSQALRKLSGTINKTKTIAIFINQIREKVGVMFGNPETTPGGRALKFYATVRLEVRRSEQLKQGSDIVGNRTKIKVVKNKVAPPFKVAEIDIMYGEGISQEGELLDMAVDVDLVDKSGAWYSYNGERIGQGRENVKNYMKDHPEMVSELLVKVRDAYGIGDGTTIEATEETEQETLDLE

SEQ ID NO: 5439 - DNA, 1137 bp, Lactobacillus paraplantarum
  CDS (1)..(1137): transl_table=11
ttggctgatgcacggaaagcagcactagatactgccctaaaaaagatcgaaaagaactttggtaaaggggcgattatgcggatgggtgatgctgcccagacgacgatttcaacgatttcaagtggatcgttggccttagatgatgcgttgggtgttggcggctacccacgtggccggatcgtagaaatctatggtcctgaaagttcaggtaaaacgaccgttgcgttacacgcggtggctgaagttcaaaagcaaggtggcacggcagcttatattgatgctgaaaatgccttagaccctatttatgcggaacatttgggggttaatatcgatgatctattgctctcgcaaccagatactggtgaacaggggcttgaaatcgcagatgccttagtttctagtggtgccgttgatattttggttgttgactcagttgcggctttagttccacgggccgaaattgaaggtgaaatgggtgacgcgcacgttgggttacaagctcgactcatgtcacaggcattacgaaaactatccggaacgttgaacaagactaagacgattgcattatttattaatcaaattcgtgaaaaagtcggggtgatgtttggtaatcccgagacgactccgggtggtcgggcgttgaaattctacgcaacaattcggttggaagttcggcgggctgaacaaattaaagagggaaccaatattattggtaaccgtgttcgaatcaaagttgttaaaaacaaggtggcgccaccatttaagcgagctgaagtagatattatgtatggtcatggtatttcacaaactggtgaaattgtcgacatggctgctgaaaaggatattgtgaagaagagtggttcttggtattcatacggcgacgatcggattggtcaaggtcgtgaaaatgcgaagaaatacctggacgaacatcctgatatcatgacggaaattcggcaaaaggttcgggacgcgtatggcatggaccaaactggtgatgaagaagcgactgaaactaatgatcaagctaaggataaggccacagctaagagtgctagcaagggccaaggtaagacacccaaagcgggacctactgagacagcgctagaacttgatgaccagccaaccgaaaaataa

SEQ ID NO: 5440 - protein, 378 aa, Lactobacillus paraplantarum
MADARKAALDTALKKIEKNFGKGAIMRMGDAAQTTISTISSGSLALDDALGVGGYPRGRIVEIYGPESSGKTTVALHAVAEVQKQGGTAAYIDAENALDPIYAEHLGVNIDDLLLSQPDTGEQGLEIADALVSSGAVDILVVDSVAALVPRAEIEGEMGDAHVGLQARLMSQALRKLSGTLNKTKTIALFINQIREKVGVMFGNPETTPGGRALKFYATIRLEVRRAEQIKEGTNIIGNRVRIKVVKNKVAPPFKRAEVDIMYGHGISQTGEIVDMAAEKDIVKKSGSWYSYGDDRIGQGRENAKKYLDEHPDIMTEIRQKVRDAYGMDQTGDEEATETNDQAKDKATAKSASKGQGKTPKAGPTETALELDDQPTEK

SEQ ID NO: 5441 - DNA, 1035 bp, Campylobacter lari
  CDS (1)..(1035): transl_table=11
atggatgataataaaagaaaatcacttgatgcagccttaaaaagtcttgataaaacctttggaaaaggcaccatattaagacttggcgataaagaagttgaaaaaattgattctattcctacaggttctgttggacttgatttagctttaggaattggtggggttccaaaaggaagaattatagaaatttatggacctgaaagttcaggtaaaactacacttaccttacacatcatagcagaatgtcaaaaaaaaggtggagtttgtgcgtttattgatgctgaacacgctcttgatgtaagatatgcaaaaaatttaggcgttgatacagaaaatctttacatctctcaaccagattttggagaacaagccttagaaattgttgaaactatagcaagaagtggagccattgatctaatagtggtagatagtgttgctgcacttactccaaaagcagaaattgaaggtgatatgggagatcaacatgttggtcttcaagcaagattaatgagccaagctttaagaaaattaaccggtatcgttcataaaatgaacactactgtaattttcatcaatcaaattcgtatgaaaataggcatgatgggctatggcactcctgaaacaactaccggcggaaatgctttaaaattttatgcttcagtgcgtttagatgtaagaaaaacagccaccttaaaacaaaatgatgagcctattggaaaccgtgttaaagtaaaagtggctaaaaacaaagtagcccctccttttaaacaagctgaatttgatgtgatgtttggtgagggtgtaagtcgtgaaggcgagctaatagattatggtgtaaaacttgatattattgataaaagtggtgcatggttttcttacaaggcttctaaacttggtcaaggtagagaaaatgctaaagcctttttaaaagaaaatccagctattgcagatgaaattactcaagctatacaaaactcaatcggtatagatagtatgattttgggcgcaaaagaagacgatgaaggagacgactaa

SEQ ID NO: 5442 - protein, 344 aa, Campylobacter lari
MDDNKRKSLDAALKSLDKTFGKGTILRLGDKEVEKIDSIPTGSVGLDLALGIGGVPKGRIIEIYGPESSGKTTLTLHIIAECQKKGGVCAFIDAEHALDVRYAKNLGVDTENLYISQPDFGEQALEIVETIARSGAIDLIVVDSVAALTPKAEIEGDMGDQHVGLQARLMSQALRKLTGIVHKMNTTVIFINQIRMKIGMMGYGTPETTTGGNALKFYASVRLDVRKTATLKQNDEPIGNRVKVKVAKNKVAPPFKQAEFDVMFGEGVSREGELIDYGVKLDIIDKSGAWFSYKASKLGQGRENAKAFLKENPAIADEITQAIQNSIGIDSMILGAKEDDEGDD

SEQ ID NO: 5443 - DNA, 1035 bp, Campylobacter lari
  CDS (1)..(1035): transl_table=11
atggatgataataaaagaaaatcacttgatgcagccttaaaaagtcttgataaaacctttggaaaaggcaccatattaagacttggcgataaagaagttgaaaaaattgattctattcctacaggttctgttggacttgatttagctttaggaattggtggggttccaaaaggaagaattatagaaatttatggacctgaaagttcaggtaaaactacacttaccttacacatcatagcagaatgtcaaaaaaaaggtggagtttgtgcgtttattgatgctgaacacgctcttgatgtaagatatgcaaaaaatttaggcgttgatacagaaaatctttacatctctcaaccagattttggagaacaagccttagaaattgttgaaactatagcaagaagtggagccattgatctaatagtggtagatagcgttgctgcacttactccaaaagcagaaattgaaggtgatatgggagatcaacatgtaggtcttcaagcaagattaatgagccaagctttaagaaaattaaccggtatcgttcataaaatgaacactactgtaattttcatcaatcaaattcgtatgaaaataggcatgatgggctatggcactcctgaaacaactaccggcggaaatgctttaaaattttatgcttcagtgcgtttagatgtaagaaaaacagccaccttaaaacaaaatgatgagcctattggaaaccgtgttaaagtaaaagtggctaaaaacaaagtagcccctccttttaaacaagctgaatttgatgtgatgtttggtgagggtgtaagtcgtgaaggcgagctaatagattatggtgtaaaacttgatattattgataaaagtggtgcatggttttcttacaaggcttctaaacttggtcaaggtagagaaaatgctaaagcctttttaaaagaaaatccagctattgcagatgaaattactcaagctatacaaaactcaatcggtatagatagtatgattttgggcgcaaaagaagacgatgaaggagacgaataa

SEQ ID NO: 5444 - protein, 344 aa, Campylobacter lari
MDDNKRKSLDAALKSLDKTFGKGTILRLGDKEVEKIDSIPTGSVGLDLALGIGGVPKGRIIEIYGPESSGKTTLTLHIIAECQKKGGVCAFIDAEHALDVRYAKNLGVDTENLYISQPDFGEQALEIVETIARSGAIDLIVVDSVAALTPKAEIEGDMGDQHVGLQARLMSQALRKLTGIVHKMNTTVIFINQIRMKIGMMGYGTPETTTGGNALKFYASVRLDVRKTATLKQNDEPIGNRVKVKVAKNKVAPPFKQAEFDVMFGEGVSREGELIDYGVKLDIIDKSGAWFSYKASKLGQGRENAKAFLKENPAIADEITQAIQNSIGIDSMILGAKEDDEGDE

SEQ ID NO: 5445 - DNA, 1020 bp, Zymomonas mobilis
  CDS (1)..(1020): transl_table=11
atggacaagcaaaaagcccttgaagcggctttagctcagattgaccgcgcttttggtaaaggttcggttatgcgcttggggtctcgtgagaaaatcgagattgatacaatttccagcggatcacttggccttgatattgcgctgggcattggcggcttgccccgtggccgtatcgtcgaaatctatggtcctgaaagctcgggtaaaacaactttagccctccatgctatcgctgaagcacaaaaagcaggtggaacagcggcctttgtcgatgctgaacatgcgcttgatccggtctatgccaaaaaactgggcgttaatacggatgatctaatcgtctctcagcccgatacgggtgagcaggctctggaaattacagataccctgatccgttctaacgctgttgatatattggttgtcgattctgttgcggccttaacaccccgcgctgaaatcgaaggcgaaatgggcgatagtcacgttggtttgcaagcccgtttgatgagtcaggcgcttcgcaaaattaccggatcaatcaaccgctctcaaactttggttatttttatcaaccaagtccggatgaaaatcggggtaatgtatggcaaccctgaaacgacaacgggcggtaatgctttgaaattctatgccagcgttcggcttgatatccgtcgtgtaggacaaattaaagatcgcgatgaaatcgttggtaatgccacccgtgtcaaagtggtaaaaaacaagctggctccgcgtttcaagcaggttgaattcgatatcatgtatggagaaggtgtctccaagatgggcgaaattctcgatctgggcgtaaaagccggtattatcgacaagtcaggctcatggttcagtcatgattccgttcgcatcggtcagggacgtgaaaatgccaaaacgttcttgcgtgaacatcctgaaatgactgaaaaaattgaaaaaatgattcgtcataatacggctgaaattgccgacgaaatgctggatccatctatccctgaagattag

SEQ ID NO: 5446 - protein, 339 aa, Zymomonas mobilis
MDKQKALEAALAQIDRAFGKGSVMRLGSREKIEIDTISSGSLGLDIALGIGGLPRGRIVEIYGPESSGKTTLALHAIAEAQKAGGTAAFVDAEHALDPVYAKKLGVNTDDLIVSQPDTGEQALEITDTLIRSNAVDILVVDSVAALTPRAEIEGEMGDSHVGLQARLMSQALRKITGSINRSQTLVIFINQVRMKIGVMYGNPETTTGGNALKFYASVRLDIRRVGQIKDRDEIVGNATRVKVVKNKLAPRFKQVEFDIMYGEGVSKMGEILDLGVKAGIIDKSGSWFSHDSVRIGQGRENAKTFLREHPEMTEKIEKMIRHNTAEIADEMLDPSIPED

SEQ ID NO: 5447 - DNA, 1038 bp, Bacillus megaterium
  CDS (1)..(1038): transl_table=11
gtgaacgatcgtcaagcagcccttgatatggctttaaaacaaattgaaaagcaatttggtaaaggttcaattatgaaattaggtgaacaaacggaaaaaagaatttctacaattccaagtggttcattagcgttagatatagccttaggtgtaggtggatatccacgtggacgtgtagttgaagtatatggtccagaaagctcaggtaaaacaacagttgctcttcatgcgattgcagaagttcaacagcagggcggacaggctgcatttatcgatgcggagcacgcgttagatcctgtatatgctcaaaaattaggtgtgaatattgatgagctattattatctcagcctgatacgggagaacaagctttagaaatcgctgaagctttagttcgaagcggtgcagtagatattatcgttgttgactcagtagcagcattagtgccaaaagcggaaattgaaggagaaatgggagactctcacgtgggtctacaagctcgtttaatgtctcaagcattgcgtaaactatctggagctatcaataagtctaaaacaatcgctatctttattaaccaaattcgtgaaaaagtcggcgttatgtttggtaatcctgaaacaactcctggtggacgtgcgcttaaattctattcttcagtgcgtctagaagtgcgtcgtgcagagcagttaaagcaaggaaacgatattgtaggtaacaaaacaagaattaaagttgtgaaaaacaaagtagcgccgcctttccgtgctgctgaagtagatattatgtacggagaaggtatttcaaaagagggtgaaattttggatatcgcttctgaactagatattgttcaaaaaagtggatcttggtattcatataatgacgagcgtctaggtcaaggccgtgaaaatgcaaaacaattcttaaaagaaaatactgatattcgtcaggaaattgcgggacaagttcgtgaacatcatggtttagatcaagatggagagccagctcctgaggatgacgatcaaggcgatttaaatatttaa

SEQ ID NO: 5448 - protein, 345 aa, Bacillus megaterium
MNDRQAALDMALKQIEKQFGKGSIMKLGEQTEKRISTIPSGSLALDIALGVGGYPRGRVVEVYGPESSGKTTVALHAIAEVQQQGGQAAFIDAEHALDPVYAQKLGVNIDELLLSQPDTGEQALEIAEALVRSGAVDIIVVDSVAALVPKAEIEGEMGDSHVGLQARLMSQALRKLSGAINKSKTIAIFINQIREKVGVMFGNPETTPGGRALKFYSSVRLEVRRAEQLKQGNDIVGNKTRIKVVKNKVAPPFRAAEVDIMYGEGISKEGEILDIASELDIVQKSGSWYSYNDERLGQGRENAKQFLKENTDIRQEIAGQVREHHGLDQDGEPAPEDDDQGDLNI

SEQ ID NO: 5449 - DNA, 1038 bp, Bacillus megaterium
  CDS (1)..(1038): transl_table=11
atgaatgataaaaaagcagcactagatatggctctaaaacaaattgaaaaacaattcggtacaggatcaattattaaaatgggagaaggcacacatacaaaagttgaggcatctagctcaggctcattagctttagatatagctcttggaattaatggttatcccaaaggaagaattatggaagtttacgggcccgaaagttcaggtaaaacaaccgtttccttacacgcaattgcagaagtacaaaaaaatggaggccgagctgcctttattgatgctgaacacgcacttgatccagtttatgcaagaaaactaggtgtagatattgatgagttactgttatctcaaccagatactggtgaacaggcacttgaaattgctgaagcattagttagaagtggtgctgtagatattattgttgttgactcagtagcagcattagttccgcaaaaagaaattgaaggagaaatgggagattctcacgtaggtttacaagctcgtttgatgtctcaagctcttcgtaaactatctggagcaatcaataagtccaaaaccattgctatcttcatcaaccaaatcagggagaaagtaggcgttatgtttggaaacccggaaacaacgccaggtggaagggcactaaaattctattcttccgttcgtcttgaggttcgccgcgctgaacaacttaaactaggaaatgacatagttgggaataaaacaagaattaaagtagtcaaaaataagatggcacctcctttccgcattgctgaagtagatattatgtatggagaaggtatctcaaaagaaggagaaatcttagacattggttctgaagtagatattgttcaaaagtctggatcttggttttcatataatgaggagcgtttaggtcagggacgagaaaacgctaagattttcttaaaagaaaaccctgaaattagagaagaaattagaaaaagaattattgatttcaaatatggtgataatattaataacgataatgttatagataacgatagcgaaaacgaaaaccaataa

SEQ ID NO: 5450 - protein, 345 aa, Bacillus megaterium
MNDKKAALDMALKQIEKQFGTGSIIKMGEGTHTKVEASSSGSLALDIALGINGYPKGRIMEVYGPESSGKTTVSLHAIAEVQKNGGRAAFIDAEHALDPVYARKLGVDIDELLLSQPDTGEQALEIAEALVRSGAVDIIVVDSVAALVPQKEIEGEMGDSHVGLQARLMSQALRKLSGAINKSKTIAIFINQIREKVGVMFGNPETTPGGRALKFYSSVRLEVRRAEQLKLGNDIVGNKTRIKVVKNKMAPPFRIAEVDIMYGEGISKEGEILDIGSEVDIVQKSGSWFSYNEERLGQGRENAKIFLKENPEIREEIRKRIIDFKYGDNINNDNVIDNDSENENQ

SEQ ID NO: 5451 - DNA, 1044 bp, Bacillus amyloliquefaciens
  CDS (1)..(1044): transl_table=11
atgagtgatcgtcaggcagccttagatatggctcttaagcaaatagaaaaacaattcggcaaaggttccatcatgaagctcggagaaaaaacggatacaagaatttcaacggtgccgagcggttcccttgcacttgataccgctctcggaataggcggatacccgcgcggacggattattgaagtatacggacctgaaagctcaggtaaaacgactgtagcgcttcacgcaatcgctgaggttcaggaaaaaggcggacaggcagcatttattgatgccgagcatgctcttgatcctgtgtacgcgcaaaagctcggtgtcaatatcgaagagctgctgctttctcagccggatacgggagagcaggcgctggagattgctgaagcgctggtgcgaagcggagctgtcgatatcgtagtcgttgactctgttgcggcgcttgttccaaaagctgaaattgaaggtgacatgggtgattcacacgtcggtttacaggcgcgtctcatgtctcaggcgctccgtaagctttccggcgccatcaataaatctaaaacaatcgcaatctttattaaccagattcgtgaaaaagtcggcgttatgttcggaaatccggagacgacaccgggcggccgcgcgctgaaattctattcttccgtgcgtcttgaagtgcgccgtgccgagcaattaaagcagggcaacgacgttatggggaataaaacgagaattaaagtcgtaaaaaacaaagtcgctcctccgttccgtacggctgaagtggacattatgtacggtgaaggaatctccaaagaaggggaaatcatcgaccttggaactgaacttgatatcgtgcagaaaagcggctcgtggtattcttatgaagaagaacgcctcggacagggccgtgaaaacgccaagcagttcttaaaagaaaataaagacatcatgctgatgattcaagaacaaatccgtgaacattacggtttggacaataacggtgttacggaaaaagcggaagaagttcaggaagagcttgaattcgaagaataa

SEQ ID NO: 5452 - protein, 347 aa, Bacillus amyloliquefaciens
MSDRQAALDMALKQIEKQFGKGSIMKLGEKTDTRISTVPSGSLALDTALGIGGYPRGRIIEVYGPESSGKTTVALHAIAEVQEKGGQAAFIDAEHALDPVYAQKLGVNIEELLLSQPDTGEQALEIAEALVRSGAVDIVVVDSVAALVPKAEIEGDMGDSHVGLQARLMSQALRKLSGAINKSKTIAIFINQIREKVGVMFGNPETTPGGRALKFYSSVRLEVRRAEQLKQGNDVMGNKTRIKVVKNKVAPPFRTAEVDIMYGEGISKEGEIIDLGTELDIVQKSGSWYSYEEERLGQGRENAKQFLKENKDIMLMIQEQIREHYGLDNNGVTEKAEEVQEELEFEE

SEQ ID NO: 5453 - DNA, 1047 bp, Listeria monocytogenes
  CDS (1)..(1047): transl_table=11
  misc_feature (757)..(757): w is a or t
gtgaatgatcgtcaagcggcattagaccaagctttaaaacaaattgaaaaacaattcggtaaaggttccattatgaaattaggggaacattcagaccaaaatatatctactatttctagtggctcattagcattagatattgctttaggagtcggcggatatccacgtggacgtattattgaagtatacgggccagagagttccggtaaaacaactgttgcacttcatgctattgcggaagtacaagcacaaggcggaacagctgcatttatcgatgcagaacacgcactagatccagcttatgctaaaaacctaggtgtaaatattgatgaattattactatctcaacctgatacaggagagcaagcattagaaattgcagaagcattagttagaagtggtgctgtagatatgctagtaattgactccgttgcagcacttgtaccacgtgctgaaatcgaaggggagatgggtgatgcacacgttgggctacaagcacgtttaatgtcccaagcattgcgtaaactttccggtgttattaataaatcaaaaaccattgctattttcattaaccaaattcgtgaaaaagttggtgttatgtttggtaacccagagattacacctggtggtcgtgcgcttaaattctattcgactgtacgtttagaagtaagacgtgcagaacaacttaagcaaggtacagatgtaatgggtaacaaaacaaaaattaaagttgtaaaaaacaaagtagctcctccawtccgtattgctgaagtggatatcatgtacggtgaaggtatttcacgtgaaggcgagcttgttgatatggccgctgaagtggatgtaatcaataagagtggttcatggtattcttacaaagaagaacgtatcggccaaggtcgtgaaaacgcaaaacaatatctaaaagaacatacagatattcgtgatgagatttcaaaacgtgttcgtgaagagtacgaaatcgacggaagcaataaagaacctttagatgaaggcgaagaaacattaagtttactagatgatgaataa

SEQ ID NO: 5454 - protein, 348 aa, Listeria monocytogenes
  misc_feature (253)..(253): The Xaa at location 253 stands for Ile, or Phe.
MNDRQAALDQALKQIEKQFGKGSIMKLGEHSDQNISTISSGSLALDIALGVGGYPRGRIIEVYGPESSGKTTVALHAIAEVQAQGGTAAFIDAEHALDPAYAKNLGVNIDELLLSQPDTGEQALEIAEALVRSGAVDMLVIDSVAALVPRAEIEGEMGDAHVGLQARLMSQALRKLSGVINKSKTIAIFINQIREKVGVMFGNPEITPGGRALKFYSTVRLEVRRAEQLKQGTDVMGNKTKIKVVKNKVAPPXRIAEVDIMYGEGISREGELVDMAAEVDVINKSGSWYSYKEERIGQGRENAKQYLKEHTDIRDEISKRVREEYEIDGSNKEPLDEGEETLSLLDDE

SEQ ID NO: 5455 - DNA, 1047 bp, Listeria monocytogenes
  CDS (1)..(1047): transl_table=11
  misc_feature (683)..(683): m is a or c
gtgaatgatcgtcaagcggcattagaccaagctttaaaacaaattgaaaaacaattcggtaaaggctccattatgaaattaggggaacattcagatcaaaatatatctactatttctagtggttcattagcgttagatattgctttaggagttggcggataccctcgtggacgtattatcgaagtatacggaccagagagttccggtaaaacaactgttgcgcttcatgcaattgcggaagtacaagcacaaggcggaacagcagcatttatcgatgctgagcatgcgttggatccggcttatgctaaaaacctaggtgtaaatattgatgaattattactatctcaaccagatacaggagaacaagctttagagattgctgaagctttagttagaagtggtgcagttgatatgttagtaattgactccgttgcagcacttgtaccacgtgctgaaatcgaaggcgagatgggcgatgctcatgttggattacaagcacgtttaatgtcccaagcattgcgtaaactttctggtgttattaataaatcaaaaaccattgctattttcattaaccaaattcgtgaaaaagttggtgttatgtttggtaacccagaaatcacaccaggtggacgtgcgcttaaattctattctactgtacgtttagaagtaagacgtgcggaacmactgaagcaaggtacagatgtaatgggtaacaaaacaaaaatcaaagttgtaaaaaataaagtagcgccaccattccgtattgccgaagtagatattatgtatggtgaaggtatttcgcgtgaaggtgagcttgttgatatggctgctgaagtggatgtaatcaataagagtggttcgtggtattcttataaagaagaacgcatcggtcaaggccgtgagaatgcaaaacaatatctgaaagaacacacagatattcgtgatgagatttctaagcgcgttcgtgaagaatatgaaattgatggaagcagcaaagagcctcttgacgaaaaagaagaaacattaagtttactagatgatgaataa

SEQ ID NO: 5456 - protein, 348 aa, Listeria monocytogenes
  misc_feature (228)..(228): The Xaa at location 228 stands for Gln, or Pro.
MNDRQAALDQALKQIEKQFGKGSIMKLGEHSDQNISTISSGSLALDIALGVGGYPRGRIIEVYGPESSGKTTVALHAIAEVQAQGGTAAFIDAEHALDPAYAKNLGVNIDELLLSQPDTGEQALEIAEALVRSGAVDMLVIDSVAALVPRAEIEGEMGDAHVGLQARLMSQALRKLSGVINKSKTIAIFINQIREKVGVMFGNPEITPGGRALKFYSTVRLEVRRAEXLKQGTDVMGNKTKIKVVKNKVAPPFRIAEVDIMYGEGISREGELVDMAAEVDVINKSGSWYSYKEERIGQGRENAKQYLKEHTDIRDEISKRVREEYEIDGSSKEPLDEKEETLSLLDDE

SEQ ID NO: 5457 - DNA, 1044 bp, Helicobacter pylori
  CDS (1)..(1044): transl_table=11
atggcaatagatgaagacaaacaaaaagcgatttctttagcgatcaaacaaattgataaggtttttggtaagggggcgttggtgcgccttggggataagcaagtagaaaagattgacgctatttctacaggctcgttagggttggatctggctttagggattgggggcgttccaaagggtaggatcattgaaatttatgggccagagtcaagcgggaagaccactctaagcttgcatattattgcagaatgccaaaaaaatggcggcgtgtgcgcgttcattgacgctaagcatgccctagatgtgcattacgctaagagattgggcgtggatacggaaaatctactcgtttcccaacctgatacaggcgagcaagctttagagattttagaaacgatcaccagaagcggagggattgatttggtggtggtggattcggtggcggcccttacgcctaaagcggagattgatggggatatgggcgatcagcatgtgggcttgcaagcaaggcttatgagccatgcgttaagaaaaatcaccggtgttttgcacaagatgaacactactctcatttttatcaatcaaatcaggatgaagattggcatgatgggttatgggagtccagagaccacaaccggaggtaacgctttaaaattctatgcgagcgttaggattgatattagaagaatcgcggctttaaagcaaaacgaacagcatatcggtaacagggctaaagccaaagtggttaaaaataaagtcgctccgccctttagagaagcggaatttgacatcatgtttggggaggggatttctaaagagggcgaaatcattgattacggcgtgaaattagacattgtggataagagtggggcatggcttagctaccaggataaaaagctagggcaaggcagagaaaacgctaaagccttactgaaagaagacaaagccctagcggatgaaatcactcttaagattaaagagagtattggatctaatgaagagatcatgcccttaccggatgagcctttagaagaaatggaataa

SEQ ID NO: 5458 - protein, 347 aa, Helicobacter pylori
MAIDEDKQKAISLAIKQIDKVFGKGALVRLGDKQVEKIDAISTGSLGLDLALGIGGVPKGRIIEIYGPESSGKTTLSLHIIAECQKNGGVCAFIDAKHALDVHYAKRLGVDTENLLVSQPDTGEQALEILETITRSGGIDLVVVDSVAALTPKAEIDGDMGDQHVGLQARLMSHALRKITGVLHKMNTTLIFINQIRMKIGMMGYGSPETTTGGNALKFYASVRIDIRRIAALKQNEQHIGNRAKAKVVKNKVAPPFREAEFDIMFGEGISKEGEIIDYGVKLDIVDKSGAWLSYQDKKLGQGRENAKALLKEDKALADEITLKIKESIGSNEEIMPLPDEPLEEME

SEQ ID NO: 5459 - DNA, 1245 bp, Chlamydomonas reinhardtii
  CDS (1)..(1245)
atgcagaccgcaattcaaatgcctagtggtggctgcttgagcagtggggcccgggcccggagcagcgcacgggccactcaacagattctttgcgcgccacgtcgcgacgtcgttgcgaaggcgcggcgcaccaaaactgccacgacaacctatactcagggcgaacgcccggatgccgataccaaggccaagctcttcaacgagacagtcgaccgcatcactcgccgctttggtgacgggtccatcatgcgtctcagcgacagcgtcacggcgaacattgagaccttccccagcggctcactcacgctggacgcggccctgggcggcggctacccccgcggccgcattatcgaggtgtacggtccggaggccagcggcaagaccacgctggccatgcacggctgcggcgagatccagcgcctgggcggcacggtcgcctacatagacgtggagcacgccttcgaccgcacctacgcgagcgctgggcatcacctgaacaacttctggtacgcgcagcccatgacgggcgaggaggcgctggaggtgatggacgagctgtgccgcagcaacgtgtgcgacctggtggtcatcgactcggtggcggcgctggtgccgagggccgagctggagggagacatcggcagcgtgcagatcggcagccaggcccgcctgctgagccaggccctgcgcaagctgtccgcctccgcctccaaaagcaagaccaccctgttcttcatcaaccagctgcggaacaagattggcgtcatgttcggcaaccccgagaccacctcgggcggcaacgcgctcaagtactacagcagcgtgcgcatcgacatccgcaagaaggagacactcagcgagtcggaccaggcctacgccaaccgggtccgcgccaaggtggtgaagaacaaggtggcctcgccgcataaggaggctctgtttgagatctactacggccgtggcattgacttcctgggcggactcatcgacaccgcggagcgcctcaaggtgctcacccgccgcggtgccttctactactacggcgaccagcggctgggccagggccgggagaaggtgttggcggcgctgcgcgaggacgcggagcgcacagccgccattgaggccgcggtgcgggacgtgctgcgggccaaccccgacgcggcgctggtggacacggaggagggcgacgacgacgacggcctgggcaccgcctccaccgtggcgctggacatggacgacgtgtag

SEQ ID NO: 5460 - protein, 414 aa, Chlamydomonas reinhardtii
MQTAIQMPSGGCLSSGARARSSARATQQILCAPRRDVVAKARRTKTATTTYTQGERPDADTKAKLFNETVDRITRRFGDGSIMRLSDSVTANIETFPSGSLTLDAALGGGYPRGRIIEVYGPEASGKTTLAMHGCGEIQRLGGTVAYIDVEHAFDRTYASAGHHLNNFWYAQPMTGEEALEVMDELCRSNVCDLVVIDSVAALVPRAELEGDIGSVQIGSQARLLSQALRKLSASASKSKTTLFFINQLRNKIGVMFGNPETTSGGNALKYYSSVRIDIRKKETLSESDQAYANRVRAKVVKNKVASPHKEALFEIYYGRGIDFLGGLIDTAERLKVLTRRGAFYYYGDQRLGQGREKVLAALREDAERTAAIEAAVRDVLRANPDAALVDTEEGDDDDGLGTASTVALDMDDV

SEQ ID NO: 5461 - DNA, 1077 bp, Myxococcus xanthus
  CDS (1)..(1077): transl_table=11
atggccgtgaatcaggagaaggaaaaggcgatcgaactggcgatgtccgcggtggagcgccagttcggcaaggggtccatcatgcggctcggcaacgacgagccaatgatgcgagacgttcaggccatcccgacgggctccatctcgctggacatcgccctgggcgtgggtggcgtgcccaagggccgcatcatcgaaatcttcgggccggagtcgtccggtaagacgacgctgtgtctccacatcgtcgccgaagcgcagaagcgcggcggcatctgcggctacgtggacgcggagcacgcgctggacgtgggctacgcgcgcaagctgggcgtgcgcaccgatgacctgctgctgagccagccggacaccggtgagcaggcgctggaaatcgcggagatgctggtgcgctcgggcgccatcgacgtgctggtggtggactcggtggccgcgctcgtgccgaaggcggagctcgagggtgagatgggcgacgcgcacatgggtgtgcaggcccgcctcatgagccaggcgctccgcaagctgacgggcaccatcgccaagagccagacgtgcgtcatcttcatcaaccagattcgcatgaagattggcgtgatgttcggcaacccggagacgacgacgggcggtaacgcgctgaagttctacgcgtcgcagcgcctggacatccgccgcatcggcgccatcaagaatggcgacaacgtggtgggcagccgcacccgcgtgaaggtggtgaagaacaaggtcgcgccgccgttcaaggaagtcgagttcgacatcatgtacggcacgggcatctcccgtgagggcgacctcatcgacctcgcctccaacgagaacatcgtggagaagagcggcagctggttctccttcaatggtgagcgcatcggccagggccgggagaacgtgaaggagtacctgcgcgagcacccggagatcgcgaaggacatcgaaggccgcgtgctggagaagtacggcatcggcaagtcgggtgcgccgtcgccgcggcgccggacgagtccgcgccggccgaaggtggcagcgagaagcgcggccgtgtga

SEQ ID NO: 5462 - protein, 358 aa, Myxococcus xanthus
MAVNQEKEKAIELAMSAVERQFGKGSIMRLGNDEPMMRDVQAIPTGSISLDIALGVGGVPKGRIIEIFGPESSGKTTLCLHIVAEAQKRGGICGYVDAEHALDVGYARKLGVRTDDLLLSQPDTGEQALEIAEMLVRSGAIDVLVVDSVAALVPKAELEGEMGDAHMGVQARLMSQALRKLTGTIAKSQTCVIFINQIRMKIGVMFGNPETTTGGNALKFYASQRLDIRRIGAIKNGDNVVGSRTRVKVVKNKVAPPFKEVEFDIMYGTGISREGDLIDLASNENIVEKSGSWFSFNGERIGQGRENVKEYLREHPEIAKDIEGRVLEKYGIGKSGAPSPRRRTSPRRPKVAARSAAV

SEQ ID NO: 5463 - DNA, 1320 bp, Arabidopsis thaliana
  CDS (1)..(1320)
atggattcacagctagtcttgtctctgaagctgaatccaagcttcactcctctttctcctctcttccctttcactccatgttcttctttttcgccgtcgctccggttttcttcttgctactcccgccgcctctattctccggttaccgtctacgccgcgaagaaactctcccacaaaatcagttctgaattcgatgacagaatcaacggcgctctctctcccgacgctgattcccgcttcctcgaccgccaaaaggctttagaggcagctatgaatgacattaacagttcatttggtaaaggaagtgtaacaagattggggagtgctggtggagcattagtggagaccttttcgagtggtattttgactcttgatcttgctttaggtggaggcctaccaaagggtcgggtagtcgaaatatatggaccagaaagtagtggcaagaccacgctagcactccatgctattgctgaagtgcagaagcttggaggcaatgcaatgcttgttgatgcagagcatgcctttgatccagcgtattctaaagcattaggtgttgatgtagaaaatttgatagtgtgccagccagataatggcgagatggctttagaaactgcagaccgtatgtgtcgctcaggtgcggttgaccttatatgtgttgattctgtttcagcacttactccacgagctgagattgaaggtgagattggaatgcagcaaatgggtttgcaagctcgtcttatgagtcaagctcttcgtaaaatgtcaggaaacgcctctaaagctgggtgtactcttattttcctaaaccaaataagatacaagattggtgtgtactatgggaatccagaggtgactagcggaggaattgcgttaaagttcttcgcgtcggtccgtctagaaattcgttctgctgggaagatcaaatctagcaaaggggatgaagatattggtcttcgggctcgtgtaagagtgcagaagagcaaggtttcaagaccgtataagcaagcagagtttgagattatgtttggggaaggagtcagtaaactgggatgcgttcttgattgtgctgaaattatggaagttgtggtcaagaaaggttcctggtacagctacgaagaccaaaggctcgggcaaggaagagagaaagcactgcagcacttaagggaaaaccctgctcttcaagacgaaattgagaagaaagtgagattgttgatgttagatggagaagttcatcgatcaactcctttgatgagcagcagctcttcctcggcttcacatcgcgaagaagaagaagaagactcgcttgacgatttccaatga

SEQ ID NO: 5464 - protein, 439 aa, Arabidopsis thaliana
MDSQLVLSLKLNPSFTPLSPLFPFTPCSSFSPSLRFSSCYSRRLYSPVTVYAAKKLSHKISSEFDDRINGALSPDADSRFLDRQKALEAAMNDINSSFGKGSVTRLGSAGGALVETFSSGILTLDLALGGGLPKGRVVEIYGPESSGKTTLALHAIAEVQKLGGNAMLVDAEHAFDPAYSKALGVDVENLIVCQPDNGEMALETADRMCRSGAVDLICVDSVSALTPRAEIEGEIGMQQMGLQARLMSQALRKMSGNASKAGCTLIFLNQIRYKIGVYYGNPEVTSGGIALKFFASVRLEIRSAGKIKSSKGDEDIGLRARVRVQKSKVSRPYKQAEFEIMFGEGVSKLGCVLDCAEIMEVVVKKGSWYSYEDQRLGQGREKALQHLRENPALQDEIEKKVRLLMLDGEVHRSTPLMSSSSSSASHREEEEEDSLDDFQ

SEQ ID NO: 5465 - DNA, 1047 bp, Acetobacter polyoxogenes
  CDS (1)..(1047): transl_table=11
atggcacaggctccgggtatagacaaaagcaaggccctggaaggggccttgagccagatcgaacgtgcgtttggcaagggttcgatcatgcgcatgggcgaacgcccgaccgagcaggtggacgtgatttccaccgggtcgctgggtctggatatcgccctgggaattggcggcctgccgcgcggccgtatcatcgagatctatggtcccgaaagctcgggcaagaccaccatggcgctgcacgccattgcggaagcccagcgcaaggggggcacctgcgccttcatcgacgccgagcacgcgcttgaccccggttatgcccgcaagctgggggtggatgtcgacaacctgctgatcagccagcccgatgcgggtgagcaggcgctggaaattgccgacacgctggtgcgttccggcgcggttgacgtgctggtggtcgacagtgtggccgccctcgtgccgcgtgcggaactggaaggcgacatgggcgacagccatgtgggcctgcatgcgcgcctgatgagccaggcgctgcgcaagctgacgggttccgtctcgcgttccaacaccatgctgatcttcctcaaccagatccggctcaagatcggcgtgatgttcggcagccccgaaagcaccacgggtggcaacgcgctgaaattctatgcatccgtgcgcatggacatccgtcgtatcggctcgatcaaggacaaggacgaggtcacgggcaaccagacgcgcgtaaaagtggtcaagaacaagatggccccccccttccgtcaggtcgaattcgacatcatgtatggcgaagggatcagcaaggtcggtgaactgatcgaccttggcgtaaaggcgggcattgttgaaaagtccggcgcgtggttctcctgtgacagccagcgcatcgggcaggggcgtgaaaacgccaagcagttcctgcgtgaccaccctgaaatggccgccgatatcgaacgccgcgtgcgtgagcaggcgggtgtcgtggcggaagccatgctggtcggccccgatgaggacggcgccgagcattga

SEQ ID NO: 5466 - protein, 348 aa, Acetobacter polyoxogenes
MAQAPGIDKSKALEGALSQIERAFGKGSIMRMGERPTEQVDVISTGSLGLDIALGIGGLPRGRIIEIYGPESSGKTTMALHAIAEAQRKGGTCAFIDAEHALDPGYARKLGVDVDNLLISQPDAGEQALEIADTLVRSGAVDVLVVDSVAALVPRAELEGDMGDSHVGLHARLMSQALRKLTGSVSRSNTMLIFLNQIRLKIGVMFGSPESTTGGNALKFYASVRMDIRRIGSIKDKDEVTGNQTRVKVVKNKMAPPFRQVEFDIMYGEGISKVGELIDLGVKAGIVEKSGAWFSCDSQRIGQGRENAKQFLRDHPEMAADIERRVREQAGVVAEAMLVGPDEDGAEH

SEQ ID NO: 5467 - DNA, 1059 bp, Actinobacillus actinomycetemcomitans
  CDS (1)..(1059): transl_table=11
atggcaactcaagaagaaaagcaaaaagcactcgacgcggcgttaggtcaaattgaaaaacaatttggtaaaggcgccatcatgaaactcggcgacagccaaaaactggacattgaagcgatttccaccggttctttcggtcttgacctagcactaggcatcggcggtttgccgatggggcgtatcgtggagattttcgggccggaatcttcaggtaaaactaccttaaccctttctgtgattgcggaagcgcaaaaaaccggcaaaacctgtgcctttattgatgcggaacatgctttagacccgatttatgcctccaaactcggcgtggatgtaaaagaacctttagtttcccagccggacaacggcgaacaggcgctggaaatttgtgatgcgttggtgcgttccggtgcggtggatgtaattatcgttgactccgttgccgccttaacgccgaaagcggaaattgaaggcgacatgggcgattcccacatgggattacaagcgcgtttaatgtctcaagcattgcgtaaacttaccagccaaattaaaaacgccaactgcttggtgattttcatcaaccaaattcggatgaaaatcggcgtgatgttcggtaatccggaaaccaccaccggcggtaacgcgttgaaattctatgcctccgtgcgtttggatattcgccgcgtgggttctatcaaagagggtgatgaagttatcggtaatgaaactcgtgtgaaagtggtgaaaaacaaagtggcgccaccgttccgccaagtggatttccaaattctgtacggcgaaggtatttccaaagaaagcgaactgattgagctcggcgtgaaacataaactcatcagcaaagcaggtgcgtggtacgcttaccaaaacgagaaaatcggtcagggcaaaaccaatgctatgaaatggttgaaagacaatcctgaacaagccaaatttatcgaaagcaccttgcgtgatgaattgttggcacatccggaatctgccatcactgcggaagtagaagacgaagcgggtaatggcgaaggcgatttcgaataa

SEQ ID NO: 5468 - protein, 352 aa, Actinobacillus actinomycetemcomitans
MATQEEKQKALDAALGQIEKQFGKGAIMKLGDSQKLDIEAISTGSFGLDLALGIGGLPMGRIVEIFGPESSGKTTLTLSVIAEAQKTGKTCAFIDAEHALDPIYASKLGVDVKEPLVSQPDNGEQALEICDALVRSGAVDVIIVDSVAALTPKAEIEGDMGDSHMGLQARLMSQALRKLTSQIKNANCLVIFINQIRMKIGVMFGNPETTTGGNALKFYASVRLDIRRVGSIKEGDEVIGNETRVKVVKNKVAPPFRQVDFQILYGEGISKESELIELGVKHKLISKAGAWYAYQNEKIGQGKTNAMKWLKDNPEQAKFIESTLRDELLAHPESAITAEVEDEAGNGEGDFE

SEQ ID NO: 5469 - DNA, 1092 bp, Agrobacterium tumefaciens
  CDS (1)..(1092): transl_table=11
atggcacaaaattctttgcgtctcgtagaggataaatcggtggataaaagcaaggcactggaagcggcgctctcccagatcgaacggtcgttcggcaagggatcgatcatgaagctcggttccaatgaaaatgtggttgaagtggaaaccgtttcgacgggctcgctcagcctggatatcgcgctcggcatcggcggcttgccgaaggggcgtatcattgagatttacggcccggaaagctccggtaaaacgacgctggcgctgcagacgatcgcggaagcccagaagaagggcggcatctgcgccttcgtggacgccgaacacgcgctcgatccggtttatgcccgcaagctcggtgtggatttgcagagccttctgatctcgcagcccgataccggcgagcaggcgcttgagatcaccgatacgctggtgcgttcgggcgctgtggacgttcttgtcatcgattcggttgcggccttgacgccgcgggcggaaatcgaaggtgaaatgggcgatagcctgccgggtcttcaggcccgtctgatgagccaggcgctgcgcaagctgaccgcctcgatctccaagtcgaagtgcatggtgatcttcatcaaccagattcgcatgaagatcggcgtcatgtttggttcgccggaaacgacgacgggcggtaacgctctcaagttctatgcgtccgtccgcctcgacatccgccgtatcggcgccgtcaaggagcgcgaagaggttgtcggcaaccagacgcgcgtcaaggtcgtcaagaacaagatggcgccgcccttcaaacaggttgaattcgacatcatgtatggcgaaggtgtttccaagaccggtgagctggtcgatctcggcgtgaaggccggtatcgtcgagaagtccggcgcatggttctcctataacagccagcgtctggggcaggggcgtgaaaacgccaagacctttctgcgcgacaatccggatacggccaatgagatcgaactggcgttgcgccagaatgccggtctgattgccgaccgcttcctgcagaatggtggcccggacgccggtgaaggcgacgacggcagcgacgagggctga

SEQ ID NO: 5470 - protein, 363 aa, Agrobacterium tumefaciens
MAQNSLRLVEDKSVDKSKALEAALSQIERSFGKGSIMKLGSNENVVEVETVSTGSLSLDIALGIGGLPKGRIIEIYGPESSGKTTLALQTIAEAQKKGGICAFVDAEHALDPVYARKLGVDLQSLLISQPDTGEQALEITDTLVRSGAVDVLVIDSVAALTPRAEIEGEMGDSLPGLQARLMSQALRKLTASISKSKCMVIFINQIRMKIGVMFGSPETTTGGNALKFYASVRLDIRRIGAVKEREEVVGNQTRVKVVKNKMAPPFKQVEFDIMYGEGVSKTGELVDLGVKAGIVEKSGAWFSYNSQRLGQGRENAKTFLRDNPDTANEIELALRQNAGLIADRFLQNGGPDAGEGDDGSDEG

SEQ ID NO: 5471 - DNA, 1044 bp, Alkalilimnicola ehrlichei
  CDS (1)..(1044): transl_table=11
atggacgaaaatcgcaagaaagcactgggcgctgccctgggacagatcgaacggcagtttggcaagggcgcggtcatgcgcatgggtgatgcccgcgccgtgcgcggcgacgtggaggtcatctccaccggctcgctgcagctcgatatcgccctgggcgtgggcggcctgcccaaggggcgggtggtggagatctacggcccggagtcctccggcaagaccaccctgaccctgcacgcgatcgccgaggcgcagaaggcgggcggcaccgccgccttcgtcgacgccgagcacgcactggaccccgactacgcagagaagctgggggtcaacctggacgacctgctggtctcccagccggacaccggcgagcaggcgctggagatcaccgacatgctggtccgttccggcgccgtggacgtggtggtggtggactcggtcgccgcgctcacgcccaaggccgagatcgagggcgagatgggcgactctcacgtgggcctgcaggcgcggctgatgtcccaagccctgcgcaagctcaccgccaacatcaaacgctccaacaccctggttatcttcatcaatcagatccgcatgaagattggggtaatgttcggcagccccgagaccaccaccgggggtaacgcgctgaaattctacagctcggtgcgcatggatatccgtcgcctgggtgccatcaagaagggcgacgaggtcctgggcaacgagacccgggtcaaggtggtcaagaacaagatggcgccgccgttcaagcaggcggagttcgagatcctctacggccagggtatctcccacgagggggagttgatcgacctgggtgtcaaggagggcctgatcgagaaggccggggcctggtacagccacaacggcgaccgcattggccagggcaaagacaacgtccgcaactacctcaaagagcacccggaactggccgcggaactggaaaagcagatccgcgacaagctgctgcccgggcgggccccatccagcgaggcccagggcaccgaaagcggtcaggaggcctga

SEQ ID NO: 5472 - protein, 347 aa, Alkalilimnicola ehrlichei
MDENRKKALGAALGQIERQFGKGAVMRMGDARAVRGDVEVISTGSLQLDIALGVGGLPKGRVVEIYGPESSGKTTLTLHAIAEAQKAGGTAAFVDAEHALDPDYAEKLGVNLDDLLVSQPDTGEQALEITDMLVRSGAVDVVVVDSVAALTPKAEIEGEMGDSHVGLQARLMSQALRKLTANIKRSNTLVIFINQIRMKIGVMFGSPETTTGGNALKFYSSVRMDIRRLGAIKKGDEVLGNETRVKVVKNKMAPPFKQAEFEILYGQGISHEGELIDLGVKEGLIEKAGAWYSHNGDRIGQGKDNVRNYLKEHPELAAELEKQIRDKLLPGRAPSSEAQGTESGQEA

SEQ ID NO: 5473 - DNA, 1047 bp, Amycolatopsis mediterranei
  CDS (1)..(1047): transl_table=11
atgcctgcagcacccgacaaggacaaggcgctcgagctcgcgctcgcgcagatcgacaagcagtacggcaagggctcggtcatgcgcctcggcgaagagggccgcgcccccatcgccgtgatccccaccggcgcgatcgccctcgacgtcgcgctcggcatcggcggcctgccccgcggccgggtcatcgaggtctacggcccggagtcctccggtaagaccacggtcgccctgcacgcggtggcgaacgcccagcgcaacggtggcatcgcggccttcatcgacgcggagcacgcgctggacccggactacgccaagaagctcggcgtggacaccgacgccctgctcgtctcccagcccgacaccggtgagcaggccctggagatcgcggacatgctggtccgctccggcgcgctcgacatcctggtcatcgactccgtggccgcgctcgtgccccgcgccgagatcgaaggcgagatgggcgactcgcacgtcggtctccaggcccggctgatgagccaggcgctgcgcaagatgaccggtgcgatgaacaactccggcaccaccgcgatcttcatcaaccagctgcgcgagaagatcggcgtcatgttcggctccccggaaaccaccaccggtggcaaggcgctgaagttctacgcgtcggtccggctcgacgtccgccgcatcgagacgctcaaggacggcggcgaggcggtcggcaaccgcacccgcgtcaaggtcgtgaagaacaagatggccccgcccttcaagcaggccgaattcgacatcctgtacggccacggcatctcccgcgagggttcgctcatcgacatgggggtcgaccaggccatcctgcgcaagtccggcgcctggtacacctacgagggcgaccagctcggccagggcaaggagaacgcccggaagttcctgcgcgacaacccggacatcgccaacgagatcgagaagcggatcaaggagaagctcggtatcggtgcgcagctcgacgcggaagccgtcgaggccgttccggcaccggtcgacttctag

SEQ ID NO: 5474 - protein, 348 aa, Amycolatopsis mediterranei
MPAAPDKDKALELALAQIDKQYGKGSVMRLGEEGRAPIAVIPTGAIALDVALGIGGLPRGRVIEVYGPESSGKTTVALHAVANAQRNGGIAAFIDAEHALDPDYAKKLGVDTDALLVSQPDTGEQALEIADMLVRSGALDILVIDSVAALVPRAEIEGEMGDSHVGLQARLMSQALRKMTGAMNNSGTTAIFINQLREKIGVMFGSPETTTGGKALKFYASVRLDVRRIETLKDGGEAVGNRTRVKVVKNKMAPPFKQAEFDILYGHGISREGSLIDMGVDQAILRKSGAWYTYEGDQLGQGKENARKFLRDNPDIANEIEKRIKEKLGIGAQLDAEAVEAVPAPVDF

SEQ ID NO: 5475 - DNA, 1080 bp, Anaplasma marginale
  CDS (1)..(1080): transl_table=11
gtgtccatgtcaggcagtaagaaagatgttgaatctgagaagcagaaggcgttggatgcggccataagccagatagaaagggcgtttgggcggggtgccattatgaagttgaagcagcatcctgccgagaagatggatagcgtgtctacaggttctatagctctggatgcggcgttgggtattggagggttgccgaaaggtaggatagtagagatttttggtcctgagagctccgggaagactacacttgcgcttcacgtcattgcagaggcccaaaagcagggcggtaactgtgcttttattgatgccgaacatgcgttggacaccgtgtacgccagaaagctgggcgtaaatgtgggggatttgatagtctcacagcccgacaccggcgagcaggctttgcacattgttgaatacttagtgtgctccggtgccatagatgtgatagtagtggattccgtcgccgcgctcactcccagggcggaaatagagggtgacatgggtgaccagcacatggggttgcaggctaggttgctgagccacgcgcttcgcaagctgacctcggtggtctccaaggctaactgtatattggtgtttatcaaccagatacgcataaagataggtgtgatttacggcaacccggaagtgacaacgggtggtagtgcgctcaagttctacacgtcaatacggcttgacattcgcaaagtaagcgcgattaaagacaaagacaacgttatagggaaccagacgagagtaaaggtcgtcaaaaacaaggttgcacccccgttcaagcaggcggagtttgacatcgtgtacaatgagggcatatcgaagctgggcgagatagtcgacatgggcgtcaagttcggttttgtcgagaagtctggtgcgcactattcctacggcgcggtaaagttgggacaaggtagggagaatgccaagggttatttgaaaagcaacccagatgtcgcgaatgagttagagcagaaaatcagagcatgccttgcggaaagtatgcacaatagcgatctgttcgctgtagatgagcgtaccgatgtgttggaggaggaggttttctag

SEQ ID NO: 5476 - protein, 359 aa, Anaplasma marginale
MSMSGSKKDVESEKQKALDAAISQIERAFGRGAIMKLKQHPAEKMDSVSTGSIALDAALGIGGLPKGRIVEIFGPESSGKTTLALHVIAEAQKQGGNCAFIDAEHALDTVYARKLGVNVGDLIVSQPDTGEQALHIVEYLVCSGAIDVIVVDSVAALTPRAEIEGDMGDQHMGLQARLLSHALRKLTSVVSKANCILVFINQIRIKIGVIYGNPEVTTGGSALKFYTSIRLDIRKVSAIKDKDNVIGNQTRVKVVKNKVAPPFKQAEFDIVYNEGISKLGEIVDMGVKFGFVEKSGAHYSYGAVKLGQGRENAKGYLKSNPDVANELEQKIRACLAESMHNSDLFAVDERTDVLEEEVF

SEQ ID NO: 5477 - DNA, 1074 bp, Anabaena sp
  CDS (1)..(1074): transl_table=11
atggctatcaataccgatacttctggcaagcaaaaagcgctgacaatggtactcaaccagattgagcgcagcttcggtaaaggagcaatcatgcgcctgggcgatgctacccggatgcgggtagaaacaatctctactggcgcgctcaccttggatttagcattgggaggcggtttacccaaggggcgggtgattgagatttatggcccggaaagttccggtaaaacaacagtagcactccacgcgatcgcagaagtgcaaaaagaaggtggaatagctgccttcgtcgatgctgaacacgcccttgaccccacctacgcctcagctttaggtgtagatattcaaaacttgctggtttcccaaccagacacaggtgaatccgcattggaaattgttgatcaacttgtacgctccgccgccgttgatattgtagttattgactctgtagcagctttggttccccgtgcagaaatcgaaggcgatatgggtgatgcccacgtcggtttacaagcgagattaatgagccaagctctacgtaaaattactggcaatattggtaaatctggttgtacagtaattttcattaaccagttgcggcaaaaaattggtgttacctacggtagcccggaaacgacaactggcggtaacgcattaaagttctatgcttcagtacgcttagatattcgtcggattcaaaccttgaaaaaaggtactgatgaatttggtaaccgagttaaagtcaaagttgcgaaaaataaagttgcaccgccttttagaatcgcagagtttgacattatttttggtaaaggtgtttcgactctaggttgtttagtagatttagcggaagaaactggtattctcatccgtaaaggagcttggtacagttacaacggtgataatatttctcaaggtcgagataacgctatcaaatacctggaagaaaaaccagaatttagtgaacaaatcaaacaacaggtgcgtgaaaaattagataagggagctgttgtttctgcaaactcggtagctaaaaacaacgaagacgatgaagatgaagatgtagaagaggaagaataa

SEQ ID NO: 5478 - protein, 357 aa, Anabaena sp
MAINTDTSGKQKALTMVLNQIERSFGKGAIMRLGDATRMRVETISTGALTLDLALGGGLPKGRVIEIYGPESSGKTTVALHAIAEVQKEGGIAAFVDAEHALDPTYASALGVDIQNLLVSQPDTGESALEIVDQLVRSAAVDIVVIDSVAALVPRAEIEGDMGDAHVGLQARLMSQALRKITGNIGKSGCTVIFINQLRQKIGVTYGSPETTTGGNALKFYASVRLDIRRIQTLKKGTDEFGNRVKVKVAKNKVAPPFRIAEFDIIFGKGVSTLGCLVDLAEETGILIRKGAWYSYNGDNISQGRDNAIKYLEEKPEFSEQIKQQVREKLDKGAVVSANSVAKNNEDDEDEDVEEEE

SEQ ID NO: 5479 - DNA, 1077 bp, Anabaena variabilis
  CDS (1)..(1077): transl_table=11
atggctatcaataccgatacttcaggcaagcaaaaagcgctaacaatggtactcaaccagattgagcgcagcttcggtaaaggagcaatcatgcgcctgggcgatgctacccggatgcgggtagaaacgatttccacaggagcgctcaccttggatttagcattgggtggcggtttgcccaaggggcgggtgattgagatttatggcccggaaagttccggtaaaacaacagtagcactccacgcgatcgccgaagtacaaaaagaaggcggaattgctgcttttgtggatgctgaacacgcccttgaccccacctacgcctcagccttaggtgtagatattcaaaacttgctggtctcccaaccagacacaggtgaatccgcgttggaaattgttgatcagctggtacgctccgccgccgttgatattgtagttattgactcagtagcagcgttggttccccgtgcagaaatcgaaggcgatatgggtgatgcccatgttggtttacaagcgagattaatgagccaagctctacgtaaaattactggcaatattggtaaatctggttgtacagtaattttcattaaccagttgcggcaaaaaattggtgttacctacggtagcccggaaacaaccactggtggtaacgccttaaagttctatgcttcagtgcgtttagatattcgtcggattcaaaccttgaaaaaaggtactgatgaatttggtaaccgagttaaagttaaagttgcgaaaaataaagttgcaccgccttttagaattgcggaatttgacattatttttggtaaaggtgtttccactctaggttgtttagtagatttagctgaagaaactggtatcttactccgtaagggagcatggtatagttacaatggcgataatatttctcaaggtcgagataacgctatcaagtatctggaagaaaaaccagaatttgctgaacagattaaacaacaagtgcgtgaaaaattggacaagggcgctgttgtttctgcaaactcggtagccaaagctaacgaagaagatgaagaagatgttgacttagacgaggaagaataa

SEQ ID NO: 5480 - protein, 358 aa, Anabaena variabilis
MAINTDTSGKQKALTMVLNQIERSFGKGAIMRLGDATRMRVETISTGALTLDLALGGGLPKGRVIEIYGPESSGKTTVALHAIAEVQKEGGIAAFVDAEHALDPTYASALGVDIQNLLVSQPDTGESALEIVDQLVRSAAVDIVVIDSVAALVPRAEIEGDMGDAHVGLQARLMSQALRKITGNIGKSGCTVIFINQLRQKIGVTYGSPETTTGGNALKFYASVRLDIRRIQTLKKGTDEFGNRVKVKVAKNKVAPPFRIAEFDIIFGKGVSTLGCLVDLAEETGILLRKGAWYSYNGDNISQGRDNAIKYLEEKPEFAEQIKQQVREKLDKGAVVSANSVAKANEEDEEDVDLDEEE

SEQ ID NO: 5481 - DNA, 1038 bp, Aquifex aeolicus
  CDS (1)..(1038): transl_table=11
atgtccgagaacttatctgagaagaagaaggctttagaagttgcactttcaaacatcgaaaaacgtttcggtaaaggggcagttatgcccctcaaatccgttgaaaaggttcaggtagaaacaatacccaccggatcactggctctcgacatagcaacgggagtgggaggaatcccgaagggaagaattacggaaatcttcggcgttgagagttcaggaaagactacactagccctccatgtcatagcggaagcccaaaagaggggaggagttgcggtattcatagacgcggaacacgcccttgatccgaagtacgccaaaaaacttggagttgacgttgaaaacttgtacatctcacaaccagactatggtgaacaggctctggaaatagcagaaagcttaataaacagtggtgcggtggacgtaatagttgtagactcggttgcagctcttgttccgaaagacgaactcgaaggagaaatgggtgaagcacaggtcggaaaacaggcaaggcttatgtctcaggctctcagaaagctaaaaggagctgttcacaaaagcaatactgcattaatatttatcaaccaaataagagaaaaaataggtgtaatgtttggaaaccctgagacaacacccggaggaagggcactaaagttcttctcagatatgagacttgaagtaaggagactgggagacgtaaaagaaggcggagaaaaaaagggctacagggtaaaagtgagagtagttaaaaacaaacttgcaccgcctttccaggaagcggagtttgacataatctacggtgaaggtatatgtaaactatgtgatctgatagaagttgcaactaatttgggaatttttacaaagagcggttcctggtacagttacggtgataagagacttggtcaaggcaaggagcaagtgaaaaagtaccttcaagaacaccccgaattaattgatgaaatagatcaaaaagtaagggaggctgcaggacttgctggatcaaatattgaggaaagcactggagaagaaggcaagtga

SEQ ID NO: 5482 - protein, 345 aa, Aquifex aeolicus
MSENLSEKKKALEVALSNIEKRFGKGAVMPLKSVEKVQVETIPTGSLALDIATGVGGIPKGRITEIFGVESSGKTTLALHVIAEAQKRGGVAVFIDAEHALDPKYAKKLGVDVENLYISQPDYGEQALEIAESLINSGAVDVIVVDSVAALVPKDELEGEMGEAQVGKQARLMSQALRKLKGAVHKSNTALIFINQIREKIGVMFGNPETTPGGRALKFFSDMRLEVRRLGDVKEGGEKKGYRVKVRVVKNKLAPPFQEAEFDIIYGEGICKLCDLIEVATNLGIFTKSGSWYSYGDKRLGQGKEQVKKYLQEHPELIDEIDQKVREAAGLAGSNIEESTGEEGK

SEQ ID NO: 5483 - DNA, 1047 bp, Aquifex pyrophilus
  CDS (1)..(1047): transl_table=11
atggcaagggtttctgaaaacttatctgagaagatgaaggctcttgaggtagctttaagcagtattgagaagcgtttcggcaaaggggcggttatgccccttaaagctgttgagaccgttgaggttgaaactatacccactggctccatctcccttgatatagctacgggagtcggaggaatcccgaagggtagaataaccgagatattcggtgttgagagctccgggaaaacaaccctcgcacttcacgtaatagcggaagcccaaaaaaggggaggagtagcggtattcattgatgcggaacacgctcttgaccccaagtatgctaagaagcttggtgtggacgttgataatctttacatatcccagcccgactatggagagcaggcccttgaaatagcggagagtctaataaacagcggagcggttgatgttatagtcgttgactccgtagctgcactcgttcccaaggacgagcttgagggcgagatgggagaagcccaggtgggcaaacaggcaaggctcatgtcccaggcactgagaaagcttaaaggtgcggttcacagaagcaacaccgcactcatattcataaaccagataagggagaagataggagtgatgttcggaaatccggagacaacacccggtggaagggcattaaagttcttttccgatatgagacttgaagtgagaagactcggagacgttaaggaaggaggagaaaagaaaggctacagagtgaaggttagggttgttaagaataagctcgcgcccccattccaggaggcggagtttgacgttatatacggtgaaggaatatgcaggatatgcgatatcattgatactgctgcaaatctcggagttataacgaagagcggttcctggtacagctacggagaaaagaggctgggacagggaagggaacaggctaagaaatacctgcttgaacatcccgaaatgcttgaggaaatagagagaaaagtaagagaggtgtcgggacttgttagaccagatactgaaaacagcgttggagaaaagagcgagtga

SEQ ID NO: 5484 - protein, 348 aa, Aquifex pyrophilus
MARVSENLSEKMKALEVALSSIEKRFGKGAVMPLKAVETVEVETIPTGSISLDIATGVGGIPKGRITEIFGVESSGKTTLALHVIAEAQKRGGVAVFIDAEHALDPKYAKKLGVDVDNLYISQPDYGEQALEIAESLINSGAVDVIVVDSVAALVPKDELEGEMGEAQVGKQARLMSQALRKLKGAVHRSNTALIFINQIREKIGVMFGNPETTPGGRALKFFSDMRLEVRRLGDVKEGGEKKGYRVKVRVVKNKLAPPFQEAEFDVIYGEGICRICDIIDTAANLGVITKSGSWYSYGEKRLGQGREQAKKYLLEHPEMLEEIERKVREVSGLVRPDTENSVGEKSE

SEQ ID NO: 5485 - DNA, 1110 bp, Azospirillum lipoferum
  CDS (1)..(1110): transl_table=11
atgtcgtccgcacagcttcgtttggtcgagaaggattccatggacaagcagaaggcgctcgatgccgccctgagccagatcgaacgcgcgttcggcaagggctcgatcatgaagctcggcgcccgtgagaacctggtcgagacggaggtcatttccaccggctccctgggtctcgatatcgcgctgggcatcggtggcctgccgaagggccgcatcgtcgaaatctacgggccggaaagctcgggcaagaccacgctggcgctgcacgccatcgcccaggcccagaaggccggcggcacctgcgccttcgtggacgccgaacacgcgctcgacccgtcctatgcccgcaagctgggcgtcaacatcgacgagttgctgatctcccagccggatgccggcgagcaggcgctggagatcgccgatacactggtgcgctccggcgccatcgacgtgctggtcgtcgactcggttgccgcgctggttccgcgcgccgaactggaaggcgagatgggtgacgccatgtcgggcctgcatgcccgcctgatgagccaggcgctgcgcaagctgaccggctcgatctccaagtcgaattgcctggtgatcttcatcaatcagatccgcctgaagatcggcgtgatgttcggcaacccggagacgacgaccggcggcaacgcgctgaagttctacgcctccgttcgtctcgacatccgccgcatcggctcgatcaaggaccgcgacaccgtcgtcggcaaccagacccgcgtcaaggtggtgaagaacaagatggccccgccgttccgcgtggtcgagttcgacatcatgtatggcgagggtgtgtcgaaggtcggcgagttgctcgacctcggcatccaggccggtgtggtcgataagtcgggtgcgtggttcagctatgacggcacccgcatcggccagggccgcgagaatgccaagacctacctgcgcaacaaccccgagatggccgatgcgatcgaggccaagatccgcggcaacgccggtctggtcgccgacgccatgatgggcacccggaagccgacggcgaagcctccacaccggagtgaggttcccagcgagcaggaagcccgctgctga

SEQ ID NO: 5486 - protein, 369 aa, Azospirillum lipoferum
MSSAQLRLVEKDSMDKQKALDAALSQIERAFGKGSIMKLGARENLVETEVISTGSLGLDIALGIGGLPKGRIVEIYGPESSGKTTLALHAIAQAQKAGGTCAFVDAEHALDPSYARKLGVNIDELLISQPDAGEQALEIADTLVRSGAIDVLVVDSVAALVPRAELEGEMGDAMSGLHARLMSQALRKLTGSISKSNCLVIFINQIRLKIGVMFGNPETTTGGNALKFYASVRLDIRRIGSIKDRDTVVGNQTRVKVVKNKMAPPFRVVEFDIMYGEGVSKVGELLDLGIQAGVVDKSGAWFSYDGTRIGQGRENAKTYLRNNPEMADAIEAKIRGNAGLVADAMMGTRKPTAKPPHRSEVPSEQEARC

SEQ ID NO: 5487 - DNA, 1035 bp, Azoarcus sp
  CDS (1)..(1035): transl_table=11
atggacgacaacaaggccaaggcccttgccgccgcgctatcccagatcgaaaagcagttcggcaagggatccatcatgcgcatgggcgacggcaatgtcgaaaaggacatccagaccgtttccaccggctcgctcggcctcgacatcgcgctcggcctgggcggcctgccgcgcggccgcgtcgtcgaaatctacgggccggagtcgtccggcaagaccacgctgacgctgcaggtcgtcgccgaaatgcagaagctcggcggcaccgcggccttcatcgacgccgagcacgcgctcgacgtcggctacgccgaaaagctcggtgtgaacatcaccgacctgctgatctcgcagccggacaccggcgaacaggcgctcgaaatcgccgacatgctggtgcggtccggcggcgtggacgtggtcgtcatcgactcggtcgcggcgctcacccccaaggccgaaatcgaaggcgagatgggcgaccagctccccggcctgcaggcccgcctgatgtctcaggcgctgcgcaagctcaccgccaacatcaagcgcaccaacaccctggtgatcttcatcaaccagattcgcatgaagatcggggtgatgttcggcaacccggaaaccaccaccggcggcaacgcgctcaagttctacgcctcggtgcgcatggacatccgccgcaccggcaccatcaagcgcggcgacgaggtggtcggctccgaaaccaaggtcaaggtcgtcaagaacaaggtctcgccgccgttcaaggaagcgcacttcgacatcctgtacggcgaaggcgtgtcgcgcgagggcgagatcatcgacctcggcgtggaccacaagatcgtcgacaagtccggcgcctggtacgcctacaacggcgacaagatcggccagggcaaggacaacgcgcgcgaattcctgcgcgccaacccggcgctggcacgcgagatcgagaacaaggtccgcgtcgtgctcggcctcaaggaactgccggtcgacggcgcgcagccggccgcggccgaggcctga

SEQ ID NO: 5488 - protein, 344 aa, Azoarcus sp
MDDNKAKALAAALSQIEKQFGKGSIMRMGDGNVEKDIQTVSTGSLGLDIALGLGGLPRGRVVEIYGPESSGKTTLTLQVVAEMQKLGGTAAFIDAEHALDVGYAEKLGVNITDLLISQPDTGEQALEIADMLVRSGGVDVVVIDSVAALTPKAEIEGEMGDQLPGLQARLMSQALRKLTANIKRTNTLVIFINQIRMKIGVMFGNPETTTGGNALKFYASVRMDIRRTGTIKRGDEVVGSETKVKVVKNKVSPPFKEAHFDILYGEGVSREGEIIDLGVDHKIVDKSGAWYAYNGDKIGQGKDNAREFLRANPALAREIENKVRVVLGLKELPVDGAQPAAAEA

SEQ ID NO: 5489 - DNA, 1041 bp, Azoarcus sp
  CDS (1)..(1041): transl_table=11
atggacgacaacaaggccaaggccctcgccgccgcgctctcgcagatcgagaagcagttcggcaaaggctcgatcatgcggatgggcgacggcaccatcgaacgtgacatccagacggtgtcgaccggctcgctcggtctcgacatcgcgctcggtctgggcggtttgccgcgcggccgggtcgtcgaaatctacggcccggaatcctccggcaagacgacgttgacgctgcaggtcatcgccgaaatgcagaagctcggcggcaccgccgcattcatcgatgccgagcatgcgctcgacgtcggctacgccgagaagctcggcgtgaacatccaggacctcctgatctcgcagccggacaccggtgagcaggcgctcgagatcgccgacatgctggtgcgttcgggaggcgtcgagatcgtcgtcatcgactcggtcgcggcgctgactccgaaagccgagatcgaaggcgagatgggcgaccagctgcccggcctgcaggcccgcctgatgagccaggcgctcaggaagctcaccgcgaacatcaagcgcaccaacaccctggtgatcttcatcaaccagatccgcatgaagatcggcgtgatgttcggtagcccggagaccacgaccggcggcaacgcgctgaagttctacgcctcggtacggctcgacatccgccgcactggcgcgatcaagaaaggcgacgaagtggtcggctccgagacgcgctgcaaggtcgtcaagaacaaggtcgcgccgccgttcaaggaagcgcatttcgacatcctctacggcgaaggcatctcgcgcgaaggcgagatcatcgacctcggcgtgcagcacaagatcgtcgacaagtccggcgcatggtatgcgtacaagggcgagaagatcggccagggcaaggacaattcacgcgaattcctgcgcgcgaacccggctctcgcgcgcgagatcgaaaacaaggtccgcgcgcaggtcggcctgaacgcgatggctgtcgaggctgcacccgccggggtggctccggtcgagccctga

SEQ ID NO: 5490 - protein, 346 aa, Azoarcus sp
MDDNKAKALAAALSQIEKQFGKGSIMRMGDGTIERDIQTVSTGSLGLDIALGLGGLPRGRVVEIYGPESSGKTTLTLQVIAEMQKLGGTAAFIDAEHALDVGYAEKLGVNIQDLLISQPDTGEQALEIADMLVRSGGVEIVVIDSVAALTPKAEIEGEMGDQLPGLQARLMSQALRKLTANIKRTNTLVIFINQIRMKIGVMFGSPETTTGGNALKFYASVRLDIRRTGAIKKGDEVVGSETRCKVVKNKVAPPFKEAHFDILYGEGISREGEIIDLGVQHKIVDKSGAWYAYKGEKIGQGKDNSREFLRANPALAREIENKVRAQVGLNAMAVEAAPAGVAPVEP

SEQ ID NO: 5491 - DNA, 1433 bp, Azotobacter vinelandii
  CDS (311)..(1360): transl_table=11
tgccggccccgatggcggctcgccggaaaccccggtcggcaccgtctggctggccgggcagatggcgagcgcttgttgcggtgcgccagcagtttcccggcgaccgcggcgaggtacgtcgacggacggtgcaggccgccctggccggtctgatccgcctggttgccgatgggacgctcgaatgaggtgctggacatcacggaaatggatcggcccaggggtaggcgcccgagcttttcctatgctctaatactgtctacttatacagtgtatggcgccgcaaggccctcctgaatacgtgaggtcttcaatggacgagaacaagaagcgcgccttggctgcggccttgggccagatcgaaaagcagttcggcaagggcgcggtgatgcgcatgggcgatcacgagcggcaggcgattccggccatttccaccggttccctggggctggacatcgcgctcggcatcggcggcctgcccaaggggcggatcgtcgagatctacggccccgaatcctccggcaagaccaccctgaccctgtcgaccatcgccgaggctcagaagcagggtgccacctgcgccttcgtcgacgccgagcacgcgctcgatccggactacgccgccaagctcggggtgaacgtcgacgacctcctggtttcccagcccgataccggcgagcaggcgctggagatcaccgacatgctggtgcgttccaacgcggtggacgtgatcatcgtcgactccgtggcggcgctggtgcccaaggcggagatcgagggcgagatgggcgaccagcacgtcggtctgcaggcccgtctgatgtcccaggccctgcgcaagatcaccggcaacatccagaacgccaactgcctggtcatcttcatcaaccagatccgcatgaagatcggtgtgatgttcggcaacccggaaaccaccaccggcgcgaatgccctgaagttctacgcctcggtgcgtctggacatccgccgcaccggcgcggtgaaggagagcgacgaggtgatcggcagcgagacccgcgtcaaggtggtgaagaacaaggtggcgccgccgttccgtcaggccgagttccagattctctacggcaagggcatctaccgtaacggtgagatcatcgacctcggtgtgcaactcggcctgctggagaagtccggcgcctggtacagctaccagggcagcaagatcggccagggcaaggccaatgcggccaagtttctcgaggacaacccggaggtcgccgcagcggtcgagaagagcatccgcgatcagttgctcgccgcgccggccagcgcccgtccggcagccttggccgacgagccggccgacgcggatctcgattattgatgagtgcgtcgatgccggggctcgacagtcccgccgccgtgcgccgggccgccatggacctgctggcgcgtcg

SEQ ID NO: 5492 - protein, 349 aa, Azotobacter vinelandii
MDENKKRALAAALGQIEKQFGKGAVMRMGDHERQAIPAISTGSLGLDIALGIGGLPKGRIVEIYGPESSGKTTLTLSTIAEAQKQGATCAFVDAEHALDPDYAAKLGVNVDDLLVSQPDTGEQALEITDMLVRSNAVDVIIVDSVAALVPKAEIEGEMGDQHVGLQARLMSQALRKITGNIQNANCLVIFINQIRMKIGVMFGNPETTTGANALKFYASVRLDIRRTGAVKESDEVIGSETRVKVVKNKVAPPFRQAEFQILYGKGIYRNGEIIDLGVQLGLLEKSGAWYSYQGSKIGQGKANAAKFLEDNPEVAAAVEKSIRDQLLAAPASARPAALADEPADADLDY

SEQ ID NO: 5493 - DNA, 1032 bp, Bacillus cereus
  CDS (1)..(1032): transl_table=11
atgagtgatcgtcaagcagcgttagatatggcgttaaaacaaatagagaagcaattcggtaaaggttcaattatgaaattaggagaacaagcggagcgtagagtttctacggtttctagtggttctttagcacttgatgtggcactaggggtaggcggatatccacgtggccgtattatcgaaatttacggacctgaaagttcaggtaaaacgacagtttcattacatgcaattgcagaagtacaacgtcaaggtggacaagcagcattcatcgatgcggagcacgcaatggatcctgtatatgcacaaaaattaggcgttaacatagatgaattactattatcacagcctgatacaggggagcaaggattagaaatcgcggaagcacttgtacgaagtggtgcggttgacattatcgtaattgactctgtagcagctcttgtaccgaaagcagagattgaaggcgacatgggtgactcacacgtaggtttacaagcacgtttaatgtcacaagcacttcgtaagctttcaggagcaatcaacaaatcaaaaacaattgcaatctttattaaccaaattcgtgaaaaagttggggttatgttcggaaacccagaaacaactccaggtggtcgtgcgttgaaattctattcaactgttcgtcttgaagtgcgtcgtgcggagcaattaaagcaaggtaacgacatcgttggtaataaaacaaaagtaaaagtagtgaaaaataaagtagcaccaccattccgtgttgctgaagttgatattatgtacggagaaggtatttcaagagaaggtgaaatcttggatatggcttctgagcttgatatcgttcaaaagagcggtgcttggtattcttataatgaagaacgcctaggacaaggtcgtgaaaattcgaagcagttcttaaaagaaaatacagatttaagagaagaaattgctttctttattcgtgagcatcacggaattagtgaagattctggtgctgagggcgcagaagattcaactcttcttgattaa

SEQ ID NO: 5494 - protein, 343 aa, Bacillus cereus
MSDRQAALDMALKQIEKQFGKGSIMKLGEQAERRVSTVSSGSLALDVALGVGGYPRGRIIEIYGPESSGKTTVSLHAIAEVQRQGGQAAFIDAEHAMDPVYAQKLGVNIDELLLSQPDTGEQGLEIAEALVRSGAVDIIVIDSVAALVPKAEIEGDMGDSHVGLQARLMSQALRKLSGAINKSKTIAIFINQIREKVGVMFGNPETTPGGRALKFYSTVRLEVRRAEQLKQGNDIVGNKTKVKVVKNKVAPPFRVAEVDIMYGEGISREGEILDMASELDIVQKSGAWYSYNEERLGQGRENSKQFLKENTDLREEIAFFIREHHGISEDSGAEGAEDSTLLD

SEQ ID NO: 5495 - DNA, 1050 bp, Bacillus halodurans
  CDS (1)..(1050): transl_table=11
atgagtgatcgtaaagcagcgttggacatggcgttacgacaaattgaaaagcaattcggaaaaggctcgatcatgaagctgggagaacaagcagaacaacgtgtatctaccatttccagcggtgctcttgcccttgacatcgcccttggtgttggcggataccctcgtggaagagttattgaagtgtatggtccagaatcatctggtaaaacgaccgttgccctccatgcgattgcagaggtgcaaagaaatggtggtcaagctgcgtttattgatgcggaacatgcccttgatccggtttatgcgaaaaagctaggtgtaaacattgatgagcttttattgtcacagcctgataccggagaacaagcgttggaaatcgctgaagcgttagttcgcagcggggccattgacgtcattgtcatcgacagtgtggcagctcttgtaccgaaagcggaaatagaaggggagatgggtgacagccatgttggcttgcaagcacgcctaatgtctcaagcgcttcggaagctttcaggtgcgatcaataagtcaaaaacaattgcgattttcattaaccaaattcgtgaaaaagttggtgttatgttcggaaacccggaaacgacaccggggggaagagcgcttaagttctattcctctgttcgtctcgaagtgcgccgtgcagagacgttaaagcaaggaaacgatatggtcggtaacaagacgaaaattaaagtcgtgaaaaacaaagtggctcctccgtttaaacaagcggaagtggatattatgtacggtgaagggatttcccgtgaaggctcgattttagatattgcttctgagcttgatattgtgcaaaaaagcggagcttggtattccttcaatgacgagcgtctcggtcaagggcgcgagaatgcgaaacaatttttaaaggaaaaccctgaagctgcggaggaaattgaaagccgaattcgcgagcattacggtttgaacggagagattgaggtggaggctccatcggaagaggagtttgaagatctcccactcgatttgaaataa

SEQ ID NO: 5496 - protein, 349 aa, Bacillus halodurans
MSDRKAALDMALRQIEKQFGKGSIMKLGEQAEQRVSTISSGALALDIALGVGGYPRGRVIEVYGPESSGKTTVALHAIAEVQRNGGQAAFIDAEHALDPVYAKKLGVNIDELLLSQPDTGEQALEIAEALVRSGAIDVIVIDSVAALVPKAEIEGEMGDSHVGLQARLMSQALRKLSGAINKSKTIAIFINQIREKVGVMFGNPETTPGGRALKFYSSVRLEVRRAETLKQGNDMVGNKTKIKVVKNKVAPPFKQAEVDIMYGEGISREGSILDIASELDIVQKSGAWYSFNDERLGQGRENAKQFLKENPEAAEEIESRIREHYGLNGEIEVEAPSEEEFEDLPLDLK

SEQ ID NO: 5497 - DNA, 1053 bp, Bacillus clausii
  CDS (1)..(1053): transl_table=11
atgagtgatagaaaacaagcgcttgacatggctttacgccatattgaaaaacaatttggcaaaggctctattatgaagctaggtgaacaggctgaacagcgcgtatcgacggtatcaagcggcaccctcgcccttgatattgctttgggcgtaggtggctatccaaaaggaagagtcattgaagtatatggaccagaatcttccggtaaaacaaccgttgctctccatgcaattgctgaagtgcagcgcaatggtggccaagccgcttttattgatgctgagcatgccctggatcctgtctatgcgagcaaactaggcgttaatatcgatgaactcttgctgtcccaacctgatacaggcgaacaggcacttgaaattgcggaagcacttgtgcgcagcggtgcccttgatatcattgtcattgatagtgtagctgcgcttgtaccaaaagcggaaattgaaggggaaatgggcgactcgcatgtcggcttgcaagcacgtttaatgtcacaagcgctacggaaattatccggagcgatcaataagtcgaaaacgattgcgatcttcatcaaccaaatccgtgaaaaagtcggcgttatgttcggcaatccagaaacgacgccagggggacgcgcccttaaattttactcgtccgtccgcttggaagtgcgccgtgccgaggcgttaaagcaagggaatgagattgtcggcaaccgaaccaaaatcaaagtcgtcaaaaacaaagtcgctccgcctttccgtttagcggaagtcgacattatgtacggagaaggtatttccagggaaggttcgatgcttgacattgcctcggaactcgacattgtcgaaaaaagcggtgcttggtattcttacaaaggcgaccgcctcgggcaaggccgcgagaattcaaaacaatttttgaaagaaaacccggaaattacagccgaaattgagcgtttgattcgtgaccaccacgggctcgacggggaagcgaagctggaagaggcagctgaagaacaagcttttgaagatgtgcctttagatttaaaataa

SEQ ID NO: 5498 - protein, 350 aa, Bacillus clausii
MSDRKQALDMALRHIEKQFGKGSIMKLGEQAEQRVSTVSSGTLALDIALGVGGYPKGRVIEVYGPESSGKTTVALHAIAEVQRNGGQAAFIDAEHALDPVYASKLGVNIDELLLSQPDTGEQALEIAEALVRSGALDIIVIDSVAALVPKAEIEGEMGDSHVGLQARLMSQALRKLSGAINKSKTIAIFINQIREKVGVMFGNPETTPGGRALKFYSSVRLEVRRAEALKQGNEIVGNRTKIKVVKNKVAPPFRLAEVDIMYGEGISREGSMLDIASELDIVEKSGAWYSYKGDRLGQGRENSKQFLKENPEITAEIERLIRDHHGLDGEAKLEEAAEEQAFEDVPLDLK

SEQ ID NO: 5499 - DNA, 1044 bp, Bacillus subtilis
  CDS (1)..(1044): transl_table=11
atgagtgatcgtcaggcagccttagatatggctcttaaacaaatagaaaaacagttcggcaaaggttccattatgaaactgggagaaaagacagatacaagaatttctactgtaccaagcggctccctcgctcttgatacagcactgggaattggcggatatcctcgcggacggattattgaagtatacggtcctgaaagctcaggtaaaacaactgtggcgcttcatgcgattgctgaagttcagcagcagcggacaagcgcgtttatcgatgcggagcatgcgttagatccggtatacgcgcaaaagctcggtgttaacatcgaagagcttttactgtctcagcctgacacaggcgagcaggcgcttgaaattgcggaagcattggttcgaagcggggcagttgacattgtcgttgtcgactctgtagccgctctcgttccgaaagcggaaattgaaggcgacatgggagattcgcatgtcggtttacaagcacgcttaatgtctcaagcgcttcgtaagctttcaggggccattaacaaatcgaagacaatcgcgattttcattaaccaaattcgtgaaaaagtcggtgttatgttcgggaacccggaaacaacacctggcggccgtgcgttgaaattctattcttccgtgcgtcttgaagtgcgccgtgctgaacagctgaaacaaggcaacgacgtaatggggaacaaaacgaaaatcaaagtcgtgaaaaacaaggtggctccgccgttccgtacagccgaggttgacattatgtacggagaaggcatttcaaaagaaggcgaaatcattgatctaggaactgaacttgatatcgtgcaaaaaagcggttcatggtactcttatgaagaagagcgtcttggccaaggccgtgaaaatgcaaaacaattcctgaaagaaaataaagatatcatgctgatgatccaggagcaaattcgcgaacattacggcttggataataacggagtagtgcagcagcaagctgaagagacacaagaagaactcgaatttgaagaataa

SEQ ID NO: 5500 - protein, 347 aa, Bacillus subtilis
MSDRQAALDMALKQIEKQFGKGSIMKLGEKTDTRISTVPSGSLALDTALGIGGYPRGRIIEVYGPESSGKTTVALHAIAEVQQQRTSAFIDAEHALDPVYAQKLGVNIEELLLSQPDTGEQALEIAEALVRSGAVDIVVVDSVAALVPKAEIEGDMGDSHVGLQARLMSQALRKLSGAINKSKTIAIFINQIREKVGVMFGNPETTPGGRALKFYSSVRLEVRRAEQLKQGNDVMGNKTKIKVVKNKVAPPFRTAEVDIMYGEGISKEGEIIDLGTELDIVQKSGSWYSYEEERLGQGRENAKQFLKENKDIMLMIQEQIREHYGLDNNGVVQQQAEETQEELEFEE

SEQ ID NO: 5501 - DNA, 1044 bp, Bartonella henselae
  CDS (1)..(1044): transl_table=11
gtggataaaataaaagctctcgatgctgctctctcacaaattgaacgttccttcggtaaaggctcaattatgcgtcttgggcaaaaagagcaggttgttgaaattgaaacaataccaactggttcattatctttggatattgctttgggtgttggtggattaccaaaggggcgtattgttgaaatttatggaccagaaagttctggaaaaacaacattagctctccatgctattgctgaggcacagaaaaatggtggagtttgtgcttttattgatgcggaacatgctcttgatcctatttatgcgcgtaagcttggtgttgatttagaaaatttattcatttctcaaccagatacgggtgaacaggcgttagaaattacagaaacattggttcgttctggtgctgttgatgtgctcgttgttgattccgtagccgctttgacaccgcgtgcggaaattgatggtgaaatgggagatgctttgcctggattgcaagctcggttaatgagcaaagctttgcggaaactcactgcatcgattttccgctctaactgtatggtcatttttattaatcaaattcgtatgaaaattggggtgatgtttggttctcctgaaacgacaacgggcggaaatgctttaaagttttatgcttctgttcgtttggatattcgccgcattggctctattaaagatagggatatgatcgttggaaatcagacccgtgttaaagtggtcaaaaataagttggcacctccattcaaacaggttgagtttgatattatttatggtgaaggtatttccaaattaggtgagttgattgatttgggggtcaaagttggtactgtagaaaaatctggttcgtggttctcttataattctcaacgtttagggcagggacgagagaatgcgaagcagtttttacgcgaacatccagaaatagctacagagatcgaaacggctttgcgtcaaaatgctggtttaattgcaattgaattgttagaaaatgcaggatcagaaaatacagaaagtgatgaggtcatttga

SEQ ID NO: 5502 - protein, 347 aa, Bartonella henselae
MDKIKALDAALSQIERSFGKGSIMRLGQKEQVVEIETIPTGSLSLDIALGVGGLPKGRIVEIYGPESSGKTTLALHAIAEAQKNGGVCAFIDAEHALDPIYARKLGVDLENLFISQPDTGEQALEITETLVRSGAVDVLVVDSVAALTPRAEIDGEMGDALPGLQARLMSKALRKLTASIFRSNCMVIFINQIRMKIGVMFGSPETTTGGNALKFYASVRLDIRRIGSIKDRDMIVGNQTRVKVVKNKLAPPFKQVEFDIIYGEGISKLGELIDLGVKVGTVEKSGSWFSYNSQRLGQGRENAKQFLREHPEIATEIETALRQNAGLIAIELLENAGSENTESDEVI

SEQ ID NO: 5503 - DNA, 1044 bp, Bartonella quintana
  CDS (1)..(1044): transl_table=11
gtggataaaacaaaagctctcgatgctgctctctcacaaattgaacgttcttttggtaaaggctcaattatgcgtcttgggcaaaaagagcaggttgttgaaattgaaacaatcccaactggttcattatctttggatattgctttgggtgttggtggattaccgaaggggcgtattgttgaaatttatggaccagaaagttctggaaaaacaacattagctcttcatgctattgctgaagcacaaaaaaatggtggggtttgcgcttttattgatgcggagcacgctcttgatcctatttatgcgcgtaaacttggtgttgatttagagaacttgttcatttctcagccagataccggtgaacaggcattggaaattaccgagacacttgttcgttctggtgcggttgatgtactcgttgttgattccgtagccgctttgacgccgcgtgcggaaattgatggtgaaatgggtgatgctttgcccggattgcaagctcggttgatgagcaaagctttgcgaaaattaaccgcatcgattttccgctctaactgtatggtgatctttattaaccaaattcgtatgaaaattggggtgatgtttggttctcctgaaacgacaacaggcggaaacgctttaaagttttatgcttctgttcgtttggacattcgccgcgttggctccattaaagatcgggatatgattgttggtaatcagacacgtgttaaagtggtcaaaaataaattggcacctccatttaaacaggttgagtttgacattatttatggtgaaggtatttctaaattaggtgagttgattgatttgggtgtcaaagttggcattgtggaaaaatcaggttcgtggttctcttataattctcaacgtttaggacaagggcgagaaaatgcgaagcagtttttacgcgaacacgcagagatagcaacagagatcgaaacggctttgcgtcaaaatgctggtttgattgcgattgagttgttagaaaatgcaggatcagaaaatacagaaagcaatgaagcaatttga

SEQ ID NO: 5504 - protein, 347 aa, Bartonella quintana
MDKTKALDAALSQIERSFGKGSIMRLGQKEQVVEIETIPTGSLSLDIALGVGGLPKGRIVEIYGPESSGKTTLALHAIAEAQKNGGVCAFIDAEHALDPIYARKLGVDLENLFISQPDTGEQALEITETLVRSGAVDVLVVDSVAALTPRAEIDGEMGDALPGLQARLMSKALRKLTASIFRSNCMVIFINQIRMKIGVMFGSPETTTGGNALKFYASVRLDIRRVGSIKDRDMIVGNQTRVKVVKNKLAPPFKQVEFDIIYGEGISKLGELIDLGVKVGIVEKSGSWFSYNSQRLGQGRENAKQFLREHAEIATEIETALRQNAGLIAIELLENAGSENTESNEAI

SEQ ID NO: 5505 - DNA, 1134 bp, Bdellovibrio bacteriovorus
  CDS (1)..(1134): transl_table=11
atggcaaacgctactgtagacaacaaagcgaactcagaaaaaatcaaagctcttgaattggctgtttcgactatcgaaaagcaattcggtaaaggctccatcatgcgtttgggcgcgaacgaatctttggttaaagacgttgaagcgatcagcacgggtgcattgagcttggatatcgctttgggtatcggcggtcttcctaaaggtcgtatctgtgaaatctatggaccagagtcctctggtaaaacaactctgtgcttgtctgttatcgctcaagctcagaaaaagggcggcgttgtcgctttcgttgatgccgaacacgctttggatatcaactatgctcgtaaactgggtgtgaacacggaagatcttttgatctctcagccagacactggtgaacaagctttggaaatcactgaaacacttgttcgttccggcgcgattgacgtattggttgtcgactccgtagcagccttggttcctcgtgcagagatcgaaggtgacatgggtgattcccacgttggtttgcaggctcgtttgatgtcccaggctttgcgtaagctgactgcggcgatcaaccgttccaacactcttgttatctttattaaccaaatccgtatgaaaatcggtgttatgttcggtaaccctgaaacaactacgggtggtaacgctttgaaattctactcttctgttcgtttggatgtacgccgtgtgggcgcgatcaaaaacggtgaggacgtgactggtaaccgtactgcggtgaaagttgttaagaataaaatggcgcctccgttcaccaaagttgaattcgacttgatgtacggtgaaggtatctctgaagagggtgaccttctggatctggcagtgactgcgaacatggttgaaaaatccggtgcgtggttctctatcaatggtgagcgcatgggccaaggccgtgatgctgcgaagaacttcctgaaagagcacccagaatacatggttgaacttcgtaagaaaatccttgcagcaaacggtatcggcaaacttttggttgataccaacggcaacaacggtgaagaccacgaaggtacagagccagttgaaatcgaagcagaagatgctgctccgaaaaaaggcaaaaaaggcaaacactag

SEQ ID NO: 5506 - protein, 377 aa, Bdellovibrio bacteriovorus
MANATVDNKANSEKIKALELAVSTIEKQFGKGSIMRLGANESLVKDVEAISTGALSLDIALGIGGLPKGRICEIYGPESSGKTTLCLSVIAQAQKKGGVVAFVDAEHALDINYARKLGVNTEDLLISQPDTGEQALEITETLVRSGAIDVLVVDSVAALVPRAEIEGDMGDSHVGLQARLMSQALRKLTAAINRSNTLVIFINQIRMKIGVMFGNPETTTGGNALKFYSSVRLDVRRVGAIKNGEDVTGNRTAVKVVKNKMAPPFTKVEFDLMYGEGISEEGDLLDLAVTANMVEKSGAWFSINGERMGQGRDAAKNFLKEHPEYMVELRKKILAANGIGKLLVDTNGNNGEDHEGTEPVEIEAEDAAPKKGKKGKH

SEQ ID NO: 5507 - DNA, 1179 bp, Bifidobacterium breve
  CDS (1)..(1179): transl_table=11
atggcacttgagaccaagccggcccaagatccggcaaccgagatcaagcacgagctcgatcccaagcgcaaggcggcgctggacactgctttggcgcaggtcgaaaaaagcttcggcaagggctcggccatgcgcctcggcgatcagcccgtgcaaaatgtcgaagtaatccctaccggttcgctcgcgctcgacatggcgttgggcattggcggcctgccgaagggccgcatcgtggaaatctatggtcccgaatcgtccggtaaaaccacgcttgccctgcatgtggtggccaatgcccagaagaagggtggcgtggccgcctacattgacgccgagcacgcgctcgatccggcctatgctcgcaaacttggcgtggacactgattcgcttatcgtttctcagccggacaacggcgaacaggctcttgagattgcggacatgctgattcgttccggtgcgcttgatgtcatcgttatcgattcggtggcggctctggtgccaaaggccgagatcgaaggcgagatgggagacagccacgtcggtttgcaggcccgactcatgagccaggctctgcgcaagatgaccggtgccttggcccaagcaggtaccaccgccatcttcatcaaccagctacgcgaaaagatcggcgtgttcttcggtaatcccgaaaccactaccggtggcaaggctctgaagttctatgcctccgtgcgtcttgacattcgccgtatccagaccttgaagaacggtgatgaagcggtgggcaaccgtacgcgcgtcaaggtggtcaagaacaagatggccccgcctttcaagtccgccgaattcgacatgctttacggcgaaggtatctcccgcgaaggttcggtcatcgacatggcccaacaggtcggcgtggtcaagaagtccggctcgtggttcacctatgagggcgaccagcttggtcagggtcgagagaaggttcgtcagttcctcaaggacaacccggccatcaccgaagagattgaaaacaaggtcaaggcagaatttggtttgatcggttccgccgatcagtttgccgaagacgaagacgctgctgcagctgccgcagtcagcgaggccgccgcggccgatgccgccaaggacaccaaggccactgcagcgcctgccgccaagtcgtctcgcgccaaggcctga

SEQ ID NO: 5508 - protein, 392 aa, Bifidobacterium breve
MALETKPAQDPATEIKHELDPKRKAALDTALAQVEKSFGKGSAMRLGDQPVQNVEVIPTGSLALDMALGIGGLPKGRIVEIYGPESSGKTTLALHVVANAQKKGGVAAYIDAEHALDPAYARKLGVDTDSLIVSQPDNGEQALEIADMLIRSGALDVIVIDSVAALVPKAEIEGEMGDSHVGLQARLMSQALRKMTGALAQAGTTAIFINQLREKIGVFFGNPETTTGGKALKFYASVRLDIRRIQTLKNGDEAVGNRTRVKVVKNKMAPPFKSAEFDMLYGEGISREGSVIDMAQQVGVVKKSGSWFTYEGDQLGQGREKVRQFLKDNPAITEEIENKVKAEFGLIGSADQFAEDEDAAAAAAVSEAAAADAAKDTKATAAPAAKSSRAKA

SEQ ID NO: 5509 - DNA, 1194 bp, Bifidobacterium longum
  CDS (1)..(1194): transl_table=11
atggcacttgagaccaagccggccaaggacccggcagccgaggacaagcacgagctcgatcccaagcgcaaggcggcgctggacaccgcgctggcgcaggtcgagaagagttttggcaaaggttccgcaatgcgactgggcgaccagcccgagcagaacgtcgaggtgattcccaccggttcgttggctctcgatatggcactcggcatcggcggcctacccaagggccgcatcgtggagatctacggccccgaatcatccggtaagaccacgctcgcattgcatgtggtggccaatgcccagaagaagggcggcgtggcggcctacatcgatgccgaacacgcgctcgacccggcctacgcccgcaagctcggcgtggacaccgactcactcatcgtctcccagccggataacggcgagcaggccctcgaaatcgctgacatgctgattcgctccggtgcgcttgacgtcatcgtcatcgactcggtcgccgctttggtgccgaaggccgaaatcgaaggcgaaatgggagacagccatgttggtttgcaggcccgactcatgagtcaggcgctgcgcaagatgaccggcgcgttggctcaggccggcaccaccgccatcttcatcaaccagctgcgtgagaagatcggcgtgttcttcggcaaccctgaaaccaccaccggtggtaaagctctgaagttctacgcctccgtgcgtctcgacatccgccgcatccagaccttgaagaacggcgacgaagcggtgggcaaccgcacgcgcgtcaaggtggtcaagaacaagatggccccgcctttcaagtccgccgaattcgacatgctctacggtgaaggcatttcccgtgagggctcggtgatcgacatggcccagcaggttggcgtggtcaagaagtccggttcgtggttcacctatgagggtgatcagctcggtcagggacgagagaaggtccgtcagttccttaaggacaacccggccatcaccgaggagattgagaacaaggtcaaggccgagttcggtctgatcggttccgccgatcagttcgcggaagatggcgaagccgcagcagcggccgccgtcagcgaggctgctgcggctgacgtggccaaggacagcaaggccgcagcggcgcctgctgccaaaacgacccgtgccaaggccggcacagctaaggcctga

SEQ ID NO: 5510 - protein, 397 aa, Bifidobacterium longum
MALETKPAKDPAAEDKHELDPKRKAALDTALAQVEKSFGKGSAMRLGDQPEQNVEVIPTGSLALDMALGIGGLPKGRIVEIYGPESSGKTTLALHVVANAQKKGGVAAYIDAEHALDPAYARKLGVDTDSLIVSQPDNGEQALEIADMLIRSGALDVIVIDSVAALVPKAEIEGEMGDSHVGLQARLMSQALRKMTGALAQAGTTAIFINQLREKIGVFFGNPETTTGGKALKFYASVRLDIRRIQTLKNGDEAVGNRTRVKVVKNKMAPPFKSAEFDMLYGEGISREGSVIDMAQQVGVVKKSGSWFTYEGDQLGQGREKVRQFLKDNPAITEEIENKVKAEFGLIGSADQFAEDGEAAAAAAVSEAAAADVAKDSKAAAAPAAKTTRAKAGTAKA

SEQ ID NO: 5511 - DNA, 1062 bp, Bordetella bronchiseptica
  CDS (1)..(1062): transl_table=11
atggacgacaaaaccagcaaggccgccgcggccgagaaagccaaggcgctggccgccgcgctgtcgcagatcgaaaagcagttcggcaagggctcgatcatgcgctatggcgacaacgaggtcgaacacgacatccaggtcgtgtccaccggttcgctggggctggacatcgcgctgggcgtcggcggcctgccgcgcggccgcgtgatcgaggtctacggccccgagtcgtccggcaagaccacgctcacgctgcaggtcatcgccgaaatgcagaagctgggcggcacctgcgccttcgtcgacgccgaacacgcgctggacgtgcaatacgcctccaagctgggcgtcaacctgaccgacctgctgatctcccagccggacacgggcgagcaggccctcgagatcaccgacgcgctggtgcgctcgggctcggtcgacctgatcgtcatcgactcggtcgcggcgctggtgcccaaggccgaaatcgaaggcgagatgggcgactccctgccaggcctgcaggcccgcctgatgagccaggcgctgcgcaagctgacggccaccatcaagcgcaccaactgcatggtcatcttcatcaaccagatccgcatgaagatcggcgtgatgttcggcaaccccgaaaccaccaccggcggcaacgcgctcaagttctattcctcggtgcgcctggacatccgccgcatcggcgccatcaagaagggcgacgaggtggtcggcaacgaaacccgcgtcaaggtggtcaagaacaaggtggcgccgccgttcaagcaggccgagttcgacatcatgtatggcagcggcatctcgcgcgaaggcgaaatcatcgacctgggcgtgcaagccaatgtggtcgacaagtccggcgcctggtacagctacagcggcaaccgcatcggccagggcaaggacaatgtgcgcgagtacctgaaagagcacaaggaaatggccatcgagatcgaaaacaaggtgcgcgagaaccagggcatagtcagccgcgccgccacctttccggccagcgaagccgaagacggcgaataa

SEQ ID NO: 5512 - protein, 353 aa, Bordetella bronchiseptica
MDDKTSKAAAAEKAKALAAALSQIEKQFGKGSIMRYGDNEVEHDIQVVSTGSLGLDIALGVGGLPRGRVIEVYGPESSGKTTLTLQVIAEMQKLGGTCAFVDAEHALDVQYASKLGVNLTDLLISQPDTGEQALEITDALVRSGSVDLIVIDSVAALVPKAEIEGEMGDSLPGLQARLMSQALRKLTATIKRTNCMVIFINQIRMKIGVMFGNPETTTGGNALKFYSSVRLDIRRIGAIKKGDEVVGNETRVKVVKNKVAPPFKQAEFDIMYGSGISREGEIIDLGVQANVVDKSGAWYSYSGNRIGQGKDNVREYLKEHKEMAIEIENKVRENQGIVSRAATFPASEAEDGE

SEQ ID NO: 5513 - DNA, 1089 bp, Bradyrhizobium japonicum
  CDS (1)..(1089): transl_table=11
atgtccgcaactgccctgcgtatcgtcgaaggatcttccatggacaagagtaaagctctggccgccgcgctctcccagatcgagcgccagttcggcaagggctcggtgatgaagctcggcaagaacgaccggtcgatggatgtcgaggcggtgtcctccggttctctcgggctcgacattgcactggggatcggcggtctgcccaaggggcgcgtcgtggaaatctacgggccggaatcctcgggcaagaccacgctggcgctgcacacggtggcggaagcgcagaagaagggcggcatctgtgccttcatcgacgccgagcacgcgctcgacccggtctatgcacgcaagctcggggtcaatatcgacgagctgctgatttcgcagccggacaccggcgagcaggcgctggaaatctgcgacacgctggtgcgctcgggtgcggtggacgttctggtggtcgattcggtcgcggcgctggtgccgaaggccgaactcgagggcgagatgggcgatgcgctgccgggtctccaggcccgcctgatgagccaggcgctgcgcaagctgacggcctccatcaacaagtcccacaccatggtgatcttcatcaaccagatccgcatgaagatcggtgtgatgtatggctcaccggagaccaccaccggcggcaacgcgctgaagttctacgcctccgtccgcctcgacatccgccgcatcggcgcgatcaaggagcgcgacgaagtggtcggcaacaccacgcgcgtcaaggtggtgaagaacaagctggcgccgcccttcaagcaggtcgagttcgacatcatgtacggcgagggcgtttccaagatgggcgagatcctcgatctcggcgtcaaggccggcatcgtcgaaaagtccggcgcctggttctcctatgacagccagcgcctcggccagggccgcgagaactcgaaagcgttcctgaaggccaaccccgacatcaccgccaagatcgagaccgcgatccgccagaactccggcctgatcgccgagcagattctggccggcacccctgagcgcgacgccgacggcgaggagccggcggacgagtaa

SEQ ID NO: 5514 - protein, 362 aa, Bradyrhizobium japonicum
MSATALRIVEGSSMDKSKALAAALSQIERQFGKGSVMKLGKNDRSMDVEAVSSGSLGLDIALGIGGLPKGRVVEIYGPESSGKTTLALHTVAEAQKKGGICAFIDAEHALDPVYARKLGVNIDELLISQPDTGEQALEICDTLVRSGAVDVLVVDSVAALVPKAELEGEMGDALPGLQARLMSQALRKLTASINKSHTMVIFINQIRMKIGVMYGSPETTTGGNALKFYASVRLDIRRIGAIKERDEVVGNTTRVKVVKNKLAPPFKQVEFDIMYGEGVSKMGEILDLGVKAGIVEKSGAWFSYDSQRLGQGRENSKAFLKANPDITAKIETAIRQNSGLIAEQILAGTPERDADGEEPADE

SEQ ID NO: 5515 - DNA, 1044 bp, Burkholderia cepacia
  CDS (1)..(1044): transl_table=11
atgaccgccgagaagagcaaggcgctggcggccgcgctcgcgcagatcgaaaagcagttcggcaagggctcgatcatgcggatgggcgacggcgaagcggccgaggatatccaggtcgtctccacggggtcgctgggtctcgacatcgcgctgggcgtcggcggcttgccgcgcggccgggtggtcgagatctacggtccggaatcgtccggtaagaccacgctcacgctgcaggtcatcgccgagctgcagaaactgggcggcaccgcggcgttcatcgacgccgagcacgcgctcgacgttcaatatgccgcgaagctcggcgtgaacgtgccggagctgctgatctcgcagccggacaccggcgagcaggccctcgaaatcaccgatgcgctggtgcgctcgggctcgatcgacatgatcgtcatcgactcggtcgcggcgctcgtgccgaaggccgaaatcgaaggcgagatgggcgattcgctgccgggtctgcaggcccgcctgatgtcgcaggcgctgcgcaagctgaccggcacgatcaagcgcacgaactgcctcgtgatcttcatcaaccagatccggatgaagatcggcgtgatgttcggcaacccggaaaccacgacgggcggtaacgcactgaagttctactcgtcggtgcgtctcgatatccgccggatcggctcgatcaagaagaacgacgaggtgatcggcaacgaaacccgcgtgaaggtcgtcaagaacaaggtgtcgccgccgttccgcgaagcgatcttcgacatcctgtacggcgaaggcatttcgcgtcagggcgagatcatcgatctcggcgtgcaggcgaagatcgtcgacaaggcgggcgcctggtacagctacaacggcgagaagatcggccagggcaaggacaacgcgcgtgaattcctgcgcgaaaatccggaaatcgcgcgcgagatcgagaaccgcatccgcgaatcgctcggcgtcgtcgcaatgcccgatggcgcaggcaacgaagccgaggcgatggacgaagaagagtga

SEQ ID NO: 5516 - protein, 347 aa, Burkholderia cepacia
MTAEKSKALAAALAQIEKQFGKGSIMRMGDGEAAEDIQVVSTGSLGLDIALGVGGLPRGRVVEIYGPESSGKTTLTLQVIAELQKLGGTAAFIDAEHALDVQYAAKLGVNVPELLISQPDTGEQALEITDALVRSGSIDMIVIDSVAALVPKAEIEGEMGDSLPGLQARLMSQALRKLTGTIKRTNCLVIFINQIRMKIGVMFGNPETTTGGNALKFYSSVRLDIRRIGSIKKNDEVIGNETRVKVVKNKVSPPFREAIFDILYGEGISRQGEIIDLGVQAKIVDKAGAWYSYNGEKIGQGKDNAREFLRENPEIAREIENRIRESLGVVAMPDGAGNEAEAMDEEE

SEQ ID NO: 5517 - DNA, 1071 bp, Burkholderia mallei
  CDS (1)..(1071): transl_table=11
atggaagaaagcaagaaaggctccgggctgactgccgaaaagagcaaggcgctcgccgccgcgctcgcgcagatcgagaagcagttcggcaaagggtcgatcatgcggctcggcgacggcgaggcggtcgaggatatccaggtggtgtccacgggctcgctcggtctcgatatcgcgctcggcgtcggtggcttgccgcgcggccgtgtggtcgaaatctacgggccggaatcgtccggcaagacgacgctcacgctgcaggtgatcgccgagatgcagaagctcggcggcacggcggcgttcatcgacgcggagcacgcgctcgacgtccagtatgcgtcgaagctcggcgtgaacgtgccggagctgctgatctcgcagccggacacgggtgagcaggcgctcgaaatcgtcgacgcgctggtccgctcgggctcgatcgacatgatcgtcatcgactcggtcgcggcgctcgtgccgaaggccgaaatcgaaggcgagatgggcgacgcgctgcccggcctgcaggcccgcctgatgtcgcaggcgctgcgcaagctgacgggcacgatcaagcgcacgaactgcctcgtgatcttcatcaaccagatccggatgaagatcggcgtgatgttcggcaacccggaaaccacgacgggcggcaacgcgctgaagttctactcgtcagtgcgtctcgacattcgccggatcggctcgatcaagaagaacgacgaggtgatcggcaacgaaacgcgcgtgaaggtcgtcaagaacaaggtgtcgccgccgttccgcgaagcgatcttcgacatcctgtacggcgaaggcatttcgcgccagggcgagatcatcgatctcggcgtgcaggcgaagatcgtcgacaaggcgggcgcgtggtacagctatagcggcgagaagatcggccagggcaaggacaacgcgcgcgaattcctgcgcgaaaatccggaaatcgcgcgcgagatcgagaatcgcattcgcgagtcgctcggagtcgccgcgatgccgcagggcgccggttccgaggccgagatcatggacgaagaggagtaa

SEQ ID NO: 5518 - protein, 356 aa, Burkholderia mallei
MEESKKGSGLTAEKSKALAAALAQIEKQFGKGSIMRLGDGEAVEDIQVVSTGSLGLDIALGVGGLPRGRVVEIYGPESSGKTTLTLQVIAEMQKLGGTAAFIDAEHALDVQYASKLGVNVPELLISQPDTGEQALEIVDALVRSGSIDMIVIDSVAALVPKAEIEGEMGDALPGLQARLMSQALRKLTGTIKRTNCLVIFINQIRMKIGVMFGNPETTTGGNALKFYSSVRLDIRRIGSIKKNDEVIGNETRVKVVKNKVSPPFREAIFDILYGEGISRQGEIIDLGVQAKIVDKAGAWYSYSGEKIGQGKDNAREFLRENPEIAREIENRIRESLGVAAMPQGAGSEAEIMDEEE

SEQ ID NO: 5519 - DNA, 1047 bp, Burkholderia sp
  CDS (1)..(1047): transl_table=11
atgaccgccgagaagagcaaggcgctggccgccgcgcttgcccagatcgaaaagcagttcggcaagggctcgatcatgcgcatgggcgacggcgaggcgaccgagaacatccaggtcgtgtccacgggctcgctcggtctcgatatcgcgctcggcgtcggcggcctgccgcgcggccgggtggtcgaaatctacggtccggaatcgtccggtaaaaccacgctcacgctgcaggtcattgccgaactgcagaagatcggcggcaccgcagcgttcatcgacgccgagcacgcgctcgacgttcaatatgcagcgaagctcggcgtgaacgtgccggagctgctgatctcgcagccggacaccggcgagcaggcgcttgaaatcaccgacgcgctggtgcgctcgggctcgatcgacatgatcgtcatcgactcggtcgcggcgctcgtgccgaaggccgaaatcgaaggcgagatgggcgattcgttgccgggcctgcaggcccgcctgatgtcgcaggcgctgcgcaagctgaccggcacgatcaagcgcacgaactgcctggtgatcttcatcaaccagatccggatgaagatcggcgtgatgttcggcaacccggaaaccacgacgggcggtaacgcgctgaagttctactcgtcggtgcgtctcgacattcgccggatcggctcgatcaagaagaacgacgaggtgatcggcaacgaaacccgcgtgaaggtcgtcaagaacaaggtgtcgccgccgttccgcgaagcgatcttcgacatcctgtatggcgaaggcatttcgcgtcagggcgagatcatcgatctcggcgtgcaggcgaagatcgtcgacaaggcgggcgcttggtacagctacaacggcgagaagatcggccagggcaaggacaacgcgcgtgaattcttgcgcgagaatccggaaatcgcacgcgagatcgagaaccgcattcgcgaatcgcttggcgtggtcgccatgcctgatggtgcaggccaggacgaagccgaggcgatggacgaagaagagtga

SEQ ID NO: 5520 - protein, 348 aa, Burkholderia sp
MTAEKSKALAAALAQIEKQFGKGSIMRMGDGEATENIQVVSTGSLGLDIALGVGGLPRGRVVEIYGPESSGKTTLTLQVIAELQKIGGTAAFIDAEHALDVQYAAKLGVNVPELLISQPDTGEQALEITDALVRSGSIDMIVIDSVAALVPKAEIEGEMGDSLPGLQARLMSQALRKLTGTIKRTNCLVIFINQIRMKIGVMFGNPETTTGGNALKFYSSVRLDIRRIGSIKKNDEVIGNETRVKVVKNKVSPPFREAIFDILYGEGISRQGEIIDLGVQAKIVDKAGAWYSYNGEKIGQGKDNAREFLRENPEIAREIENRIRESLGVVAMPDGAGQDEAEAMDEEE

SEQ ID NO: 5521 - DNA, 1038 bp, Campylobacter fetus
  CDS (1)..(1038): transl_table=11
atggatgataataagaaaaaaagcctagaccttgctttaaagcagattgataaagcttttggcaaaggcactgttttaaggctaggagacaaggaaatagagccgatagattctatctcctcaggatcgataggacttgatatagctcttggtataggcggcgtaccaaaaggaagaatagtcgaaatttatgggccagaaagctctggtaaaacaactcttactttgcatttaatagcagaatctcaaaaagtcggcggagtttgcgcgtttgtagatgcagagcatgcacttgatgttaaatatgctaaaaatttaggcgttgatacggataacttatatatttctcaaccggacttcggagagcaagctcttgatatagtagaaactctagctagaagcggcgccgttgatcttatagtaatagatagcgtagcagctttaacaccaaaaagcgaaatagaaggcgatatgggagatcagcacgtagggctgcaagcaagactcatgagtcaagcacttagaaaattaaccggagttgtccataaaatgggaactacagttgtatttataaaccaaattcgtatgaaaatcggcgctatgggctatggcactcctgaaactactactggcggaaatgcgcttaaattttacgcttcagttagacttgacgtacgtaaaatagctactttaaaacagagcgatgagccaatcggaaaccgcgtaaaagtaaaagtagtaaaaaacaaagtcgctcctccttttagacaagccgaatttgatatcatgtttggagaaggtatcagcaaagaaggagagataatagattacggcgtaaaacttgatattatcgataaaagcggcgcttggtttagctatgataattcaaaattaggtcaaggcagagaaaactcaaaagcgtttttaaaagaaaataaagcaatagcagatgaaataacagaaaaaatccgtgcaaatatgggtgatagcataatgagcggtgcagtagatgaagaagaaatggaaggagacgagtaa

SEQ ID NO: 5522 - protein, 345 aa, Campylobacter fetus
MDDNKKKSLDLALKQIDKAFGKGTVLRLGDKEIEPIDSISSGSIGLDIALGIGGVPKGRIVEIYGPESSGKTTLTLHLIAESQKVGGVCAFVDAEHALDVKYAKNLGVDTDNLYISQPDFGEQALDIVETLARSGAVDLIVIDSVAALTPKSEIEGDMGDQHVGLQARLMSQALRKLTGVVHKMGTTVVFINQIRMKIGAMGYGTPETTTGGNALKFYASVRLDVRKIATLKQSDEPIGNRVKVKVVKNKVAPPFRQAEFDIMFGEGISKEGEIIDYGVKLDIIDKSGAWFSYDNSKLGQGRENSKAFLKENKAIADEITEKIRANMGDSIMSGAVDEEEMEGDE

SEQ ID NO: 5523 - DNA, 1071 bp, Caulobacter crescentus
  CDS (1)..(1071): transl_table=11
atgacaagtcaggcggctttgaaactcgtggccaaggaagaaggcgataagcaacgcgcgctagaggcggctctcgcccagatcgaccgcgcgttcggcaagggctcggtgatgaagctgggcgagaagggcaaggtcgagatcgagtcggtctccaccgggtcgctcggcctcgacatcgcgctgggcatcggcggcctgcccaagggccggatcgtcgaggtctatggtccggaaagctcgggcaagaccaccctggccctgcacgtcgtggccgaggtccagaaggccggcggcaccgccgccttcgtcgacgccgagcatgcgctcgatccgtcctacgcctacaagctgggcgtcaatctcgataatctcctggtctctcagcccgacaacggcgaacaggccctggagatcaccgacaccctggtgcgctcgggcgccgtcgacatcgtggtcgtcgactcggtggcggccctgacgcccaaggccgaaatcgaaggcgagatgggcgacagcctgccgggtcttcaggcccgtctgatgagccaggcgctgcgcaagctgacggcctcgatcaacaaggccaacaccatcgtcatcttcatcaaccagatccgtcacaagatcggggtgatgtacggcagccccgaaacgaccacgggcggcaacgcgctgaagttctacgcttcagtgcgcctggatatccgccgcaccggctcggtgaaggcgcgtgacgagatcgtcggcaacaatgtccgcgtgaaggtggtcaagaacaaggtggccccgccgttccgcgaggtcgagttcgacatcatgtacggcgagggcatctccaagctgggcgaagtcatcgacctaggcgtcaaagccgggatcatcgacaaggccggctcgtggttctcgtacggcagccagcggatcggccagggccgcgacaatgtccgcgagttcctgaagaacaacccggacgtcgccgccgacatcgaaaaggctgtccgcaagtcgtcgcagaagatcgaagaagagcttctggtcggcggcccggaagagggcgaagaggactag

SEQ ID NO: 5524 - protein, 356 aa, Caulobacter crescentus
MTSQAALKLVAKEEGDKQRALEAALAQIDRAFGKGSVMKLGEKGKVEIESVSTGSLGLDIALGIGGLPKGRIVEVYGPESSGKTTLALHVVAEVQKAGGTAAFVDAEHALDPSYAYKLGVNLDNLLVSQPDNGEQALEITDTLVRSGAVDIVVVDSVAALTPKAEIEGEMGDSLPGLQARLMSQALRKLTASINKANTIVIFINQIRHKIGVMYGSPETTTGGNALKFYASVRLDIRRTGSVKARDEIVGNNVRVKVVKNKVAPPFREVEFDIMYGEGISKLGEVIDLGVKAGIIDKAGSWFSYGSQRIGQGRDNVREFLKNNPDVAADIEKAVRKSSQKIEEELLVGGPEEGEED

SEQ ID NO: 5525 - DNA, 1050 bp, Chlamydophila abortus
  CDS (1)..(1050): transl_table=11
atgaatgtacctgatcgtaaaaaagcactagaagcagcaattgcctatattgaaaaacaatttggctctggatctatcatgagtctagggaaacactccgcatctcatgagatctctactataaaaacaggggccttatctttagatttagcattaggcatcggaggtgttccaaaaggcagaatcgttgagatctttggccctgaatcttcagggaaaacgacgctcgccactcacatcgtggccaatgcgcaaaaaatggggggtgtggctgcttatatcgatgcagaacacgctttagatcccagttacgcttccctgataggagcgaatatccatgatcttatgatctcccaacccgattgtggtgaggatgccttaagcatagcggaattactcgcaagatcaggagctgttgatgttatcgtcatagactctgtagccgctttggttcctaaaagtgaactcgaaggcgatattggtgatgtacatgtaggcttacaagcccgtatgatgtctcaagcattacgtaagctgacagcaacattagcacgtagtcaaacctgtgcgatattcattaaccaaatccgagagaaaataggtgtaagttttggtaatcccgaaacaacaacaggcggacgcgctttaaaattctactcatcaatacgtatagatattcgtcgtataggagcaatcaaaggtaatgaaagcttcgatcttgggaaccggataaaagtcaaagtggctaaaaataaactcgcccctccattcaaaacagcagaatttgatattctctttaacgaaggtatttcttccgcaggatgcattttagatctggctgtagaacataatatcgtagagaaaaagggatcttggtttaactatcaagatcgtaaattaggacaaggaagagaagctgttcgtgaagaactcaagaaaaataagaaattactcgaagaattagaaaaacgtattcttgaagtgactgcttcaccaaaaactattgttgaagagaagaaagaagagcttgctatgcaacctgtagcttaa

SEQ ID NO: 5526 - protein, 349 aa, Chlamydophila abortus
MNVPDRKKALEAAIAYIEKQFGSGSIMSLGKHSASHEISTIKTGALSLDLALGIGGVPKGRIVEIFGPESSGKTTLATHIVANAQKMGGVAAYIDAEHALDPSYASLIGANIHDLMISQPDCGEDALSIAELLARSGAVDVIVIDSVAALVPKSELEGDIGDVHVGLQARMMSQALRKLTATLARSQTCAIFINQIREKIGVSFGNPETTTGGRALKFYSSIRIDIRRIGAIKGNESFDLGNRIKVKVAKNKLAPPFKTAEFDILFNEGISSAGCILDLAVEHNIVEKKGSWFNYQDRKLGQGREAVREELKKNKKLLEELEKRILEVTASPKTIVEEKKEELAMQPVA

SEQ ID NO: 5527 - DNA, 1053 bp, Chlamydophila caviae
  CDS (1)..(1053): transl_table=11
atgaatgtacctgatcgtaaaaaagcactagaagcagcaattgcctatatcgaaaaacaatttggcgctggatctatcatgagtctagggaaacactccgctactcatgaaatctcaactataaaaacaggagccttgtctttagatttagctttaggtattgggggtgttccaaaaggacgtattgttgaaatttttggtcctgaatcttcggggaaaactacactagctacccatattgttgccaacgcccaaaagatgggcggtgtcgctgcatatatcgatgcagaacacgctttagatcccggctatgcttctcttataggtgcgaatatcaatgatcttatgatctcccagcccgactgtggtgaagatgctttaagcattgccgaactattagcaagatcaggggctgttgatgttatcgttattgactctgtagctgctttggttcctaaaagcgaactcgaaggggatatcggtgatgtacacgtaggcctacaagcacggatgatgtctcaggcattacgcaaacttacagcaacattagcacgtagccaaacctgcgcgatattcatcaaccaaattcgtgaaaagataggtgttagcttcggtaatcctgaaacaacaaccggtggacgcgcgttaaaattctactcatccatacgcatggatatccgtcgtattggagctatcaaagggaatgaaagttttgatcttggaaaccgcatcaaagtaaaagttgctaaaaacaaattagcacctccattcagaactgcagaattcgatattctctttaatgaggggatttcttcagcaggatgcatcttagacctcgctgtagaacataatatcgtggaaaaaaaaggctcttggttcaactaccaagatcgtaaattaggccaaggaagagaagctgttcgtgaagaacttaagaaaaataagaaattatttgatgagttagaaaaacgtatctatgacatctcttctgcatcaaaagtagtcgctgtagaagagaagaaagaagagctaaaagcgcagcccgtagcttag

SEQ ID NO: 5528 - protein, 350 aa, Chlamydophila caviae
MNVPDRKKALEAAIAYIEKQFGAGSIMSLGKHSATHEISTIKTGALSLDLALGIGGVPKGRIVEIFGPESSGKTTLATHIVANAQKMGGVAAYIDAEHALDPGYASLIGANINDLMISQPDCGEDALSIAELLARSGAVDVIVIDSVAALVPKSELEGDIGDVHVGLQARMMSQALRKLTATLARSQTCAIFINQIREKIGVSFGNPETTTGGRALKFYSSIRMDIRRIGAIKGNESFDLGNRIKVKVAKNKLAPPFRTAEFDILFNEGISSAGCILDLAVEHNIVEKKGSWFNYQDRKLGQGREAVREELKKNKKLFDELEKRIYDISSASKVVAVEEKKEELKAQPVA

SEQ ID NO: 5529 - DNA, 1065 bp, Chlamydia muridarum
  CDS (1)..(1065): transl_table=11
atgagcgttcccgacagaaaaagggctttggaagctgccattgcttacatcgagaagcaatttggcgcaggatctatcatgagtttagggaagcattcttctgctcatgagatatcaactattaaaactggcgcattgtcgttagatttagctctgggaataggaggagttcctaaaggaagaattatagagatttttggcccagagtcttcagggaaaacgactctagcaacgcatatcgtggctaatgcccaaaaaatggggggtgtggcagcttatattgatgctgagcacgccttagatcctaattatgctgcgctaattggtgctaatattaatgatttaatgatctcccagcccgattgtggagaggatgctttgagtattgcagagcttctggctcgatcgggagctgttgatgtcatcgttatcgattcggtggcagccttggttccaaagagcgaattggaaggagaaattggagatgtgcatgtgggtttacaagcacgcatgatgtctcaggctttacgaaaattaacggcgacgttggcacgaacgaacacttgtgcgatttttattaaccaaattcgagagaagataggtgttagcttcgggaatcctgagaccacaacaggggggcgggcacttaaattttactcttctattcgtatggatattcgtcgtatcggtgctatcaaaggaggcgaaaacttcgatataggaaaccgaattaaggtgaaggtcgcaaaaaataaattagctcctccatttcgaactgctgaatttgatattttgttcaatgaagggatttcttctgcgggatgcattattgaccttgctgtagaaaaaaacattattgataagaaaggatcttggttcaattaccaagatcgtaagttgggtcaaggccgagaggctgtgcgcgaagagctgaaaaggaataaagagttattccaagagttagagcgccgtatttatgagtctgtacaagcttcctcatcacaggcgctagcatctgcttgcttggaccaggaggctcgagaagtagcagaagcagcgaaataa

SEQ ID NO: 5530 - protein, 354 aa, Chlamydia muridarum
MSVPDRKRALEAAIAYIEKQFGAGSIMSLGKHSSAHEISTIKTGALSLDLALGIGGVPKGRIIEIFGPESSGKTTLATHIVANAQKMGGVAAYIDAEHALDPNYAALIGANINDLMISQPDCGEDALSIAELLARSGAVDVIVIDSVAALVPKSELEGEIGDVHVGLQARMMSQALRKLTATLARTNTCAIFINQIREKIGVSFGNPETTTGGRALKFYSSIRMDIRRIGAIKGGENFDIGNRIKVKVAKNKLAPPFRTAEFDILFNEGISSAGCIIDLAVEKNIIDKKGSWFNYQDRKLGQGREAVREELKRNKELFQELERRIYESVQASSSQALASACLDQEAREVAEAAK

SEQ ID NO: 5531 - DNA, 1062 bp, Chlamydia pneumoniae
  CDS (1)..(1062): transl_table=11
atgaatttacctgatagaaaaaaggctctagaagctgctgttgcttatattgaaaagcaattcggcgctgggtccatcatgagtttaggaagacactctgccacacatgaaatctccaccatcaaaacaggagctttatctttagacttagctcttggaattcatggggtccccaaaggacgggtgatcgaaatctttggtcctgaatcctcagggaaaacgacactagctacccatattgtcgcgaatgctcaaaaaatgggcggtgttgctgcctatatagatgctgaacatgctttagatcctagttatgcatctcttattggcgtcaatatcgatgatcttatgatttctcaacccgactgtggtgaagatgcattaagcatagcagaattgctcgcgcgttcaggagctgtcgatgttatcgttattgactctgtagccgctttagttcctaaaagcgaactcgaaggagacatcggtgatgtacacgtaggcctacaagctcgtatgatgtctcaagcattacgcaagctcaccgctaccctatcacgtagccaaacctgtgcagtgttcattaaccaaatccgagagaaaatcggtgttagcttcggaaacccagaaactactacgggaggacgtgccttaaaattctactcttcaatacgattagatattcgccgtataggttcaataaaaggcagtgataactctgacatcggaaatcgaattaaagtgaaggtagctaaaaataaacttgctcctccattcagaatcgcagaatttgacatcctattcaatgaagggatttcttctgcaggttgtatcctagatcttgctgtcgaatataatattattgagaaaaaaggttcttggttcaactatcaagagaagaagttaggacagggaagagaatttgttcgtgaagaacttaaacgtaatagaaagctttttgaggaaattgagaagcgcatctacgatgtaattgcagcgaataaaactccctctgttcatgctaatgaaacacctcaggaagttcctgctcaaacagtagaagcttaa

SEQ ID NO: 5532 - protein, 353 aa, Chlamydia pneumoniae
MNLPDRKKALEAAVAYIEKQFGAGSIMSLGRHSATHEISTIKTGALSLDLALGIHGVPKGRVIEIFGPESSGKTTLATHIVANAQKMGGVAAYIDAEHALDPSYASLIGVNIDDLMISQPDCGEDALSIAELLARSGAVDVIVIDSVAALVPKSELEGDIGDVHVGLQARMMSQALRKLTATLSRSQTCAVFINQIREKIGVSFGNPETTTGGRALKFYSSIRLDIRRIGSIKGSDNSDIGNRIKVKVAKNKLAPPFRIAEFDILFNEGISSAGCILDLAVEYNIIEKKGSWFNYQEKKLGQGREFVREELKRNRKLFEEIEKRIYDVIAANKTPSVHANETPQEVPAQTVEA

SEQ ID NO: 5533 - DNA, 1041 bp, Chlorobium tepidum
  CDS (1)..(1041): transl_table=11
atggaaaaagaggcaacaccgcagcaacagccgccggtcgtcgatccggccaggctcaaacagctcaatcttgcgatagagacacttgaaaagcagttcggcaaaggtgcaatcatgcgtcttggcgacgactcggcggtcatgcacgtgcaggtgatttccaccggttcgatggcgctcgactacgcccttggcgtgggcggcttgccgcgaggccgcgtgaccgagatttacggccccgaatcctctggcaagaccacgctcgccctgcacgccatcgccgaggcacagaaaaacggcggtattgcggcgctggtcgatgcggagcacgctttcgatccgacctacgcccggaagctcggcgtcgatatcaatgcgctgctggtcagccagcccgaatcgggcgagcaggcgctctccatcgtcgagacgcttgtgcgcagcggtgcggttgacatcatcgttatcgactcggtggcggcgctggtgccgcaggccgaactcgaaggcgagatgggcgacagcgtggttggccttcaggcccgcctcatgagccaggcgttgcgcaagctcaccggggcgatctccaagtcgagcagcgtctgcctcttcatcaaccagcttcgcgacaagatcggcgtgatgtacggcagccccgaaaccaccaccggcggcaaggcgctgaagttctactcgtcagtccggctcgatatccgcaagattgcgcagatcaaggatggcgaagagttggttggcaaccgaaccaaggtcaaggtggtcaagaacaaggtcgctccgcccttcaagaccgccgagttcgacattctctatggtgaaggcatttcggtgctgggtgagctgatcgacctggctgtcgagttcggcatcatcaagaaatctggcgcgtggttcagttatggcactgaaaagctcggtcaggggcgcgagaacgtcaagaagctgctgaaggaggatgagaccctgcgcaatacgatccgccagcaggttcgcgacatgctcaccggagcgccaaccgcataa

SEQ ID NO: 5534 - protein, 346 aa, Chlorobium tepidum
MEKEATPQQQPPVVDPARLKQLNLAIETLEKQFGKGAIMRLGDDSAVMHVQVISTGSMALDYALGVGGLPRGRVTEIYGPESSGKTTLALHAIAEAQKNGGIAALVDAEHAFDPTYARKLGVDINALLVSQPESGEQALSIVETLVRSGAVDIIVIDSVAALVPQAELEGEMGDSVVGLQARLMSQALRKLTGAISKSSSVCLFINQLRDKIGVMYGSPETTTGGKALKFYSSVRLDIRKIAQIKDGEELVGNRTKVKVVKNKVAPPFKTAEFDILYGEGISVLGELIDLAVEFGIIKKSGAWFSYGTEKLGQGRENVKKLLKEDETLRNTIRQQVRDMLTGAPTA

SEQ ID NO: 5535 - DNA, 1059 bp, Chlamydia trachomatis
  CDS (1)..(1059): transl_table=11
atgagcgttcccgaccgaaaaagggctttggaagcggccattgcttatatcgaaaagcaatttggcgcaggatctatcatgagtttaggaaagcattcttcagctcatgagatatcaactattaaaacaggtgcattgtcgttggatttagccttaggaataggcggggttcctaaaggaagaattgtagagatttttgggccagagtcttcagggaaaacaactctagcgacgcatatagtggccaatgctcaaaagatgggcggggtagcagcttatatcgatgccgagcacgctttggatcctaattatgctgcgcttattggagcaaatattaatgatttaatgatttctcagcctgactgtggagaggatgctttgagtattgcagagctcttagcacgttctggagctgtcgatgtgattgtgattgactcggtagcagcattggttccaaagagcgagttagaaggggaaattggagatgtccatgttgggttgcaggctcgcatgatgtcgcaggctttacgcaaattgactgcaaccttagcacgaacaaatacttgtgccattttcattaaccagattcgggagaaaataggtgtgagttttggtaatccagagactacgactggaggacgtgcgttgaagttttattcttcgattcgtatcgatattcgtcgtattggctctataaagggaggagaaaatttcgatatagggaatcgtatcaaggtgaaagtagcgaaaaataaattagctcctccattccgaacggcagaatttgatatcttatttaatgaagggatttcttctgcaggatgtattatcgatctcgctgtcgaaaaaaacattatcgataagaaaggatcatggttcaactaccaggatcgtaagttaggtcaaggtcgagaagcggttcgagaggagttgaaaaggaacaaagagttgttccacgagttggaacgccgtatttatgagtctgtacaggcttcacaagtcccagcagcagcttgcgtggatgcagagtctcgcgaggtagcagaggctgcgaaatag

SEQ ID NO: 5536 - protein, 352 aa, Chlamydia trachomatis
MSVPDRKRALEAAIAYIEKQFGAGSIMSLGKHSSAHEISTIKTGALSLDLALGIGGVPKGRIVEIFGPESSGKTTLATHIVANAQKMGGVAAYIDAEHALDPNYAALIGANINDLMISQPDCGEDALSIAELLARSGAVDVIVIDSVAALVPKSELEGEIGDVHVGLQARMMSQALRKLTATLARTNTCAIFINQIREKIGVSFGNPETTTGGRALKFYSSIRIDIRRIGSIKGGENFDIGNRIKVKVAKNKLAPPFRTAEFDILFNEGISSAGCIIDLAVEKNIIDKKGSWFNYQDRKLGQGREAVREELKRNKELFHELERRIYESVQASQVPAAACVDAESREVAEAAK

SEQ ID NO: 5537 - DNA, 1044 bp, Chromatium vinosum
  CDS (1)..(1044): transl_table=11
atggacgagaaccgaaagaaggcgttggccgccgcgttgacccagatcgaaaagcagttcggcaaaggctcggtcatgcgcatgggcgatgtcggcgccgtgcgcaacatcgaggcgatctcgaccggttcgctcgggctggatctggcgctcggcatcggcggcgtgcccaagggccgtgtcatcgagatctacggccccgagtcctcgggcaagaccacgctgacgctgcatatcatcgccgaatcgcagaaactcggcggcacagccgctttcgtcgatgccgagcacgcgctcgatccggtctatgccgaaaagctcggcgtgaacatgaccgatctgctggtctcccagcccgataccggcgagcaggcgctggagatcaccgacatgctggtgcgttccggtgcggtcgatgtcgtggtcgtcgattcggttgccgcgctcacgcccaaggctgagatcgagggcgagatgggcgactcgcacgtcggcctgcaagcgcgcctcatgtcccaggcgttgcgcaagctcaccggcaacatcaagcgctccaactgctgcgtcatcttcatcaaccagatccggatgaagatcggggtgatgttcggctcgccggagaccacgaccggcggcaatgcgctcaaattctatgcctcggtgcggctcgacatccgtcgtaccggggctatcaagaaaggcgatgaggtcatcggcaacgagaccaaggtcaaggtggtcaagaacaaggtcgcaccgcccttccggcaggccgagttcgacatcctatatggccagggcatctcgcgcgagggcgagatcatcgatctgggcgtggccgagggcttcatcgacaagtccggcgcctggtacagctatgacggcaaccgcatcgggcagggcaaggacaacgttcgcaactttctgtgcgaaaatcccgggatcgcccaggccatcgaagcgcgcatccgcgacaagctgctgcccaagggtggcgtcgaggcgcccgccgaggccgatgtacccgagccgtcggaggattga

SEQ ID NO: 5538 - protein, 347 aa, Chromatium vinosum
MDENRKKALAAALTQIEKQFGKGSVMRMGDVGAVRNIEAISTGSLGLDLALGIGGVPKGRVIEIYGPESSGKTTLTLHIIAESQKLGGTAAFVDAEHALDPVYAEKLGVNMTDLLVSQPDTGEQALEITDMLVRSGAVDVVVVDSVAALTPKAEIEGEMGDSHVGLQARLMSQALRKLTGNIKRSNCCVIFINQIRMKIGVMFGSPETTTGGNALKFYASVRLDIRRTGAIKKGDEVIGNETKVKVVKNKVAPPFRQAEFDILYGQGISREGEIIDLGVAEGFIDKSGAWYSYDGNRIGQGKDNVRNFLCENPGIAQAIEARIRDKLLPKGGVEAPAEADVPEPSED

SEQ ID NO: 5539 - DNA, 1053 bp, Chromobacterium violaceum
  CDS (1)..(1053): transl_table=11
atggcttccgaagacaagagcaaggcgctggccgctgccctggcccagattgaaaagcaatttggcaagggctcgatcatgcgcatgagcgacaaccagatcaccgaaaacctgcaagtgatctccaccggctcgctgaccctggacctggcgctgggcgtcggcggcctgccgcgcggccgcgtggtcgaaatctacggcccggagtcgtcgggtaaaaccaccttgtgtctgcaggccgtggccgaggcgcaaaaactgggcggcacctgcgcctacatcgacgccgaaaacgcgctggacccggtttacgcgcagaagctgggcgtcaacgtcgaagacctgctgatctcgcagccggacaccggcgagcaggcgctggaaatctgcgacatgctggttcgctccagcggcgtggacgtgatcgtggtcgactccgtcgccgcgctggtgcccaaggctgaaatcgagggcgagatgggcgacagccacgtcggcctgcaggcccgcctgatgagccaggcgctgcgcaagctgaccggcaacatcaagcgcaccaacaccctggtgatcttcatcaaccagatccgcatgaagatcggcgtgatgttcggcaacccggaaaccaccaccggcggcaacgcgctgaagttctacgcctccgtgcgcctggacatccgccgcaccggcggcatcaagaagggcgacgaagtgatcggcaacgacactcgcgtcaaagtggtgaagaacaaggtgtccccgccgttccgccaggccgatttcgaaatcctgtacggcgagggcatctcgcgccagggcgaaatcatcgagctgggcgtcaagcacggcttcatcgacaagtccggcgcctggtacgcgtacaacggccagaagatcggccagggcaaggacaacacccgcgaatggctgaaagccaacccggccatcgccgacgagatcgagcgcaagatccgcgaagcggtgggcgtgaagatcgaaatcaacgaaaaccagggcgacgaagagttcgccgacgacgccttcgacgcctga

SEQ ID NO: 5540 - protein, 350 aa, Chromobacterium violaceum
MASEDKSKALAAALAQIEKQFGKGSIMRMSDNQITENLQVISTGSLTLDLALGVGGLPRGRVVEIYGPESSGKTTLCLQAVAEAQKLGGTCAYIDAENALDPVYAQKLGVNVEDLLISQPDTGEQALEICDMLVRSSGVDVIVVDSVAALVPKAEIEGEMGDSHVGLQARLMSQALRKLTGNIKRTNTLVIFINQIRMKIGVMFGNPETTTGGNALKFYASVRLDIRRTGGIKKGDEVIGNDTRVKVVKNKVSPPFRQADFEILYGEGISRQGEIIELGVKHGFIDKSGAWYAYNGQKIGQGKDNTREWLKANPAIADEIERKIREAVGVKIEINENQGDEEFADDAFDA

SEQ ID NO: 5541 - DNA, 1050 bp, Clostridium acetobutylicum
  CDS (1)..(1050): transl_table=11
atggataatgaaaaattaaaagccattgatgcggctatgagtcagatagagaaacaatttggaaaaggcgctataatgaaacttggtgagcaagacatcttaaatattgatgcaatttcaacaggatgtttatctttagatatagcacttggaataggtggagttccacgtggaagagtagttgagatatatggacctgaatcatcaggtaaaactacagttgcacttcatatattagctgaagcccaaaagaagggtggagctgctgcatttattgatgccgagcatgctttagatcctcaatatgcaagagctttaggagtagatatagataacttagttgtatctcaaccagatactggtgagcaggcacttgaaattgctgaagcacttgttaggtcaggtgcaattgatgtaattgttgtagattctgtagcagcacttgtaccaaaagctgaaattgaaggtgaaatgggagattctcatgtaggtcttcaggcaagacttatgtcacaagctcttagaaaattaacaggttctataaacaagtctaaatgtatagctatatttataaaccaacttagagaaaaagttggaataatgtttggaaatcctgaaactactcctggaggaagagctcttaagttttatgcttctgtaagaatggatataagaaaaatagacactataaaacagggcgaagaaatgattggaaatagagtaagagtaaaggtagttaaaaataaagtggctcctccatttaaacaagcagaatttgatattatgtataatgaaggtatatctcgtgaaggaaatatagttgatgtaggagttaaagaaaatatcatccaaaaaagtggtgcatggttctcatatggtgatataagacttggtcagggaagagaaaatgctaaattattctttaaagaaaatatagatattagatctgaagttgaaaataaaataagagaaaagtacgatttacctatacaaaaagttaaaaatgaaaagccaaagattgaaaaaggaactgaaaataatacaaaataa

SEQ ID NO: 5542 - protein, 349 aa, Clostridium acetobutylicum
MDNEKLKAIDAAMSQIEKQFGKGAIMKLGEQDILNIDAISTGCLSLDIALGIGGVPRGRVVEIYGPESSGKTTVALHILAEAQKKGGAAAFIDAEHALDPQYARALGVDIDNLVVSQPDTGEQALEIAEALVRSGAIDVIVVDSVAALVPKAEIEGEMGDSHVGLQARLMSQALRKLTGSINKSKCIAIFINQLREKVGIMFGNPETTPGGRALKFYASVRMDIRKIDTIKQGEEMIGNRVRVKVVKNKVAPPFKQAEFDIMYNEGISREGNIVDVGVKENIIQKSGAWFSYGDIRLGQGRENAKLFFKENIDIRSEVENKIREKYDLPIQKVKNEKPKIEKGTENNTK

SEQ ID NO: 5543 - DNA, 1047 bp, Clostridium difficile
  CDS (1)..(1047): transl_table=11
atgagtgtagatcaagaaaaattaaaagcgttgaatgaagctttaggtaaaattgaaaaagattttggtaaaggttcagtaatgaaattgggagaagcaacatctatgtctatagatgttatatcaacaggagcgattggtttagacatagctattggtataggaggtctacctagagggagaatagttgaagtatatggtccagaatcttctggtaagactactgttgcgcttagttgtgtagcatcagctcaaaaagatggaggaatagctgcatttatagatgcagaacatgcacttgacccagtatatgcaaaagctttgggtgtggatgttgataacctaataatatctcaaccagatacaggtgaacaggctttagagatagcagaggcattgataagaagtggagcgatagatataatagtaatagactcagtagcagcattagttccaaaggctgaaatagatggagatatgggtgattctcatgtaggtttacaagctagacttatgtcacaagcacttagaaagttaactggttcaattaaaaaatcaaattgtgttgctatatttataaaccagttaagagagaaagtaggaataatgtttggaaacccagaaactactactggaggacgtgcactaaaattctattcatcagttagattggatgttagaaaaatagatacaataaaacaaggtgataaagttataggtagtagaactagagttaaagttgttaaaaacaaagtagcaccaccatttaagcaagctgaatttgatataatgtatggagaagggatttcaaaaattggagaccttttagatatagctgctgatgtagatatagttaaaaaatcaggttcatggtatagttacaatgatactaaacttggacaaggaagagaaaatgttaaaaaattcttggaagataatttagatttaactactgaaatagatgagaaagttagagcattttacaatttaaatgaagaacatgaagaatcaggtacttcagtatcaaaagaaattgtagaagaataa

SEQ ID NO: 5544 - protein, 348 aa, Clostridium difficile
MSVDQEKLKALNEALGKIEKDFGKGSVMKLGEATSMSIDVISTGAIGLDIAIGIGGLPRGRIVEVYGPESSGKTTVALSCVASAQKDGGIAAFIDAEHALDPVYAKALGVDVDNLIISQPDTGEQALEIAEALIRSGAIDIIVIDSVAALVPKAEIDGDMGDSHVGLQARLMSQALRKLTGSIKKSNCVAIFINQLREKVGIMFGNPETTTGGRALKFYSSVRLDVRKIDTIKQGDKVIGSRTRVKVVKNKVAPPFKQAEFDIMYGEGISKIGDLLDIAADVDIVKKSGSWYSYNDTKLGQGRENVKKFLEDNLDLTTEIDEKVRAFYNLNEEHEESGTSVSKEIVEE

SEQ ID NO: 5545 - DNA, 1059 bp, Clostridium perfringens
  CDS (1)..(1059): transl_table=11
atggcaaatatagataaagataaattaaaagctattgagatggctatgggtcaaatagagaagcaatttggaaagggatcagtaatgaaacttggagagcaaggagctcctcaaatggatgctgtttctactggatgcttagatcttgatatagctttaggaattggtggagtaccaaaaggaagaattattgagatatatggaccagagagttctggtaaaacaacagtggctttacatgtagtagcagaggcacaaaaattaggtggagcagcagcgtatatagatgcagagcatgctttagatccagtttatgcaaaaagattaggtgttaatatagatgatttagtagtttcacaaccagatacaggagaacaagctttagaaataacagaagctttagttagatcaggagctatagatgttttagttgtggactcagttgccgctttagttccaagagcagaaattgaaggtgaaatgggagattctcacgttggtcttcaagctagattaatgtcacaagccttaagaaagttaacaggaacaattaacaaatcaaactgcgtagtaatattcataaaccaattaagagaaaaagttggtataatgtttggtaatccagagacaacaccaggtggtagagcgttaaaattctatgcttcagttagaatggatataagaagaatagattcaataaaacaaggtgacggaataactggtaatagaacaagagttaaaatagttaagaataaggttgctcctccatttaagcaagctgaatttgatataatgtacaatgaaggtatatcaaaagaaggtaatatagtagacgttggagtaaaagaaaatatagtacaaaagagtggagcttggttctcatatggagatataagattaggccaaggtagagaaaatgctaaacaatatttaaaagagaatccagcagttgctttagatatagaaaatcaaataagagaaaaatattctcttcctttagctaaggctgttgaatcaacaagtgtagaagaaaatacagaagagtctgttgaaagctaa

SEQ ID NO: 5546 - protein, 352 aa, Clostridium perfringens
MANIDKDKLKAIEMAMGQIEKQFGKGSVMKLGEQGAPQMDAVSTGCLDLDIALGIGGVPKGRIIEIYGPESSGKTTVALHVVAEAQKLGGAAAYIDAEHALDPVYAKRLGVNIDDLVVSQPDTGEQALEITEALVRSGAIDVLVVDSVAALVPRAEIEGEMGDSHVGLQARLMSQALRKLTGTINKSNCVVIFINQLREKVGIMFGNPETTPGGRALKFYASVRMDIRRIDSIKQGDGITGNRTRVKIVKNKVAPPFKQAEFDIMYNEGISKEGNIVDVGVKENIVQKSGAWFSYGDIRLGQGRENAKQYLKENPAVALDIENQIREKYSLPLAKAVESTSVEENTEESVES

SEQ ID NO: 5547 - DNA, 1038 bp, Colwellia psychrerythraea
  CDS (1)..(1038): transl_table=11
atgaaagacgataaagaaaaagcactatcagcagccttagcccaaattgaacgtcaattcggtaaaggttcaataatgaagcttggtgataataccaccatggatgtagaaactatttctacgggttcattaggcttagatatcgccttaggtgctggcggcttaccaatgggtcgagttgttgaaatttatggtcctgaatcaagcggtaaaaccacgttaactttagaagttattgctgaagcacaacgcaatggtaaagtttgtgcttttatcgatgcagagcatgctcttgaccctgtttatgctgaaaaattaggtgttaacattgatgagttattaatttctcaacctgataccggcgaacaagctctagaaattgttgatatgttaacgcgctctggtgctatcgacgttattgtagttgactctgttgccgcgcttacacctaaagctgaaattgaaggcgatatgggtgattcacatatgggcttgcaagcacgtatgttgtcacaagcgatgcgtaaacttaccggtaatttgaaaaaatctaatactatgcttatcttcattaaccaaattcgtatgaaaattggtgttatgtttggtagcccagaaacgacgaccggtggtaatgcgttaaaattctacgcttctgtacgtttagatatccgtcgtattggcgcggttaaaaacggtgatgaaatcgttggtaatgaaacgcgtgtgaaagtcgttaaaaacaaaattgcgccaccgtttaaacaagctgaattccaaattttatacggtgaaggaattaacaacttaggtgagttaattgaattaggcgttaagcatgagtttgtagagaaagcaggtgcttggtatagctgtaatggtgaaagaattggtcaaggtaaagctaatgctgctaaatatttagatgaacatcctgaaatggctaaagatgttgatactaaattacgcgatatgtttttatcaaaaactgttgtggcagaagataaatcagaagtaaaagaaaaagaaaaagcataa

SEQ ID NO: 5548 - protein, 345 aa, Colwellia psychrerythraea
MKDDKEKALSAALAQIERQFGKGSIMKLGDNTTMDVETISTGSLGLDIALGAGGLPMGRVVEIYGPESSGKTTLTLEVIAEAQRNGKVCAFIDAEHALDPVYAEKLGVNIDELLISQPDTGEQALEIVDMLTRSGAIDVIVVDSVAALTPKAEIEGDMGDSHMGLQARMLSQAMRKLTGNLKKSNTMLIFINQIRMKIGVMFGSPETTTGGNALKFYASVRLDIRRIGAVKNGDEIVGNETRVKVVKNKIAPPFKQAEFQILYGEGINNLGELIELGVKHEFVEKAGAWYSCNGERIGQGKANAAKYLDEHPEMAKDVDTKLRDMFLSKTVVAEDKSEVKEKEKA

SEQ ID NO: 5549 - DNA, 1032 bp, Coxiella burnetii
  CDS (1)..(1032): transl_table=11
atggataatcgtagtaatgcgctgaatgctgctttgtcgcaaattgaacgtcagttcggtaaaggttcggtcatgcgtttgggtgatcccggactcataccggacatcgatgtcatttcaacaggctccttgggtcttgatatcgctttgggtgtgggtggattaccccgcggtcggatcattgaaatttacgggccggaagcttccggaaaaaccacgctagccttacaaacgatcgcttcttgtcagcgtatgggcggtacggctgcttttgtggatgcggaacatgcgttggatgccatttatgcgggcaaattaggcgttaaagtagaggacttgttggtatcccagccggatacaggggaacaagctttagaaattacagacatgttggttcgctcgggcgctgttgatctgatcgtgatcgactccgttgccgccctgacgccaaaagccgaaattgaaggtgatatgggcgattctcatatgggtttgcaagcgcgtttaatgtcacaagcgctgcgcaagctcacggcaaacattaagaaatccaataccttagtgatatttattaatcaaatacgtatgaaaatcggcgttatgtttggtaatccggaaacgaccaccggagggaacgcgcttaagttttattcgtcagtacgcttggatattcgccgcatcggagcgatcaaaaagggcgaagagattttaggcagtgaaactcgagtaaaggtagttaaaaacaaggtggcgccgcctttccgtcaagtcgagtttgatattctttacggtcttggtatttcgcgtgaaagtgagttaattgacctcggtgttaaaaatgaactggtcgaaaaagcaggcgcttggtacagttacaatggcgagcgtatcggccaagggaaagaaaacgttcgacaatttttccttgaaaatccaaaaattgcaggggaaattgaaacacgtttgcgtgaaaaactgttgccgcatcggcaaggcgagaaaatcgctgaagaagtcaatgcagcagaatga

SEQ ID NO: 5550 - protein, 343 aa, Coxiella burnetii
MDNRSNALNAALSQIERQFGKGSVMRLGDPGLIPDIDVISTGSLGLDIALGVGGLPRGRIIEIYGPEASGKTTLALQTIASCQRMGGTAAFVDAEHALDAIYAGKLGVKVEDLLVSQPDTGEQALEITDMLVRSGAVDLIVIDSVAALTPKAEIEGDMGDSHMGLQARLMSQALRKLTANIKKSNTLVIFINQIRMKIGVMFGNPETTTGGNALKFYSSVRLDIRRIGAIKKGEEILGSETRVKVVKNKVAPPFRQVEFDILYGLGISRESELIDLGVKNELVEKAGAWYSYNGERIGQGKENVRQFFLENPKIAGEIETRLREKLLPHRQGEKIAEEVNAAE

SEQ ID NO: 5551 - DNA, 1068 bp, Cytophaga hutchinsonii
  CDS (1)..(1068): transl_table=11
atgagtaaaagcactagtacaccaaatccacaaaatgaaaagttaaaagctttacagcttaccattgataagttagaaaaaacctatggtaaaggtactgtaatgaaattaagcgatgaagttgtaatggacgttcctgtcatttcaacaggttcgctaggacttgacattgctttagggatcgggggattacctaaaggaagaattgtagagatctatggaccggaatcttccggtaaaaccacactttctatgcattgcattgcagaagcacaaaaagccggtggtattgcagcctttatagatgcggagcacgcctttgataaaacgtacgcagaaaaacttggtattgatacaacaaacttattgatctctcagccggataatggtgagcaggcattagaaattgcggaacatttgatccgttccggagcgattgacattattgtgattgactctgttgcagccttagtaccaaaagcagagatcgaaggtgaaatgggtgacagtaaaatgggtttacaggcacgtttaatgtcacaagccttacgtaaattaaccggagcgattaacaaaacaggctgttgctgtatattcatcaaccagctacgagaaaaaattggtgtaatgttcggtaaccctgaaactactacaggtggtaacgcgttgaaattttatgcatccgtacgtttagatatccgccgtatcgggcagattaaagaaagtgctgacaatattacaggtaaccgtacaaaggttaaagtagtaaaaaataaaatggcgcctccgtttaaagtgattgagtttgatatcatgtatggcgaaggaatttctaaaataggtgagatcattgatcttggtgttgaattaggtatcatcaacaaagccggttcatggttctcttatgaaggcacaaaattaggtcagggaagagatgctgtacgtacagtgttccttgacaatcctgaaatgcaggatgaaattgaattaaaaattcgtcagaaagtacagttaagcggagttcccgcagccatggaagcgaaagagctcgaagaggaagaagcataa

SEQ ID NO: 5552 - protein, 355 aa, Cytophaga hutchinsonii
MSKSTSTPNPQNEKLKALQLTIDKLEKTYGKGTVMKLSDEVVMDVPVISTGSLGLDIALGIGGLPKGRIVEIYGPESSGKTTLSMHCIAEAQKAGGIAAFIDAEHAFDKTYAEKLGIDTTNLLISQPDNGEQALEIAEHLIRSGAIDIIVIDSVAALVPKAEIEGEMGDSKMGLQARLMSQALRKLTGAINKTGCCCIFINQLREKIGVMFGNPETTTGGNALKFYASVRLDIRRIGQIKESADNITGNRTKVKVVKNKMAPPFKVIEFDIMYGEGISKIGEIIDLGVELGIINKAGSWFSYEGTKLGQGRDAVRTVFLDNPEMQDEIELKIRQKVQLSGVPAAMEAKELEEEEA

SEQ ID NO: 5553 - DNA, 1032 bp, Dechloromonas aromatica
  CDS (1)..(1032): transl_table=11
atggacgacaacaaggcaaaagcgctcgccgcagcactgcaacagatcgaaaagcaattcggcaaaggctccatcatgaagatgggcgatgccgaaatcgacgaaggcattcaggtcgtgtcgaccggttcgctcggtctggacattgcgctgggcgttggcggtctgccacgcggccgtgtcgttgaaatctatggtccggaatcctccggcaagaccacgctctgtctgcaggtcgtggccgaaatgcagaagctcggtggcgttgccgccttcatcgacgccgaacacgcgctcgatccgcaatatgcccagaagctcggcgtcaatgtcggcgacctgctgatctcgcagccggataccggcgaacaggccctcgaaattgctgacatgctggtccgctccggctcagtcgacatcatcgtcgtcgactcggtcgccgcccttaccccgcgcgccgaaatcgaaggcgaaatgggcgaccagatggtcggcctgcatgcccgcctgatgtcgcaggccctgcgcaagctgactgccaatatcaagaagaccaacacgctggtcatcttcatcaaccagatccggatgaagatcggcgtcatgttcggttcgccggaaaccaccactggtggcaatgcgctcaagttctacgcctccgtccgcctcgacatccgccgtatcggcgcgatcaagaagggtgacgaagtcatcggcagcgaaaccaaggtcaaggtcgtcaagaacaaggtcgccccacccttccgcgaagccattttcgacatcctctacggcgagggtatttcccgccagggcgaaatcgtcgaaatgggtgttgcccacaaactggtcgacaagtccggtgcctggtatgcctacaagggcgaaaagatcggccagggcaaggacaatgcccgtgaattcctgaaagccaatccggaaatcgcccaggaaatcgaagccggcattcgtgaggctgccagcaccaacgtgatcaagccggtcaaggcggccaaggcagcggatgcctga

SEQ ID NO: 5554 - protein, 343 aa, Dechloromonas aromatica
MDDNKAKALAAALQQIEKQFGKGSIMKMGDAEIDEGIQVVSTGSLGLDIALGVGGLPRGRVVEIYGPESSGKTTLCLQVVAEMQKLGGVAAFIDAEHALDPQYAQKLGVNVGDLLISQPDTGEQALEIADMLVRSGSVDIIVVDSVAALTPRAEIEGEMGDQMVGLHARLMSQALRKLTANIKKTNTLVIFINQIRMKIGVMFGSPETTTGGNALKFYASVRLDIRRIGAIKKGDEVIGSETKVKVVKNKVAPPFREAIFDILYGEGISRQGEIVEMGVAHKLVDKSGAWYAYKGEKIGQGKDNAREFLKANPEIAQEIEAGIREAASTNVIKPVKAAKAADA

SEQ ID NO: 5555 - DNA, 1068 bp, Desulfotalea psychrophila
  CDS (1)..(1068): transl_table=11
atggtaggtgcaacagcaaaagacaaagcaggcagcgttgagaatgcaatcagccagatccagaaacaatttggtaagggctccatcatgcgcctgggtgagcaggcactggaggcaatccctgtcatctccacgggcgctctcagcctcgacattgccctcggggtcggcggtctgcccaagggcagaatgacagagatatatggccccgaatcatcggggaaaaccaccctggccctccatgtagttgccgaggcacaaaaattaggtggaatagccgccttcatcgatgcagagcatgcccttgataccgcctacgcagaaaaactcggcgtaaatattgacaatctcctggtttctcaaccggatttcggtgagcaggccctggaaattgcagagatactcattagatcaggcggggttgacatcatcgtcgtcgactccgttgccgcccttactcccaaggctgaaatagacggtaatgttggagatgtccacgttggccttcaggctcgccttatgtcgcaggccatgcggaaatttgccggggtcctcaaccggagcaacaccgttttaatttttatcaatcaaatccgaatgaaaatcggagtgatgtttggtagtcctgaaaccacaacaggcggcaacgccctcaaattttactgttcagagcgtcttgatattcgccggataggtgccattaaagacggacaggaaattaccggtaaccgaaccagggtaaaggtcgtcaaaaataaagttgccccaccctttaagattgctgagtttgacattatctacggcgaaggcatatctaaaattggcgacatgtttgaccttgccgttggcctggatattattgacaaaagcggatcctggtattcctataaaaatgaacgtataggtcagggacgagagaattcaaaacaattccttatggacacacctgccatctgtcatgaaatagaggagaaggttcgatctgcctacggacttccggaccgggaagagaccaaaagagaggagacggcacagatacctgacacagagaaaacaaaggacgtatga

SEQ ID NO: 5556 - protein, 355 aa, Desulfotalea psychrophila
MVGATAKDKAGSVENAISQIQKQFGKGSIMRLGEQALEAIPVISTGALSLDIALGVGGLPKGRMTEIYGPESSGKTTLALHVVAEAQKLGGIAAFIDAEHALDTAYAEKLGVNIDNLLVSQPDFGEQALEIAEILIRSGGVDIIVVDSVAALTPKAEIDGNVGDVHVGLQARLMSQAMRKFAGVLNRSNTVLIFINQIRMKIGVMFGSPETTTGGNALKFYCSERLDIRRIGAIKDGQEITGNRTRVKVVKNKVAPPFKIAEFDIIYGEGISKIGDMFDLAVGLDIIDKSGSWYSYKNERIGQGRENSKQFLMDTPAICHEIEEKVRSAYGLPDREETKREETAQIPDTEKTKDV

SEQ ID NO: 5557 - DNA, 1053 bp, Dichelobacter nodosus
  CDS (1)..(1053): transl_table=11
atgaatgaagaacagaaaaaagcattaaccgccgttttaacgcaattagataaacaatttggcaaaggaaccgtgatgcgtttgggcgagcaagttgccgcgcacgatattcaagccatttctacgggttcattaacgctcgatattgcgcttggcatcggcggattgcctaaaggacgcatcgttgaaatctacgggcctgaatcttcgggaaaaactacgatgatgttacacgtcatcgctgaagcgcaaaaaaacggcggcacggcagcatttatcgatgccgaacacgcattagatccgatttatgcccgaaaattaggcgttaataccgatgatttatacgtcacacaacccgataccggcgaacaagcgttagaaatttgcgatgctttagtgcgcagcggcgcgtttgacgttatcgtggttgattccgttgccgcgttaacgccaaaagcagaaattgaaggcgaaatgggcgattctcacgttggtttacaagcgcgcttgatgagtcaagctttgcgcaaattaaccggaaatattaagcgcgccaatacgctcgttgtttttattaaccaaatccgcatgaaaattggcgttatgtttggttctccagaaacaaccaccggcggcaatgcgctgaaattttacgcttccgtacgtatggatatccgccgcatcggttcaattaaagaaggcgacgaagtcctcggtaatgaaacgcgcgtaaaagtcgtgaaaaacaaagtagcgccgccatttaagcaagcagaatttgatattttatacggtcaaggcgtttcacgcgaaggggaaattattcaacttgccgttaatgccgatatcatgcaaaaatccggcgcgtggtacagttaccgcgatgaaaaaatcggacaaggtaaagaaaaagtacggctttatttaaaagaacaccccgacgtcgcacaagaaattgaaacgaaaatccgcgaaaaatttatcggcggtgaattgcatttacctgatgccgccggcgatgaaatcgatacctcaatcaatgatgaagaatga

SEQ ID NO: 5558 - protein, 350 aa, Dichelobacter nodosus
MNEEQKKALTAVLTQLDKQFGKGTVMRLGEQVAAHDIQAISTGSLTLDIALGIGGLPKGRIVEIYGPESSGKTTMMLHVIAEAQKNGGTAAFIDAEHALDPIYARKLGVNTDDLYVTQPDTGEQALEICDALVRSGAFDVIVVDSVAALTPKAEIEGEMGDSHVGLQARLMSQALRKLTGNIKRANTLVVFINQIRMKIGVMFGSPETTTGGNALKFYASVRMDIRRIGSIKEGDEVLGNETRVKVVKNKVAPPFKQAEFDILYGQGVSREGEIIQLAVNADIMQKSGAWYSYRDEKIGQGKEKVRLYLKEHPDVAQEIETKIREKFIGGELHLPDAAGDEIDTSINDEE

SEQ ID NO: 5559 - DNA, 1074 bp, Ehrlichia chaffeensis
  CDS (1)..(1074): transl_table=11
atgtctgatagcaaaaatttaaaccaggaaagacaaaaagcattggatagcgcaattagtcaaattgaaaaggcttttggtcgtggtgcaataatgaaattaaaacaaggtgctattgaaaaaatagatagtatttctactggatcaattgcgcttgatacagctttaggcattggtgggtttcctaaaggtagaattgttgaaatttttgggcctgaaagttctggtaaaacaacacttgctttgcatgtaattgctgagtcacaaaaaaagggtgggaattgtgcatttattgatgctgaacatgctttggatatcatgtatgctcgcaaattaggggtaaatactggtgatttgatcgtttctcaacccgatacaggtgaacaagcattacatatagttgagtatctggtttgttctggtgctattgatgtaatagtagtagattctgtggctgcattaactcctagagcagagatagaaggtgatatgggtgatcaacatatggggttacaagctaggttgttaagtcatgcattgaggaagttaacttctattgtatcaaaagctaattgtgttcttatttttattaatcagatacgtatgaaaataggggtagtttatggaaatcctgaaactactactggtggcaatgctttaaagttttatagttctgtaagattagatatacgtaaggtaagtgcaattaaggataaggacgtaattattggtaatcaaactaaggtgaaagttgttaaaaacaaggtggctcctccttttaaacaagtagattttgatatcatgtataatgaaggtatctcaaaggtaggagagattatagatatgggtgtaaaacttaatattattgaaaaagctgggtcatactactcgtataatagtgtgcgtcttggtcaaggtaaagaaaatgcaaaatcttatcttaaagctaattgtgatactgcacatgaaatagaacagaagataagaagtatacttgcaagtgataatgaagttagttgtttcaatgcagaggttaatgataatcttcatgaagtagaagaaacagttttttaa

SEQ ID NO: 5560 - protein, 357 aa, Ehrlichia chaffeensis
MSDSKNLNQERQKALDSAISQIEKAFGRGAIMKLKQGAIEKIDSISTGSIALDTALGIGGFPKGRIVEIFGPESSGKTTLALHVIAESQKKGGNCAFIDAEHALDIMYARKLGVNTGDLIVSQPDTGEQALHIVEYLVCSGAIDVIVVDSVAALTPRAEIEGDMGDQHMGLQARLLSHALRKLTSIVSKANCVLIFINQIRMKIGVVYGNPETTTGGNALKFYSSVRLDIRKVSAIKDKDVIIGNQTKVKVVKNKVAPPFKQVDFDIMYNEGISKVGEIIDMGVKLNIIEKAGSYYSYNSVRLGQGKENAKSYLKANCDTAHEIEQKIRSILASDNEVSCFNAEVNDNLHEVEETVF

SEQ ID NO: 5561 - DNA, 1065 bp, Enterobacter agglomerans
  CDS (1)..(1065): transl_table=11
atggctattgatgagaacaagcaaaaagcgttagctgcagcactgggccagattgaaaagcaattcggtaaaggctccatcatgcgtctgggtgaagatcgctctatggacgtcgaaacgatctctaccggctctttgtctttggatatcgcgttaggtgctggcggcttgccaatgggccgtatcgttgaaatttatggtccggaatcctccggtaaaaccacgctgactctgcaggttatcgctgctgcacagcgtgaaggcaaaacctgtgcgttcatcgatgcagaacacgcgctggaccctatctacgctaaaaaactgggcgtcgatatcgataacctgctgtgttctcagccagataccggtgaacaggctctggaaatctgtgatgcgctgacccgttcaggcgccgttgacgttatcatcgttgactccgttgccgcactgacgccaaaagctgaaatcgaaggcgaaattggtgactctcacatgggcctcgcagctcgtatgatgagccaggcgatgcgtaagcttgcgggtaacctgaaaaacgccaataccctgctgatcttcatcaaccagatccgtatgaaaatcggtgtgatgttcggtaacccggaaaccaccaccggcggtaacgccctgaaattctatgcctctgtacgtctggatatccgtcgtatcggcgctatcaaagaaggtgatgtggttgtcggtagtgaaacacgtgtgaaagtcgtgaagaacaaaatcgccgcaccatttaaacaagctgaattccagatcctgtacggcgaaggtatcaacatcaacggcgaactgatcgacctgggcgttaagcacaaactgatcgagaaagcgggtgcatggtacagttacaacggcgagaagattggtcagggtaaagcgaactcttgtaactacctcaaagaaaacccgaaagttgctgctgaactggacaaaaaactgcgtgatatgctgctgagcggcaccggtgaattgagcgttgcgactactgctgaagacgctgacgacaacatggaaaccagcgaagagttttaa

SEQ ID NO: 5562 - protein, 354 aa, Enterobacter agglomerans
MAIDENKQKALAAALGQIEKQFGKGSIMRLGEDRSMDVETISTGSLSLDIALGAGGLPMGRIVEIYGPESSGKTTLTLQVIAAAQREGKTCAFIDAEHALDPIYAKKLGVDIDNLLCSQPDTGEQALEICDALTRSGAVDVIIVDSVAALTPKAEIEGEIGDSHMGLAARMMSQAMRKLAGNLKNANTLLIFINQIRMKIGVMFGNPETTTGGNALKFYASVRLDIRRIGAIKEGDVVVGSETRVKVVKNKIAAPFKQAEFQILYGEGININGELIDLGVKHKLIEKAGAWYSYNGEKIGQGKANSCNYLKENPKVAAELDKKLRDMLLSGTGELSVATTAEDADDNMETSEEF

SEQ ID NO: 5563 - DNA, 1029 bp, Erwinia carotovora
  CDS (1)..(1029): transl_table=11
atggctattgatgaaaacaagcaaaaagcattggccgcagcacttggtcaaattgaaaagcaatttggtaaagggtctatcatgcgtctgggcgaagatcgttccatgaacgttgaaaccatctctacgggttctttatcattagacgttgctttaggtgctggtggtttaccacgcgggcgtattgttgaaatctatggcccagaatcttatggtaaaacaacattaacactacaagttatcgctgctgctcaacgtgaaggcaaaatttgtgcattcattgatgctgagcacgctttagaccctatctatgctcaaaaactaggcgtagatattgataacctgctctgttctcagcctgatactggtgaacaagccctagaaatttgtgatgcattatctcgttctggtgcagttgatgttatcgttgttgactccgttgcagctttaacaccaaaagcagaaattgaaggtgagattggtgattcacacgttggtttagctgctcgtatgatgagtcaagctatgcgtaagttagcgggtaacttgaaaaactccaacactctgcttattttcatcaaccaaattcgaatgaaaatcggtgttatgtttggtaatccagaaaccacaacaggtggtaatgcacttaaattctacgcatctgttcgtttagatattcgtcgtatcggctctgttaaaaacggtgatgaagttgttggtagtgaaacacgcgttaaagtggtgaaaaacaaaattgcagcaccatttaaacaagctgaattccaaattatgtatggtgaaggtatcaatacctttggcgaattgattgatttaggtgttaaacacaaattggtagagaaagctggtgcatggtacagctacaatggtgagaaaattggtcaaggtaaagccaatgcaacaacttatttaaaagaacaccctgaaatgtacaatgagttaaacactaaacttcgtgaaatgttattaaatcacgcaggtgaatttactagcgcacgtgatttttgctaa

SEQ ID NO: 5564 - protein, 342 aa, Erwinia carotovora
MAIDENKQKALAAALGQIEKQFGKGSIMRLGEDRSMNVETISTGSLSLDVALGAGGLPRGRIVEIYGPESYGKTTLTLQVIAAAQREGKICAFIDAEHALDPIYAQKLGVDIDNLLCSQPDTGEQALEICDALSRSGAVDVIVVDSVAALTPKAEIEGEIGDSHVGLAARMMSQAMRKLAGNLKNSNTLLIFINQIRMKIGVMFGNPETTTGGNALKFYASVRLDIRRIGSVKNGDEVVGSETRVKVVKNKIAAPFKQAEFQIMYGEGINTFGELIDLGVKHKLVEKAGAWYSYNGEKIGQGKANATTYLKEHPEMYNELNTKLREMLLNHAGEFTSARDFC

SEQ ID NO: 5565 - DNA, 1074 bp, Erwinia carotovora subsp
  CDS (1)..(1074): transl_table=11
atggctattgatgagaacaaacaaaaggcacttgcggcagcactgggccaaatcgaaaagcaatttggtaaaggttctatcatgcggttgggcgaagatcgctcaatggatgttgaaaccatttctacaggttctttgtcccttgatattgctttaggtgccggcggtttacctatgggccgcatcgttgagatttatggcccagaatcctctggtaaaaccacgctgaccttacaggtgattgctgctgctcagcgcgaaggcaaaacctgtgcgtttatcgatgctgaacatgcgttggaccctatttatgcgaaaaaacttggtgtagatattgataatctgctgtgttcgcagccggataccggcgagcaggcgttggagatttgtgatgcactaacgcgctctggtgctgttgacgttattatcgtcgactccgttgcagcgctgacgccgaaagctgaaattgaaggcgaaatcggtgactctcacatggggctggctgcacgtatgatgagccaggctatgcgtaaattggcgggtaacctgaagcaagctaatacgctgctgatcttcatcaaccagatccgtatgaaaattggtgtgatgtttggtaaccctgaaaccactaccggcggtaacgcactgaagttttatgcctctgttcgtttggatattcgtcgtactggcgctatcaaggaaggcgaagaagtcgtcggtagcgaaacccgcgttaaagtcgtgaagaataaagtggcagcaccgttcaagcaggctgaattccaaattttgtacggcgaaggcatcaatatccacggtgagctggttgatctgggtgtgaaacacaagctgatcgaaaaagcgggtgcctggtatagctataacggtgacaagatcggtcagggtaaagcgaatgcctgtaatttcctgaaagagaatccgacgatttctgctgaactggataagaaattgcgcgaaatgctgctgcataaaggcaatgagctgaaaccggctgccgcgggaaatagccatgacgaggatgaactcgctggtgaaggtaaagaagagttttaa

SEQ ID NO: 5566 - protein, 357 aa, Erwinia carotovora subsp
MAIDENKQKALAAALGQIEKQFGKGSIMRLGEDRSMDVETISTGSLSLDIALGAGGLPMGRIVEIYGPESSGKTTLTLQVIAAAQREGKTCAFIDAEHALDPIYAKKLGVDIDNLLCSQPDTGEQALEICDALTRSGAVDVIIVDSVAALTPKAEIEGEIGDSHMGLAARMMSQAMRKLAGNLKQANTLLIFINQIRMKIGVMFGNPETTTGGNALKFYASVRLDIRRTGAIKEGEEVVGSETRVKVVKNKVAAPFKQAEFQILYGEGINIHGELVDLGVKHKLIEKAGAWYSYNGDKIGQGKANACNFLKENPTISAELDKKLREMLLHKGNELKPAAAGNSHDEDELAGEGKEEF

SEQ ID NO: 5567 - DNA, 1038 bp, Frankia sp
  CDS (1)..(1038): transl_table=11
atggcaggactcgaccgtgagaaggcgttggataacgccttggcgcagatcgacaagcagttcggcaagggatcggtcatgcggttgggggacgacaccaggccgccggtccaggccatccccaccggttcgattgctctggatgtcgcgctcggcatcggcgggctgccgcgggggcgcatcattgagatctacggcccggagtcgtccgggaagacgaccgtcgccctgcacgcggtggcgaacgcgcaggcggctggtggtatcgcggcgttcatcgacgccgagcacgcgctcgaccccgagtacgcgggaaagctcggcgtcgacaccgacggtctgctggtctcccagcctgataccggcgagcaggcgttggagatcgcggacatgctcgtccggtctggcgcgctggacatcatcgtcatcgactcggtggccgcgctggtcccgagggccgagatcgagggcgagatgggggacagtcacgtcggcctccaggcccgcctgatgtcccaggccctgcgcaagatgaccgcggcgctggcgaactccggtacgaccgcgatcttcatcaaccagttgcgcgagaagatcggggtgatgttcggctccccggagaccacgaccggtggtaaggcactgaagttctatgcgtcggtgcgcctcgatgtccgtcgtatcgaaactctcaaggacggcacggaggccgtgggtaaccggacccgcgtcaaggtggtgaagaacaaggtggcgccgccgtttcggaccgccgaattcgacatcgtctacggaggcggtatcagtcgggagggttccctgatcgacatgggtgtcgagcacggcattattcgtaagtccggtgcctggtacacctacgacggcgatcagctcggccagggcaaggagaacgcccggtcttttctgcgggacaaccccgatctggccaacgagatcgaaaagaagatcaaggagaagctcggcatcctgcccagtctcgaatccgatgccgtggcgcccgttccggtcgatctgtag

SEQ ID NO: 5568 - protein, 345 aa, Frankia sp
MAGLDREKALDNALAQIDKQFGKGSVMRLGDDTRPPVQAIPTGSIALDVALGIGGLPRGRIIEIYGPESSGKTTVALHAVANAQAAGGIAAFIDAEHALDPEYAGKLGVDTDGLLVSQPDTGEQALEIADMLVRSGALDIIVIDSVAALVPRAEIEGEMGDSHVGLQARLMSQALRKMTAALANSGTTAIFINQLREKIGVMFGSPETTTGGKALKFYASVRLDVRRIETLKDGTEAVGNRTRVKVVKNKVAPPFRTAEFDIVYGGGISREGSLIDMGVEHGIIRKSGAWYTYDGDQLGQGKENARSFLRDNPDLANEIEKKIKEKLGILPSLESDAVAPVPVDL

SEQ ID NO: 5569 - DNA, 1146 bp, Fusobacterium nucleatum subsp; identical to SEQ ID NO: 5277
  CDS (10)..(1146): transl_table=11

SEQ ID NO: 5570 - protein, 378 aa, Fusobacterium nucleatum subsp
MAAKKDKSVPDSKITDKEGKEKAVKDAMAAITKGFGSGLIMKLGEKSSMNVESIPTGSINLDIALGIGGVPKGRIIEIYGAESSGKTTLALHVIAEAQKQGGTVAFIDAEHALDPVYAKALGVDIDELLISQPDYGEQALEIADTLVRSGAIDLIVIDSVAALVPKAEIDGEMSDQQMGLQARLMSKGLRKLTGNLNKYKTTMIFINQIREKIGVTYGPTTTTTGGKALKFYSSVRMEVKKMGTVKQGDDPIGSEVIVKVTKNKVAPPFKEAAFEILYGKGISKVGEIIDAAVAKDVIVKAGSWFSFRDQSIGQGKEKVRAELEINPELLAQVEKDLKEAIAKGPVDKKKKKSKKEASSDDTDDENLEIDDAIDENND

SEQ ID NO: 5571 - DNA, 1020 bp, Geobacter metallireducens
  CDS (1)..(1020): transl_table=11
gtgacccaggaacgcgagaaggcgattgagctggcactgagccagatagagaagcagttcggcaagggcgccatcatgcggctgggtgctgacgaggccctgccggacatcgacgccatccccaccggcgccctctccctggatatcgccctgggggtgggcggggttccccggggacgggtcatcgagatctacggccccgagtcgtcgggcaagacgaccctcgccctccacatcgccgccgaggcccagaagctgggcggcatcgcggccttcgtggatgccgagcacgccctggacatcggctatgcccgcaagctgggtgttcggaccgacgacctcctggtctcccagcccgacacgggggagcaggcccttgagatcgccgagatgctcgtgcggagcggcgccgtggacgtcctcgtcatcgactcggtggcggccctcgttcccaaggccgagatcgagggggagatgggggactcccacgtggggctccaggcccgcctcatgtcccaggccctgcgcaagctcaccggcatcatctccaagtccaactgctgcgtcatcttcatcaaccagatccggatgaagatcggcgtcatgttcggcagccccgagaccaccaccggcggcaacgccctcaagttctacgcttcggtccgcctcgacatccgcaagatcgccaccctcaagcagggggatgcggtgatcggctcccgcaccaaggtgaaggtggtgaagaacaaggtggctccccccttcagggaggtggagttcgacatctactacggcgaggggatatcccgcctgggggacctcctggacctggccgttgaccgcaagatcatcgacaagagcggtgcctggttttcctacggctccgaccggatcggccagggacgcgagaactcccggaatttcctcaaggagcatccggagatggtggccgaaatcgaggacaagatttacgaaacggccggcattccccgcaaaggggggaaggaagaggcggcgtag

SEQ ID NO: 5572 - protein, 339 aa, Geobacter metallireducens
MTQEREKAIELALSQIEKQFGKGAIMRLGADEALPDIDAIPTGALSLDIALGVGGVPRGRVIEIYGPESSGKTTLALHIAAEAQKLGGIAAFVDAEHALDIGYARKLGVRTDDLLVSQPDTGEQALEIAEMLVRSGAVDVLVIDSVAALVPKAEIEGEMGDSHVGLQARLMSQALRKLTGIISKSNCCVIFINQIRMKIGVMFGSPETTTGGNALKFYASVRLDIRKIATLKQGDAVIGSRTKVKVVKNKVAPPFREVEFDIYYGEGISRLGDLLDLAVDRKIIDKSGAWFSYGSDRIGQGRENSRNFLKEHPEMVAEIEDKIYETAGIPRKGGKEEAA

SEQ ID NO: 5573 - DNA, 1017 bp, Geobacter sulfurreducens
  CDS (1)..(1017): transl_table=11
gtgacccaagaacgcgaaaaggcgatagagcttgcgctcagccagatagaaaagcagttcggcaagggggcgatcatgcgcctcggggcggatgaggccctccccgatgtggccgccatccccaccggttccctctccctcgacctggccctcggcgtcggcggcgtcccccgcgggcggattatcgagatctacggacccgagtcgtcgggcaagacgacgctcgccctgcacatcgcggccgaggcccagaaaatgggcggcatcgctgccttcgtcgacgccgagcacgcgctcgatatcggctatgcccgcaaactcggcgtcaagacggacgacctgctcgtctcccagcccgacaccggggagcaagccttggaaattgccgagatgctcgtcagaagcggcgctgtggacgtcctcgtcatcgactcggtggcggcactggttcccaaggccgagatcgaaggggagatgggcgactcccacatggggctccaggcccggctcatgtctcaggccctgcgcaagctcaccggcataatctccaagtccaactgctgcgtcatcttcatcaaccagatccggatgaagatcggcgtcatgttcggcaaccccgaaaccaccaccggcggcaacgccctcaagttttacgcctcggtacgtctcgatatccgcaagatcgcatccctcaagcaagggcaggacgtcatcggctcccgcaccaaggtgaaggtggtcaagaacaaggtggctccccccttcaaagaggtggagttcgacatttactacggtgagggcatttcccgcgagggcgacatcctcgacctggccgtggagaaggggatcgtggacaagagcggcgcctggttctcctacggcggagaccggattggccaggggcgcgaaaattcccgccttttcctcaaggagcggccagaactggtgaacgagatcgaagggaaggtttacgacgtggccggcattccccgcaaaggggcgaaggaagcggcatag

SEQ ID NO: 5574 - protein, 338 aa, Geobacter sulfurreducens
MTQEREKAIELALSQIEKQFGKGAIMRLGADEALPDVAAIPTGSLSLDLALGVGGVPRGRIIEIYGPESSGKTTLALHIAAEAQKMGGIAAFVDAEHALDIGYARKLGVKTDDLLVSQPDTGEQALEIAEMLVRSGAVDVLVIDSVAALVPKAEIEGEMGDSHMGLQARLMSQALRKLTGIISKSNCCVIFINQIRMKIGVMFGNPETTTGGNALKFYASVRLDIRKIASLKQGQDVIGSRTKVKVVKNKVAPPFKEVEFDIYYGEGISREGDILDLAVEKGIVDKSGAWFSYGGDRIGQGRENSRLFLKERPELVNEIEGKVYDVAGIPRKGAKEAA

SEQ ID NO: 5575 - DNA, 1038 bp, Gluconobacter oxydans
  CDS (1)..(1038): transl_table=11
atggacaagaccaaggcgcttgaaggcgcactcagccagattgagcgtgccttcggcaaaggctcgatcatgcgcatgggccagcgcccgaaagtggaaaccaatgtgatttccaccgggtccatcgggctggacatcgcgctggggatcggcggcatgccccgcggccgtatcgtcgaaatctacggaccggaaagctccggcaagaccaccctcgcccttcacgttctggctgaagcccagaagaagggcgggaccgtggccttcatcgatgcggaacatgcactcgatccggggtatgcccgcaagcttggcgtcaacatcgacgatcttctcctgagccagccggatgccggcgaacaggcgctggaaattgccgacacgctggtccgttccggcgccgttgacgtgctggtcgtggactccgtggctgccctcgttccccgcgccgagcttgaaggcgacatgggcgacagccatgtcggcctgcatgcccgtctcatgagccaggccctccgcaagctcacgggaacggtctcgcgctccaacacgctcgtcatcttcctgaaccagatccgcatgaagatcggcgtgatgttcggcaatccggaaacgacaactggcggtaacgcgctgaagttctactcgtccatccgcctcgacatccgccgcatcgggtccatcaaggacaaagacgaggttgtcggcaaccagacgcgcgtcaaggtcgtgaagaacaagatggcgcctccgttccgtcaggtcgagttcgacatcatgtacggagaaggcatcagcaagatgggcgaactgctcgatctgggcgtgaagggcaacatcgtcgagaaatccggcgcctggttctccttcgacagccagcgcatcggacagggccgtgaaaacgccaagcagttcctgcgcgaacatccggaaatggcctccgaaatcgagcgtcgcatccgcgctgaagccggtgtcctctccgacgccctgatgacggatccggagcccgacgcagacggcaccccggaagactga

SEQ ID NO: 5576 - protein, 345 aa, Gluconobacter oxydans
MDKTKALEGALSQIERAFGKGSIMRMGQRPKVETNVISTGSIGLDIALGIGGMPRGRIVEIYGPESSGKTTLALHVLAEAQKKGGTVAFIDAEHALDPGYARKLGVNIDDLLLSQPDAGEQALEIADTLVRSGAVDVLVVDSVAALVPRAELEGDMGDSHVGLHARLMSQALRKLTGTVSRSNTLVIFLNQIRMKIGVMFGNPETTTGGNALKFYSSIRLDIRRIGSIKDKDEVVGNQTRVKVVKNKMAPPFRQVEFDIMYGEGISKMGELLDLGVKGNIVEKSGAWFSFDSQRIGQGRENAKQFLREHPEMASEIERRIRAEAGVLSDALMTDPEPDADGTPED

SEQ ID NO: 5577 - DNA, 1065 bp, Haemophilus influenzae
  CDS (1)..(1065): transl_table=11
atggcaactcaagaagaaaaacaaaaagccctagcggctgcactagggcaaatcgaaaaacaatttggtaaaggctcaattatgaaattaggcgataccaaaacgttggatgtagagtctatttctactggatcacttgggttagatgttgcgcttgggattggtggtttgcctatgggtcgaattgtagaaattttcgggcctgaatcatcgggtaaaacaacattaactctttccgtcattgctcaagcgcaaaaagcaggaaaaacctgtgcatttattgatgcagaacacgcacttgatcctatttatgcagcaaaacttggtgtagatgtaaaagaactttttgtttctcaaccagataatggggaacaggcacttgaaatctgtgatgcattagttcgctcaggtgcaattgatgtaattattgtggactccgttgccgcactgacaccaaaagctgaaattgaaggcgatatgggcgattctcatatgggtctgcaagcacgtttaatgtctcaagctttgcgtaaactcacaggtcaaattaaaaatgcaaactgtctagttgtgtttattaaccaaatccgtatgaaaataggcgtgatgtttggtaatcctgaaaccaccacaggcggtaatgcattaaaattctattcttctgttcgcttagatattcgccgtacaggttctgtaaaagatggcgaaaatattattggaaatgaaactcgcgtaaaagtagtgaaaaacaaattagcggcaccgttccgccaagtggatttccaaattctctatggagaaggcatttcaaaagcaggagaattattagaacttggtgtaaaacacaaacttgtagaaaaatcaggcgcatggtattcctataatggcgaaaaaattggtcaaggaaaggctaattcaatgaaatggcttaacgaaaatatagagaaatcagatgaattagaagctcgtttacgtgctgaattagtggccaatccagaacaagccttaatggcggatattgaacaatctgaaaataatactgaatcagaaagtgattttgaataa

SEQ ID NO: 5578 - protein, 354 aa, Haemophilus influenzae
MATQEEKQKALAAALGQIEKQFGKGSIMKLGDTKTLDVESISTGSLGLDVALGIGGLPMGRIVEIFGPESSGKTTLTLSVIAQAQKAGKTCAFIDAEHALDPIYAAKLGVDVKELFVSQPDNGEQALEICDALVRSGAIDVIIVDSVAALTPKAEIEGDMGDSHMGLQARLMSQALRKLTGQIKNANCLVVFINQIRMKIGVMFGNPETTTGGNALKFYSSVRLDIRRTGSVKDGENIIGNETRVKVVKNKLAAPFRQVDFQILYGEGISKAGELLELGVKHKLVEKSGAWYSYNGEKIGQGKANSMKWLNENIEKSDELEARLRAELVANPEQALMADIEQSENNTESESDFE

SEQ ID NO: 5579 - DNA, 1068 bp, Haemophilus somnus
  CDS (1)..(1068): transl_table=11
atggcaaccccagaagaaaaagcaaaagcacttgaagccgctctagggcaaattgagaaacaatttggtaagggtgcaattatgaaattaggggaaacccaaaaactggatattgaagcaatttcaaccggctcacttagtttggatgttgctttaggtatcggcggcttaccaatgggacgtattgttgaaatttttggccccgagtcctcaggcaaaacgacattaacactatcggttatcgcacaagcacaaaaagcaggtaaaacctgtgcatttattgatgcagaacacgcacttgatccaatttatgccgctaaattaggtgttgacgttaaagagttattaatttctcaaccggataacggagaacaagcactggaaatctgtgatgctctcgttcgttcaggtgcggtagacgttgtgattgttgactctgttgccgctttaacaccgaaagcagaaattgaaggtgaaatgggtgatactcatgttggtttacaagcaagacttatgtcgcaagcattacgcaaattaacggggcagatcaaaaactcaaattgtttggtcgtctttatcaaccaaattcgcatgaaaattggtgttatttttggtaatcctgaaacaaccacaggcggtaatgctttaaaattctacgcatctgttcgtcttgatattcgtcgtgttggcagtatcaaaaatggtgatgaagtcattggtaatgaaactcgtgtaaaagtggttaaaaataaagtcgcaccgccgttccgccaagttgatttccaaattttatacggtgagggtatttcaagaaatggtgaacttattgaacttggcgtaaaacataagttagtaaataaatccggtgcttggttctcctatgagggcgaaaaaattggtcaagggaaaacaaatgcgatgaaatggttagctgaacatcctgagcaagctgctattttagagcaaaaattacgttcagaattattagcaaatccggaaaaagcactgttagcggatcttgaagctgaatcagaatcaaacatatctgaagttgaaagtgatttttaa

SEQ ID NO: 5580 - protein, 355 aa, Haemophilus somnus
MATPEEKAKALEAALGQIEKQFGKGAIMKLGETQKLDIEAISTGSLSLDVALGIGGLPMGRIVEIFGPESSGKTTLTLSVIAQAQKAGKTCAFIDAEHALDPIYAAKLGVDVKELLISQPDNGEQALEICDALVRSGAVDVVIVDSVAALTPKAEIEGEMGDTHVGLQARLMSQALRKLTGQIKNSNCLVVFINQIRMKIGVIFGNPETTTGGNALKFYASVRLDIRRVGSIKNGDEVIGNETRVKVVKNKVAPPFRQVDFQILYGEGISRNGELIELGVKHKLVNKSGAWFSYEGEKIGQGKTNAMKWLAEHPEQAAILEQKLRSELLANPEKALLADLEAESESNISEVESDF

SEQ ID NO: 5581 - DNA, 1068 bp, Haemophilus somnus
  CDS (1)..(1068): transl_table=11
atggcaaccccagaagaaaaagcaaaagcacttgaagccgctctaggacaaattgagaaacaatttggtaagggtgcaattatgaaattaggggaaacccaaaaactggatattgaagcaatttcaaccggctcacttagtttggatgttgctttaggtatcggcggcttaccaatgggacgtattgttgaaatttttggccccgagtcctcaggcaaaacgacattaacactatcggttatcgcacaagcacaaaaagcaggtaaaacctgtgcatttattgatgcagaacacgcacttgatccaatttatgcggctaaattaggtgttgacgttaaagagttattaatttctcaaccggataacggagagcaagcactggaaatctgtgatgctctcgttcgttccggtgcggtagacgttgtgattgttgactctgttgccgctttaacaccgaaagcagaaattgaaggtgaaatgggtgatactcatgttggtttacaagcaagacttatgtcacaagcattacgcaaattaacggggcagatcaaaaactcaaattgtttggtcgtctttatcaaccaaattcgcatgaaaattggtgttgtttttggtaatccagaaactaccacaggcggtaatgctttaaaattctacgcttctgttcgtcttgatattcgtcgtgttggcagtatcaaaaatggtgatgaagtcattggtaatgaaactcgtgtaaaagtggttaaaaataaagtcgcacctccgttccgccaagttgatttccaaattttatacggtgagggtatttcaagaaatggtgaacttattgaacttggcgtaaaacataagttagtaaataaatccggtgcttggttctcctatgagggcgaaaaaattggtcaagggaaaacaaatgcgatgaaatggttagctgaacatcctgagcaagctgctattttagagcaaaaattacgttcagaattattagcaaatccggaaaaagcactattagcggatcttgaagctgaatcagaatcaaacatatctgaagttgaaagtgatttttaa

SEQ ID NO: 5582 - protein, 355 aa, Haemophilus somnus
MATPEEKAKALEAALGQIEKQFGKGAIMKLGETQKLDIEAISTGSLSLDVALGIGGLPMGRIVEIFGPESSGKTTLTLSVIAQAQKAGKTCAFIDAEHALDPIYAAKLGVDVKELLISQPDNGEQALEICDALVRSGAVDVVIVDSVAALTPKAEIEGEMGDTHVGLQARLMSQALRKLTGQIKNSNCLVVFINQIRMKIGVVFGNPETTTGGNALKFYASVRLDIRRVGSIKNGDEVIGNETRVKVVKNKVAPPFRQVDFQILYGEGISRNGELIELGVKHKLVNKSGAWFSYEGEKIGQGKTNAMKWLAEHPEQAAILEQKLRSELLANPEKALLADLEAESESNISEVESDF

SEQ ID NO: 5583 - DNA, 1038 bp, Helicobacter hepaticus
  CDS (1)..(1038): transl_table=11
atggtagatgaaaaaaggcaaaaagcgattgaacttgctttaaagcaaattgataaagcatttggtaaaggtgctttggtgcgtttgggtgataagcaagttgaaaaaattgatagtatttctacgggttcacttggacttgatatggcacttggaatcggtggtgtgcctaagggaaggattattgagatttatggtccagaatccagcggtaaaacaacacttagcttacaaattgtagcagaatgtcaaagaaacgggggaatttgtgcctttattgatgccgaacacgctcttgatgtatattatgccaagcgtttgggtgtggatacagagaatcttcttgtatctcaacctgacacaggtgagcaggctcttgaaattttagaaacccttacacgtagtggtgcagtggatttaatagtgattgattcggtagcagcgctcactcctaaggcagaaattgaaggagatatgggagatcagcacgtagggcttcaagcacgacttatgagtcacgcattgcgcaaaattacaggcgtgcttcacaagatgaatgcaacattaatttttattaaccaaattcgtatgaaaattggcactatggggtatggtagtccagagacaactacgggcggtaatgcactcaagttttatgcaagtgtgcgtattgatgtgcgccgtgttgctacacttaagcaaaatgaccagcaaattggtaatcgcacaaaagcaaaagttgtaaaaaataaggttgccccacctttccgcgaagcagaatttgatattatgtttggtgaggggattagtaaggaaggtgaaattattgactatggtatcaagcttgatattattgataaaagcggtgcgtggttaagctataatgataaaaagcttggacaagggcgtgagaatgctaaaattgttttaaaagaaaacaaatctcttgctgatgagattacagctaaaattaaagagcaaattggctcaaaggacgagattttacctttgcctgatgaaccagaaactgatgagtag

SEQ ID NO: 5584 - protein, 345 aa, Helicobacter hepaticus
MVDEKRQKAIELALKQIDKAFGKGALVRLGDKQVEKIDSISTGSLGLDMALGIGGVPKGRIIEIYGPESSGKTTLSLQIVAECQRNGGICAFIDAEHALDVYYAKRLGVDTENLLVSQPDTGEQALEILETLTRSGAVDLIVIDSVAALTPKAEIEGDMGDQHVGLQARLMSHALRKITGVLHKMNATLIFINQIRMKIGTMGYGSPETTTGGNALKFYASVRIDVRRVATLKQNDQQIGNRTKAKVVKNKVAPPFREAEFDIMFGEGISKEGEIIDYGIKLDIIDKSGAWLSYNDKKLGQGRENAKIVLKENKSLADEITAKIKEQIGSKDEILPLPDEPETDE

SEQ ID NO: 5585 - DNA, 1044 bp, Helicobacter pylori J99
  CDS (1)..(1044): transl_table=11
atggcaatagatgaagacaaacaaaaagcgatttctttagcgatcaaacaaattgataaggtttttggtaagggggcgttggtgcgccttggggataagcaagtagaaaagattgacgctatttctacgggctcgttagggttggatttagctttagggattgggggcgttccaaagggcaggatcattgaaatttatgggccagagtcaagcgggaagaccactttaagcttgcacattatcgcagaatgccaaaaaaatggcggcgtgtgcgcattcattgacgctgaacatgccctagatgtgtattatgctaagagattgggcgtggatacggaaaatttactcgtttcccaaccaagcacgggcgaagaagccttagagattttagaaacgatcaccagaagcggagggattgatttagtggtggtggattcggtggcggctcttacgcctaaagcagagattgatggggatatgggcgatcagcatgtgggcttgcaagcaagacttatgagccatgcgttaaggaaaatcaccggtgttttgcataagatgaacactactctcatttttatcaatcaaatcagaatgaagattggcatgacgggctatgggagtccagagactacaaccggaggcaatgccttaaaattctatgcgagcgttaggattgatattagaaggattgcggctttaaaacaaaacgaacagcatatcggtaatagggctaaagccaaagtggttaaaaataaagtcgctccgccctttagagaagcggaatttgacatcatgtttggggaagggatttctaaagagggcgaaatcattgactatggcgtgaaattagacatcgtggataagagcggggcatggcttagctaccaggataaaaagctagggcaaggccgagaaaacgctaaagccttattgaaagaagataaagccctagcggatgaaatcactcttaagattaaagagagtatcggctctaatgaagagatcatgcccttacccgatgagcctttagaagaaatggagtaa

SEQ ID NO: 5586 - protein, 347 aa, Helicobacter pylori J99
MAIDEDKQKAISLAIKQIDKVFGKGALVRLGDKQVEKIDAISTGSLGLDLALGIGGVPKGRIIEIYGPESSGKTTLSLHIIAECQKNGGVCAFIDAEHALDVYYAKRLGVDTENLLVSQPSTGEEALEILETITRSGGIDLVVVDSVAALTPKAEIDGDMGDQHVGLQARLMSHALRKITGVLHKMNTTLIFINQIRMKIGMTGYGSPETTTGGNALKFYASVRIDIRRIAALKQNEQHIGNRAKAKVVKNKVAPPFREAEFDIMFGEGISKEGEIIDYGVKLDIVDKSGAWLSYQDKKLGQGRENAKALLKEDKALADEITLKIKESIGSNEEIMPLPDEPLEEME

SEQ ID NO: 5587 - DNA, 1044 bp, Helicobacter pylori
  CDS (1)..(1044): transl_table=11
atggcaatagatgaagacaaacaaaaagcgatttctttagcgatcaaacaaattgataaggtttttggtaagggggcgttggtgcgccttggggataagcaagtagaaaagattgactctatttctacaggctcgttagggttggatctggctttagggattgggggcgttccaaagggtaggatcattgaaatttatgggccagagtcaagtgggaagaccactctaagcttgcatattattgcagaatgccaaaaaaatggcggcgtgtgcgcgttcattgacgctgagcatgccctagatgtgcattacgctaagagattgggcgtggatacggaaaatctactcgtttcccaacctgatacaggcgagcaagctttagagattttagaaacgatcaccagaagcggagggattgatttagtggtggtggattctgtggcggctcttacgcctaaagcggagattgatggggatatgggcgatcagcatgtgggcttgcaagcaaggcttatgagccatgcgttaagaaaaatcaccggtgtcttgcacaagatgaacactactctcatttttatcaatcaaatcaggatgaagattggcatgatgggttatgggagtccagagaccacaaccggaggtaacgccttaaaattctatgcgagcgttaggattgatattagaaggattgcctccctcaaacaaaacgaacagcatatcggtaatagggctaaagccaaagtggttaaaaataaagtcgctccgccttttagagaagcggaatttgacatcatgtttggggaagggatttctaaagagggcgaaatcattgattacggtgtgaaattagacattgtggataagagtggggcatggcttagctaccaggataaaaagctagggcaaggcagagaaaacgctaaagccttactgaaagaagacaaagccctagcggatgaaatcactcttaagattaaagagagtattggctctaatgaagagatcatgcccttaccggatgagcctttagaagaaatggaataa

SEQ ID NO: 5588 - protein, 347 aa, Helicobacter pylori
MAIDEDKQKAISLAIKQIDKVFGKGALVRLGDKQVEKIDSISTGSLGLDLALGIGGVPKGRIIEIYGPESSGKTTLSLHIIAECQKNGGVCAFIDAEHALDVHYAKRLGVDTENLLVSQPDTGEQALEILETITRSGGIDLVVVDSVAALTPKAEIDGDMGDQHVGLQARLMSHALRKITGVLHKMNTTLIFINQIRMKIGMMGYGSPETTTGGNALKFYASVRIDIRRIASLKQNEQHIGNRAKAKVVKNKVAPPFREAEFDIMFGEGISKEGEIIDYGVKLDIVDKSGAWLSYQDKKLGQGRENAKALLKEDKALADEITLKIKESIGSNEEIMPLPDEPLEEME

SEQ ID NO: 5589 - DNA, 1104 bp, Herminiimonas arsenicoxydans
  CDS (1)..(1104): transl_table=11
atggacgataaaaaaaacgcaccaagctcggataagagtaaggcactcgctgccgcactggcacaaatcgagaagcaattcggtaaaggctcggtgatgcgcatggaggacggtgccgtcgtcgaagaggtgcaagtcgtgtccactggttcattgggcctggatctcgcgcttggcgtcggcggtttgccgcgcggccgcgtagtggaaatttacggtccggaatcgtcgggtaaaaccacgctgacgctgcaaaccatcgcagaaatgcagaaactgggcggcacctgcgcgtttatcgatgcggagcatgcgctggatgtgacgtatgcgcaaaaactgggtatcaacctgtcggaattgttgatttcgcagccggataccggcgaacaggctttggaaatttgcgatgcgctggtgcgctccggcggcgttgatctgattgtcatcgactcggtcgccgccttgacgccgcgtgccgagatcgaaggcgatatgggcgattccctgcctggtctgcaggcgcgcctgatgtcgcaggccttgcgcaaactgaccggcagcatcaaccgcaccaatacgctggtgatttttatcaaccagattcgcatgaaaatcggcgtcatgttcggcaatccggaaaccacgaccggtggtaatgcattgaaattttatgcttcggtacgcctggatattcgtcgtaccggctcgatcaaatcgggcgatgaagtcatcggcaatgaaaccaaggtcaaggtcgtcaagaacaagatcgcgccgccattcaaggaagcgcatttcgaaattctgtatggcgaaggcacatcgcgcgaaggcgagattctggatctgggttcggatgcaaaaatcgtcgaaaaatccggtgcctggtatagctataacggcgaacgtattggccagggcaaggacaatgcacgcaattatttgaaagagcgtccggaactcgcgcgtgaaatcgaaaacaaggtgcgcgcctccttgggcgtgcctgaactcggcgcgatcaagtcggatgaacctgttgcgaagaaggcttccgccaaggaaagcaaggaagccaaagagctgaaagaagtcgagtaa

SEQ ID NO: 5590 - protein, 367 aa, Herminiimonas arsenicoxydans
MDDKKNAPSSDKSKALAAALAQIEKQFGKGSVMRMEDGAVVEEVQVVSTGSLGLDLALGVGGLPRGRVVEIYGPESSGKTTLTLQTIAEMQKLGGTCAFIDAEHALDVTYAQKLGINLSELLISQPDTGEQALEICDALVRSGGVDLIVIDSVAALTPRAEIEGDMGDSLPGLQARLMSQALRKLTGSINRTNTLVIFINQIRMKIGVMFGNPETTTGGNALKFYASVRLDIRRTGSIKSGDEVIGNETKVKVVKNKIAPPFKEAHFEILYGEGTSREGEILDLGSDAKIVEKSGAWYSYNGERIGQGKDNARNYLKERPELAREIENKVRASLGVPELGAIKSDEPVAKKASAKESKEAKELKEVE

SEQ ID NO: 5591 - DNA, 1056 bp, Herbaspirillum seropedicae
  CDS (1)..(1056): transl_table=11
atggacgacaaaaaagctgcgaacaactctgagaagagcaaggcgctggccgccgcgttggcacagattgaaaagcagtttggcaagggctcggtgatgcgcatggaagatggcgtcatcgccgaggaaatccaggcggtctccactggctcactgggcctggacatcgccctgggcatcggcggcctcccgcgtggccgcgtcatcgagatctacggcccggaatcctcgggcaagaccaccctgaccctgcaatcgattgccgagatgcagaaactgggcggcacctgcgccttcatcgatgccgagcacgcactggacgtcacctatgcgcaaaagctgggtgtgaacctgaacgacctgctgatctcccagcccgacaccggcgaacaggccctggaaatctgcgacgccctggtacgttccggcgccgtggacctgatcgtggtcgactccgtggccgcactgacccccaaggctgaaatcgaaggcgacatgggcgactccctgcctggcctgcaagcccgcctgatgtcgcaggcgctgcgcaagctgaccggcagcatcaaccgtaccaataccacggtcatcttcatcaaccagatccgcatgaagatcggcgtcatgttcggcaaccccgaaaccaccaccggtggtaatgccctgaagttctacgcctccgtgcgcttggacatccgccgcaccggctcgatcaagtccggcgacgaagtcatcggcagcgagaccaaggtcaaggtcgtcaagaacaaggtcgctccgccgttccgcgaagcccactttgacatcctgtatggcgaaggcacctcgcgcgaaggcgagatcctggacctcggttccgagcacaaggtggtcgagaagtccggcgcctggtacagctacaacggcgagcgcatcggccagggcaaggacaatgcccgcaactacctgaaggaacatccggaactggcgcgcgagatcgaaaacaaggtccgcgtggccctgggtgtgccggaactggccggtggcgaagccgaagccgaagcgaaagcctcctga

SEQ ID NO: 5592 - protein, 351 aa, Herbaspirillum seropedicae
MDDKKAANNSEKSKALAAALAQIEKQFGKGSVMRMEDGVIAEEIQAVSTGSLGLDIALGIGGLPRGRVIEIYGPESSGKTTLTLQSIAEMQKLGGTCAFIDAEHALDVTYAQKLGVNLNDLLISQPDTGEQALEICDALVRSGAVDLIVVDSVAALTPKAEIEGDMGDSLPGLQARLMSQALRKLTGSINRTNTTVIFINQIRMKIGVMFGNPETTTGGNALKFYASVRLDIRRTGSIKSGDEVIGSETKVKVVKNKVAPPFREAHFDILYGEGTSREGEILDLGSEHKVVEKSGAWYSYNGERIGQGKDNARNYLKEHPELAREIENKVRVALGVPELAGGEAEAEAKAS

SEQ ID NO: 5593 - DNA, 1119 bp, Idiomarina loihiensis
  CDS (1)..(1119): transl_table=11
atgagcaatgatcgtcaaaaggcgttagatgcagcgctcggacaaatcgaacgtcaatttggtaaaggttctatcatgcgtctgggtgataaccagactctggatatcgattctgtttcaaccggttcgttagggctggatattgctcttggtattggtggcttgccttttgggcgggttgtagaaatttacggtcctgagtccagtggtaaaacgactatgactctggaagtgattgccgaagcgcaaaaaatgggtaagacctgtgccttcgtagatgctgagcacgcgttagaccctatttatgccgaagctttaggtgttaacgttgatgacttattaatatcgcaaccagataccggtgagcaggctttagaaatttgtgacatgctggttcgttccggcgcagtcgatattgtgattgttgactcggtagcagcgctgacaccaaaagcggaaattgaaggcgaaatgggcgatagccatgttggcttgcaggctcgtttaatgtcacaagccctgcgtaaattaacgtcgaacattaagaagtccaacaccatgtgtattttcatcaaccaaattcggatgaaaattggtgtgatgtttggtaaccctgaaactaccacgggtggtaacgccctgaagttttactcttctgttcgtctggatattcgccgtaccggtgcattgaaagaaggtgacgaagttgtgggtaacgaaacccgcgtgaaagtggttaaaaacaaggtggctcctccgtttaaagaagcgcacttccaaattttatacggcaaaggtatttctaaagaaggtgagcttattgacctgggtgttaagcacaaaatggttgataaagccggtgcctggtacagttataacggcgacaaaattggtcagggtaaagctaactcaatgaagtttttgcaggacaaccctaaaattgccgatgaattagaaggtcgtattcgcgaactgttgttgtcaaaaccagaaaagagaacaaaagaaattcgtgaagctgagcgcgctgctgcgaaagaagacgcgaaaagcgaagctaaagcagataagaaaacagaaaagaaaggtaatgagaaagatgatatcagtttgtcataa

SEQ ID NO: 5594 - protein, 372 aa, Idiomarina loihiensis
MSNDRQKALDAALGQIERQFGKGSIMRLGDNQTLDIDSVSTGSLGLDIALGIGGLPFGRVVEIYGPESSGKTTMTLEVIAEAQKMGKTCAFVDAEHALDPIYAEALGVNVDDLLISQPDTGEQALEICDMLVRSGAVDIVIVDSVAALTPKAEIEGEMGDSHVGLQARLMSQALRKLTSNIKKSNTMCIFINQIRMKIGVMFGNPETTTGGNALKFYSSVRLDIRRTGALKEGDEVVGNETRVKVVKNKVAPPFKEAHFQILYGKGISKEGELIDLGVKHKMVDKAGAWYSYNGDKIGQGKANSMKFLQDNPKIADELEGRIRELLLSKPEKRTKEIREAERAAAKEDAKSEAKADKKTEKKGNEKDDISLS

SEQ ID NO: 5595 - DNA, 1047 bp, Kineococcus radiotolerans
  CDS (1)..(1047): transl_table=11
atgcccgctcctgcggaccgcgagaaggccctcgacgccgccctcgcagcgatcgacaagaacttcggcaagggctcggtcatgcggctgggcgacgaggtccgtccgccgatcgaggtcatcccgaccggctccatctccctggacgtcgccctcggcatcggcggcctgccccgcggtcgcgtggtggagatctacggcccggagtcctcgggcaagacgaccgtcgccctgcacgccgtggccagcgcccagaaggccggcggcatcgccgccttcatcgacgccgagcacgccctcgacccggactacgcggccaagctgggcgtcgacaccgacgcgctgctggtctcccagcccgacacgggggagcaggcgctggagatcgcggacatgctgatccgctccggcgccctcgacatcatcgtcatcgactccgtcgcggccctcgtgcccaaggccgagatcgagggcgagatgggcgacagccacgtcggtctgcaggcccgcctgatgtcgcaggccctgcgcaagatcaccggtgcgctgaaccactccggcaccacggccatcttcatcaaccagctgcgcgagaagatcggcgtcatgttcggctcgcccgagacgacgacgggcggcaaggcgctgaagttctacgcctcggtccgcctcgacgtccgccggatcgagacgctcaaggacgggacgaaccccgtcggcaaccggacccgcgtcaaggtcgtcaagaacaaggtcagcccgcccttcaagcaggccgagttcgacatcatctacggccagggcatctcccgcgagggtgggctcatcgacctcggcgtcgagcacggcttcgtgcgcaagtccggcgcctggtacacctacgagggcgatcagctcggccagggcaaggagaacgcccgcgccttcctgcgcgacaaccccgacctcggcgacgagatcgagaagcgcatcaaggagaagctcggcatcggcgcccgcctggacgccccggccgaggtcgacgtcgaggagaaggtcgacttctga

SEQ ID NO: 5596 - protein, 348 aa, Kineococcus radiotolerans
MPAPADREKALDAALAAIDKNFGKGSVMRLGDEVRPPIEVIPTGSISLDVALGIGGLPRGRVVEIYGPESSGKTTVALHAVASAQKAGGIAAFIDAEHALDPDYAAKLGVDTDALLVSQPDTGEQALEIADMLIRSGALDIIVIDSVAALVPKAEIEGEMGDSHVGLQARLMSQALRKITGALNHSGTTAIFINQLREKIGVMFGSPETTTGGKALKFYASVRLDVRRIETLKDGTNPVGNRTRVKVVKNKVSPPFKQAEFDIIYGQGISREGGLIDLGVEHGFVRKSGAWYTYEGDQLGQGKENARAFLRDNPDLGDEIEKRIKEKLGIGARLDAPAEVDVEEKVDF

SEQ ID NO: 5597 - DNA, 1059 bp, Klebsiella pneumoniae subsp
  CDS (1)..(1059): transl_table=11
atggcgatcgacgaaaacaaacagaaagcgttggcggctgcactgggccagatcgaaaagcaattcggtaaaggctccatcatgcgcctgggtgaagaccgcaccatggatgtggaaaccatctccaccggctcgctttctctggatatcgcgctgggcgccggcggtctgccaatgggccgtatcgtcgagatctacggtccggaatcctccggtaaaaccaccctgacgctgcaggttatcgccgcagcgcagcgtgaaggtaaaacctgtgcgttcatcgatgctgaacatgcgctggatcctgtctatgcacgcaaactgggcgtcgatatcgacaacctgctgtgttctcagccggacaccggcgagcaggcgctggagatctgtgacgcgctggcgcgctctggtgcggttgatgttatcgtcgtcgactccgtcgcggcgttgacgccgaaagcggaaatcgaaggcgaaatcggcgactctcacatgggccttgcggcgcgtatgatgagccaggcgatgcgtaagctggcgggtaacctgaagcagtccaacacgctgctgatctttatcaaccagatccgtatgaaaattggcgtgatgttcggtaacccggaaaccactaccggtggtaacgcgctgaagttctacgcctctgtgcgtctggacattcgccgcatcggcgcggtgaaagagggcgacaacgtcgtcggcagcgaaacccgcgtcaaagtggtgaaaaacaagattgccgcgccgtttaaacaggccgaattccagatcctctacggcgaaggcatcaacttctacggcgagctggtagacctcggcgtaaaagagaagctgattgagaaagcgggtgcctggtatagctacaacggcgacaaaatcggtcagggtaaagcgaacgcgatcacctggctgaaagagaacccggcggcggcgaaagagattgagaagaaagtgcgcgaactgctgctcaacaatcaggatgcgaagccagacttcgttgttgacggcaacgacgcagaagaaaccgaacaggacttctga

SEQ ID NO: 5598 - protein, 352 aa, Klebsiella pneumoniae subsp
MAIDENKQKALAAALGQIEKQFGKGSIMRLGEDRTMDVETISTGSLSLDIALGAGGLPMGRIVEIYGPESSGKTTLTLQVIAAAQREGKTCAFIDAEHALDPVYARKLGVDIDNLLCSQPDTGEQALEICDALARSGAVDVIVVDSVAALTPKAEIEGEIGDSHMGLAARMMSQAMRKLAGNLKQSNTLLIFINQIRMKIGVMFGNPETTTGGNALKFYASVRLDIRRIGAVKEGDNVVGSETRVKVVKNKIAAPFKQAEFQILYGEGINFYGELVDLGVKEKLIEKAGAWYSYNGDKIGQGKANAITWLKENPAAAKEIEKKVRELLLNNQDAKPDFVVDGNDAEETEQDF

SEQ ID NO: 5599 - DNA, 1137 bp, Lactobacillus pentosus
  CDS (1)..(1137): transl_table=11
ttggctgatgcacggaaagcagcactagatactgccctaaaaaagatcgaaaagaactttggtaaaggggcgattatgcggatgggtgacgctgcccagacgaccatttcaacaatttccagcgggtcactagccttagatgacgcattaggcgttggtggttacccacgtggccgaatcgttgaaatttatggccctgaaagttccggtaaaacgaccgttgcactacacgcggtcgctgaagttcaaaagcaaggcgggacggccgcctatatcgatgctgaaaacgccttggatccggtttacgcggaacatttaggtgtcaacattgatgatttgttactttcacaaccagatactggtgaacaaggtcttgaaatcgcggatgctttagtttccagtggcgcggttgatatcttagttgtcgattcagttgcggcgttagtaccacgggccgaaattgaaggtgaaatgggtgacgcccacgttgggttacaagcccggttaatgtcgcaagcgttgcggaagttatccgggactttgaacaagaccaagaccatcgcactatttattaaccaaattcgtgaaaaagttggcgtgatgtttggaaaccctgaaacgacccctggtggtcgggctctgaagttctatgcgacgattcgacttgaagttcgtcgtgctgaacaaatcaaggaaggaaccaacatcattgggaaccgtgttcggatcaaagttgtgaagaacaaggttgcgccgccatttaagcgggccgaagttgatatcatgtacggtcaaggaatctcacaaaccggtgaaattgttgatatggccgctgaaaaggatattgttaagaagagtggttcatggtattcatacggtgatgaccggattggtcaaggtcgtgagaatgcgaagaagtacttggatgaacatccagatgtcatggctgagattcgtcaaaaagtccgggatgcatacggcatggaccagacgggtgaagaagacgaccaagctgatgacaagtccaaggataaggcaactaaacctagtgacaagtcacaggcacaagccaagcctaaaaagccagttgcaactgaaacatctttagatcttgatgattcaaaaaccgataaataa

SEQ ID NO: 5600 - protein, 378 aa, Lactobacillus pentosus
MADARKAALDTALKKIEKNFGKGAIMRMGDAAQTTISTISSGSLALDDALGVGGYPRGRIVEIYGPESSGKTTVALHAVAEVQKQGGTAAYIDAENALDPVYAEHLGVNIDDLLLSQPDTGEQGLEIADALVSSGAVDILVVDSVAALVPRAEIEGEMGDAHVGLQARLMSQALRKLSGTLNKTKTIALFINQIREKVGVMFGNPETTPGGRALKFYATIRLEVRRAEQIKEGTNIIGNRVRIKVVKNKVAPPFKRAEVDIMYGQGISQTGEIVDMAAEKDIVKKSGSWYSYGDDRIGQGRENAKKYLDEHPDVMAEIRQKVRDAYGMDQTGEEDDQADDKSKDKATKPSDKSQAQAKPKKPVATETSLDLDDSKTDK

SEQ ID NO: 5601 - DNA, 1047 bp, Legionella pneumophila
  CDS (1)..(1047): transl_table=11
atggaagaaaataaacaaaaagcactatcagcggccgtttcgcaaattgaacgccaatttggcaaagggtctgtaatgcgtatgggagatagcacggtatcacgggatattgaagcaatctctacaggttcattaggtcttgatattgccttagggataggcggtttgccaaaaggccgtattgttgaaatttatggccctgagtcttctggtaaaaccacgctcactcttcaagtgatcgctgaatgtcaaaaaatgggtggtacagcagcatttatcgatgcggaacatgctctggatccaagctatgctcagaaacttggtgtgaaggtggatgagctgttggtttctcagccggatacaggcgagcaagctctggaaattactgatatgctggtgcgttctgcagcagttgatgtcgtaataattgactcggttgctgccttgactcccaaagcagaaattgagggagaaatgggcgattcccatgttggtttacaggcaagattgatgtcgcaagccctgcgtaaattgaccgctaacattaaacgttcgaacacactggttatttttattaatcaaatacgtatgaaaattggtgtgatgtttggtagccctgaaactactacagggggcaatgctttgaagttttatgcttcagttcgtttggatattcgccgtattggttcaattaaaaagggtgaagaaatattaggcagtgaaacccgagttaaagtagttaaaaataaggtagcgccaccgtttaaaatgactgagtttgatattttatataacgaaggtatatctcgtgagagtgaaattattaatctgggtgttcaattgaatttaattgagaaatcaggtgcctggtatagctacaaacaggaaaaaatcgggcagggcaaagaaaatgtcagattatatttgaaagaaaatccccaagtcgctgcagagcttgaacaacaaatccgtactgagctcttggaaaaaaagttatctgtgttggctagttcatcagaagatctttttgagactatagatgactaa

SEQ ID NO: 5602 - protein, 348 aa, Legionella pneumophila
MEENKQKALSAAVSQIERQFGKGSVMRMGDSTVSRDIEAISTGSLGLDIALGIGGLPKGRIVEIYGPESSGKTTLTLQVIAECQKMGGTAAFIDAEHALDPSYAQKLGVKVDELLVSQPDTGEQALEITDMLVRSAAVDVVIIDSVAALTPKAEIEGEMGDSHVGLQARLMSQALRKLTANIKRSNTLVIFINQIRMKIGVMFGSPETTTGGNALKFYASVRLDIRRIGSIKKGEEILGSETRVKVVKNKVAPPFKMTEFDILYNEGISRESEIINLGVQLNLIEKSGAWYSYKQEKIGQGKENVRLYLKENPQVAAELEQQIRTELLEKKLSVLASSSEDLFETIDD

SEQ ID NO: 5603 - DNA, 1125 bp, Leifsonia xyli subsp; identical to SEQ ID NO: 5315
  CDS (52)..(1125): transl_table=11

SEQ ID NO: 5604 - protein, 357 aa, Leifsonia xyli subsp
MPSPADREKALVTALAQIDRQFGKGSVMRLGSDERAPVEVVPTGSIALDVALGIGGLPRGRIVEIYGPESSGKTTLTLHAIANAQRAGGIAAFIDAEHALDPDYARKLGVDIDALLVSQPDTGEQALEIADMLVRSGSIDLIVIDSVAALVPRAEIEGEMGDAHVGLQARLMSQALRKLTGALSQTNTTMIFINQLREKVGVFFGSPETTAGGKALKFYASVRLDIRRIETLKDGTDAVGNRTRVKVVKNKMAPPFKQAEFDILYGVGISHEGSLLDFGVEHALVKKSGAWYTYEGDQLGQGKENSRNFLIANPDIAAEIENKIKIKLGIVADPNADAEPTAAAGSLEEKLPARKGA

SEQ ID NO: 5605 - DNA, 1101 bp, Leptospira interrogans serogroup Icterohaemorrhagiae serovar
  CDS (1)..(1101): transl_table=11
atgggagaaagtatcatgaagaaagcaaaagaagatgctccgagcgtagatgattctaaaaagttagcgatcgagcaagcaatgagccaaattgaaaaacaatttggaaagggttcgattatgaaattaggatcggattctgccaaacaaaccgttcaagtaattccttccggttctttggatttagacattgcactgggtataggtggttatccgatcggtagaattgtagaaatttacggacctgagtcttctggaaaaactactctcacactttctgcaattgcagaggctcagaaaagaggtggtgtggctgcgtttatagatgcagaacacgctttggatccatcttatgccaaaaaacttggggtcaatatagacgaacttttagtttctcaaccggataatggagaagaagcattagaaatctgtgaatctttagttcgaagtaatgcaattgatttaatcgtaattgattctgtggcggctttggttcccaaggctgaaatagaaggagatatgggagattcacacatgggtttacaagcaagactcatgtcccaggcgcttagaaaactaactggtaccattgcaaaatccaaaaccgtagtaatctttatcaatcaaattcgtatgaaaatcggtgttatgttcggttctcctgaaactacaactggcggaaatgctttgaaattctattgttcagttcgtttggatatccgtaaaatagaaacgatcaaagaaaaagaagaatctgtaggaaacagagtacgggtcaaagtagtcaaaaataagtgtgctcctccgtttaaacaggctgaatttgacataatctttaacgctgggattagcagagaaggttctctggttgacctaggtgtaaagcatgatattattcataaggccggagcttggtattcttacaatacggaaaaaattggccaaggtaaggaggccgctaaggaatacttgaaaaacaaccctgaaattgccttaaccatcgaaaatatggtcagagatctaaattctcttcctttgttagttcaggaaaataataaaaaatctcgtaaagaggaaaaattagaacaggccgcaggctaa

SEQ ID NO: 5606 - protein, 366 aa, Leptospira interrogans serogroup Icterohaemorrhagiae serovar
MGESIMKKAKEDAPSVDDSKKLAIEQAMSQIEKQFGKGSIMKLGSDSAKQTVQVIPSGSLDLDIALGIGGYPIGRIVEIYGPESSGKTTLTLSAIAEAQKRGGVAAFIDAEHALDPSYAKKLGVNIDELLVSQPDNGEEALEICESLVRSNAIDLIVIDSVAALVPKAEIEGDMGDSHMGLQARLMSQALRKLTGTIAKSKTVVIFINQIRMKIGVMFGSPETTTGGNALKFYCSVRLDIRKIETIKEKEESVGNRVRVKVVKNKCAPPFKQAEFDIIFNAGISREGSLVDLGVKHDIIHKAGAWYSYNTEKIGQGKEAAKEYLKNNPEIALTIENMVRDLNSLPLLVQENNKKSRKEEKLEQAAG

SEQ ID NO: 5607 - DNA, 1164 bp, Leptospira meyeri
  CDS (1)..(1164): transl_table=11
atgaaaaaagagaaagctgacaaggctcaagaaaaagaaaccgaccaaagaaagcaggcaattgatgcagcgctcggccaaatcgaaaaacaattcggtaagggttccatcatgcgccttggtgccgatacacgtatggcagaaatgaacgttgtatccactggatctttggatttagacattgccttggggataggcgggtttccttccggtcgtatcgtagaaatctacggaccagaatcttctggtaaaacaacactcactctttctgcgattgcagaaacgcaaaaaaaaggaggcattgctgccttcattgatgcggaacatgctttagatccatcttatgctaaaaaattaggggtcaatgtagacgacctactggttgcccaaccagataatggggaagaggctctggaaatttgtgaatcactcgttcgttccaacgccatcgatctcatcgtcatcgactctgtagccgcacttgttcctaaggccgagatcgaaggagatatgggagattctcacatgggactccaagcgcgtctgatgtcccaagccctccgtaaactcacgggaaccatttcaaaatccaataccactgtcatcttcatcaaccaaatccgtatgaagattggggttatgtttggaagtcctgaaaccactactggtggaaacgcgttaaaattctatgcttccattcgattggacattcgtcgcatcgaaactctaaaagaaaaagaagaacctgttggtaaccgtgtgcgagtgaaagttgtaaaaaacaaatgcgctcctcctttccgacaagcagagtttgacatcatgtatgcgaacggaatcaacagagaaagttctctcattgatctagcggttcgccacgacctagttgcaaaagcaggttcttggtattcttacggtggagagaaaatcggacaaggaaaggaacaagtgaaaaacttttttctcgaaaatccagatatcgcatttaaaattgaaaaccaagttcgagatctcaatagcctcccactcatggaccaatccaaaatccaaaccagagaagtgaaatccattgaaagggaccctaaggaaactaaagaaacaaaatctaaacaacctgttagtttctctaccgaagcagaagtagatattgctgttggagaataa

SEQ ID NO: 5608 - protein, 387 aa, Leptospira meyeri
MKKEKADKAQEKETDQRKQAIDAALGQIEKQFGKGSIMRLGADTRMAEMNVVSTGSLDLDIALGIGGFPSGRIVEIYGPESSGKTTLTLSAIAETQKKGGIAAFIDAEHALDPSYAKKLGVNVDDLLVAQPDNGEEALEICESLVRSNAIDLIVIDSVAALVPKAEIEGDMGDSHMGLQARLMSQALRKLTGTISKSNTTVIFINQIRMKIGVMFGSPETTTGGNALKFYASIRLDIRRIETLKEKEEPVGNRVRVKVVKNKCAPPFRQAEFDIMYANGINRESSLIDLAVRHDLVAKAGSWYSYGGEKIGQGKEQVKNFFLENPDIAFKIENQVRDLNSLPLMDQSKIQTREVKSIERDPKETKETKSKQPVSFSTEAEVDIAVGE

SEQ ID NO: 5609 - DNA, 1047 bp, Listeria ivanovii
  CDS (1)..(1047): transl_table=11
gtgaatgatcgtcaagcggcattagaccaagctttaaaacaaattgaaaaacaattcggtaaaggttccattatgaaattaggggagcattcagaccaaaatatatctactatttctagtggctcattagcattagatattgctttaggagtcggcggatatccaagagggcgtattattgaagtatacggacccgaaagttctggtaaaacaactgttgcactacatgcaattgcagaagtacaagcacaaggcggaacagcggcatttatcgatgcagaacatgcactcgatcctgcttatgcaaaaaatcttggtgttaatattgatgagttacttttatctcaaccagatacgggagaacaagcattagaaatcgctgaagcattagtaagaagtggcgcggttgatatgttagttattgactctgtggcagcacttgtaccacgagcggaaattgaaggcgaaatgggagatgcgcatgttggtttgcaagcacgcttaatgtcacaagctttacgcaaactttctggcgctatcaataaatctaaaactatcgcaattttcatcaaccaaattcgtgaaaaagttggggttatgttcggtaatccggaaatcacgcctggtggtcgggcgcttaaattctattctactgtccgtttagaagtaagacgtgcagaacaattgaaacaaggtacggatgtaatggggaacaaaacaaaaattaaagtagtaaaaaataaagtagctccaccattccgtattgcggaagtagatattatgtacggagaaggtatctcacgcgaaggcgagcttgttgatatggctgcagaagtagatgttatcaataagagcggctcatggtattcttataaagaagaacgtatcggtcaaggtcgtgaaaatgctaaacaatatctaaaagagcatactgatattcgtgacgaaatctccaagcgtgttcgtgaagaatatgaaatagatggaagcaataaagaaccattagcagaaacagaagaaacattaagcttgcttgatgacgaataa

SEQ ID NO: 5610 - protein, 348 aa, Listeria ivanovii
MNDRQAALDQALKQIEKQFGKGSIMKLGEHSDQNISTISSGSLALDIALGVGGYPRGRIIEVYGPESSGKTTVALHAIAEVQAQGGTAAFIDAEHALDPAYAKNLGVNIDELLLSQPDTGEQALEIAEALVRSGAVDMLVIDSVAALVPRAEIEGEMGDAHVGLQARLMSQALRKLSGAINKSKTIAIFINQIREKVGVMFGNPEITPGGRALKFYSTVRLEVRRAEQLKQGTDVMGNKTKIKVVKNKVAPPFRIAEVDIMYGEGISREGELVDMAAEVDVINKSGSWYSYKEERIGQGRENAKQYLKEHTDIRDEISKRVREEYEIDGSNKEPLAETEETLSLLDDE

SEQ ID NO: 5611 - DNA, 1047 bp, Listeria monocytogenes serotype 4b
  CDS (1)..(1047): transl_table=11
gtgaatgatcgtcaagcggcattagaccaagctttaaaacaaattgaaaaacaattcggtaaaggttccattatgaaattaggggaacattcagaccaaaatatatctactatttctagtggctcattagcattagatattgctttaggagtcggcggatatccacgtggacgtattattgaagtatacgggccagagagttccggtaaaacaactgttgcacttcatgctattgcggaagtacaagcacaaggcggaacagctgcatttatcgatgcagaacacgcactagatccagcttatgctaaaaacctaggtgtaaatattgatgaattattactatctcaacctgatacaggagagcaagcattagaaattgcagaagcattagttagaagtggtgctgtagatatgctagtaattgactccgttgcagcacttgtaccacgtgctgaaatcgaaggggagatgggtgatgcacacgttgggctacaagcacgtttaatgtcccaagcattgcgtaaactttccggtgttattaataaatcaaaaaccattgctattttcattaaccaaattcgtgaaaaagttggtgttatgtttggtaacccagagattacacctggtggtcgtgcgcttaaattctattcgactgtacgtttagaagtaagacgtgcagaacaacttaagcaaggtacagatgtaatgggtaacaaaacaaaaattaaagttgtaaaaaacaaagtagctcctccattccgtattgctgaagtggatatcatgtacggtgaaggtatttcacgtgaaggcgagcttgttgatatggccgctgaagtggatgtaatcaataagagtggttcatggtattcttacaaagaagaacgtatcggccaaggtcgtgaaaacgcaaaacaatatctaaaagaacatacagatattcgtgatgagatttcaaaacgtgttcgtgaagagtacgaaatcgacggaagcaataaagaacctttagatgaaggcgaagaaacattaagtttactagatgatgaataa

SEQ ID NO: 5612 - protein, 348 aa, Listeria monocytogenes serotype 4b
MNDRQAALDQALKQIEKQFGKGSIMKLGEHSDQNISTISSGSLALDIALGVGGYPRGRIIEVYGPESSGKTTVALHAIAEVQAQGGTAAFIDAEHALDPAYAKNLGVNIDELLLSQPDTGEQALEIAEALVRSGAVDMLVIDSVAALVPRAEIEGEMGDAHVGLQARLMSQALRKLSGVINKSKTIAIFINQIREKVGVMFGNPEITPGGRALKFYSTVRLEVRRAEQLKQGTDVMGNKTKIKVVKNKVAPPFRIAEVDIMYGEGISREGELVDMAAEVDVINKSGSWYSYKEERIGQGRENAKQYLKEHTDIRDEISKRVREEYEIDGSNKEPLDEGEETLSLLDDE

SEQ ID NO: 5613 - DNA, 1047 bp, Listeria seeligeri
  CDS (1)..(1047): transl_table=11
gtgaatgatcgtcaagcggcattagaccaagctttaaaacaaattgaaaaacaattcggtaaaggttccattatgaaattaggggagcactcagaccaaaatatatctactatttctagtggttcattagcattagatattgctttaggagttggcggatacccaagaggccgtattattgaagtatacggaccagaaagttctggtaagacaactgttgcactacacgctattgcagaagtacaagcgcaaggcggtacagcagcatttattgatgccgaacacgcattagatccagcatatgcgaagaatcttggtgttaatattgatgagttactattatcgcaaccagacacaggagaacaagctctagagattgcagaagcattagtacggagtggcgcagtcgatatgttagttattgactctgttgcagctcttgtgcctcgcgctgaaatcgaaggcgaaatgggagatgcacatgttggtttgcaagcacgtttaatgtcacaagcattacgtaaactttccggagccatcaataaatccaaaactatcgcgatctttatcaaccaaattcgagaaaaagttggcgttatgttcggaaacccagaaatcacaccaggtggtcgtgcactgaaattctattccactgttcggttagaagtaagacgtgcagaacaattgaaacaaggtacagatgtaatgggtaacaaaacgaaaatcaaagtagtaaaaaacaaagtagcgccaccgttccgtatcgctgaagtagatattatgtacggagaaggtatttcacgtgaaggcgagcttgttgatatggctgctgaagttgatgtaatcaataagagtggttcatggtattcttataaagaagagcgtatcggtcaaggccgcgaaaatgccaagcaatacttgaaagaacacacggatattcgtgatgaaatttccaaacgtgttcgtgaagaatacgaaattgacggagctagcaaagagcctcttgaagaaacagaagaaactttaagtttgctagacgatgaataa

SEQ ID NO: 5614 - protein, 348 aa, Listeria seeligeri
MNDRQAALDQALKQIEKQFGKGSIMKLGEHSDQNISTISSGSLALDIALGVGGYPRGRIIEVYGPESSGKTTVALHAIAEVQAQGGTAAFIDAEHALDPAYAKNLGVNIDELLLSQPDTGEQALEIAEALVRSGAVDMLVIDSVAALVPRAEIEGEMGDAHVGLQARLMSQALRKLSGAINKSKTIAIFINQIREKVGVMFGNPEITPGGRALKFYSTVRLEVRRAEQLKQGTDVMGNKTKIKVVKNKVAPPFRIAEVDIMYGEGISREGELVDMAAEVDVINKSGSWYSYKEERIGQGRENAKQYLKEHTDIRDEISKRVREEYEIDGASKEPLEETEETLSLLDDE

SEQ ID NO: 5615 - DNA, 1035 bp, Magnetospirillum magnetotacticum
  CDS (1)..(1035): transl_table=11
atggatagacagaaggctttggaagctgccgtcagccagatcgagcgggcattcggcaagggctccatcatgaagctgggcggcaaggatcaggtggtcgagaccgaagtggtctccacccggatcctgggccttgatgtggcgctcggcatcggcggcgttccgcgcggccgtatcatcgaggtctatggcccggaaagctcgggcaagaccaccctggcgctgcacatcatcgccgaggcgcagaagaagggcggcacctgcgccttcgtcgatgccgaacacgcgcttgacccctcctatgcccgtaagctgggcgcgctggacgagctgctgatcagcgagcccgacgctggcgagcaggccctggaaatcgccgacaccctggtacgccccggcgccgtggacgttctggtggtggattcggtggccgcattggtgccccgcggcgagctggaaggcgagatgggcgacaaccatatgggcctgcacgcccgcctgatgagccaggcgctgcgcaagctgaccggttcggtatccaagtccaaaaccatcgtcatcttcatcaaccagatccgcatgaagatcggcgtgatgttcggcaatcccgagaccaccaccggcggcaacgcgctcaagttctacgcctcggtgcgcatggagatccgccgggtcggcgccatcaaggacagggacgaggtcgtgggcaaccagacccgcgtcaaggtggtgaagaacaagctggctccgccgttcaaggtggtggacttcgacatcatgtatggcgaaggcatctccaagatgggtgagctcatcgatctgggcgtcaaggccaatgtggtgaagaaatcgggggcctggttctcctacaactccacccgcatcggccagggccgcgagaacgccaagcagttcctgcgcgacaatccggccatggccgccgagatcgaaggcgccatccgccagaatgccggcctcatctccgaggccctggccgcggtcccggacctggacggcacgccggtcgcggaataa

SEQ ID NO: 5616 - protein, 344 aa, Magnetospirillum magnetotacticum
MDRQKALEAAVSQIERAFGKGSIMKLGGKDQVVETEVVSTRILGLDVALGIGGVPRGRIIEVYGPESSGKTTLALHIIAEAQKKGGTCAFVDAEHALDPSYARKLGALDELLISEPDAGEQALEIADTLVRPGAVDVLVVDSVAALVPRGELEGEMGDNHMGLHARLMSQALRKLTGSVSKSKTIVIFINQIRMKIGVMFGNPETTTGGNALKFYASVRMEIRRVGAIKDRDEVVGNQTRVKVVKNKLAPPFKVVDFDIMYGEGISKMGELIDLGVKANVVKKSGAWFSYNSTRIGQGRENAKQFLRDNPAMAAEIEGAIRQNAGLISEALAAVPDLDGTPVAE

SEQ ID NO: 5617 - DNA, 1056 bp, Mannheimia succiniciproducens
  CDS (1)..(1056): transl_table=11
atggcaacgaatgatgaaaaatccaaagcgctggctgccgctttaggtcaaattgaaaaacaatttggtaaaggcgcaattatgaaattaggcgatacgcaagcgcttgacgtagagtcaatttcaaccggctcaatcggtttggatgtggcgcttggtatcggcggcttgccaatggggcgtgtcgttgaaattttcgggccggaatcttcaggtaaaaccacattaactctgtccgttatcgcgcaggcgcaaaaagcaggcaaggtttgcgcatttattgatgctgaacatgcgttagatccgatttatgccgcaaaattaggtgttgacgttaaagaattattagtttctcaacccgataacggagaacaggcattggaaatttgcgatgcgttggttcgttccggcgcagtggatgtgattattgtggactcggtggccgccttaaccccgaaagcggaaattgaaggcgacatgggcgattcgcatgttggtttgcaagcccgtttaatgtctcaagctttgcgtaaattaaccggtcagattaaaaacgccaattgtttagtggtatttatcaaccaaatccgtatgaagattggtgttatgttcggtaacccggaaaccaccaccggcggtaatgcgttgaaattctattcgtccgtacgtttagatattcgccgcgtaggcgcggtaaaagacggtgatgaaatcatcggtaatgaaacccgtgtgaaagtagtgaaaaacaaattagcgccgccgttccgccaagtggatttccagattctttatggcgaaggtatctctaaaaacggcgaattaatcgaacttggggtaaaacacaaactggttgataaatccggtgcgtggtatgcctacaacggcgataaaataggtcagggtaaagcgaatgccatgaaatggttagcggaaaatcctaccgttgccgccgagttggaaaataaaatccgcgccgaattgctggcaaatccggaacaggcattgttagccgatatcgaaaccaatagcgaagaaaaagaagatttcgaataa

SEQ ID NO: 5618 - protein, 351 aa, Mannheimia succiniciproducens
MATNDEKSKALAAALGQIEKQFGKGAIMKLGDTQALDVESISTGSIGLDVALGIGGLPMGRVVEIFGPESSGKTTLTLSVIAQAQKAGKVCAFIDAEHALDPIYAAKLGVDVKELLVSQPDNGEQALEICDALVRSGAVDVIIVDSVAALTPKAEIEGDMGDSHVGLQARLMSQALRKLTGQIKNANCLVVFINQIRMKIGVMFGNPETTTGGNALKFYSSVRLDIRRVGAVKDGDEIIGNETRVKVVKNKLAPPFRQVDFQILYGEGISKNGELIELGVKHKLVDKSGAWYAYNGDKIGQGKANAMKWLAENPTVAAELENKIRAELLANPEQALLADIETNSEEKEDFE

SEQ ID NO: 5619 - DNA, 1083 bp, Mesorhizobium sp
  CDS (1)..(1083): transl_table=11
atggctcagaacacattgcggcttgtagaggaaaacggggtggacaagtccaaggcattggatgcagcgctgtcgcaaatcgagcgggctttcggcaagggctcgatcatgcggcttggcgccaacgacaaggtcgttgaaatcgagacgatatcgaccggctcgctcgggctggacattgcgttgggcgtgggcggcctgccgcgcggccgcattatcgagatctatgggccggaaagctcgggcaagacgacgctggccctgcatacggttgccgaagcgcagaagaagggcggcatctgcggtttcatcgatgccgagcatgcactcgatcccgtttatgcccgtaagctgggcgtggatctggagaacctgctcatttcccagccggatacgggcgagcaggccttggagatttgcgacacgctggttcgttcgggcgcagtggatgtgatcgtggtggactccgtggcggcccttaccccccgcgccgagatcgaaggcgagatgggcgagtcgcttccaggcatgcaggcccgcctgatgagccaagcgctgaggaagctcaccgcatccatttcgcgctccaatacgatggtgatcttcatcaaccagatccgcatgaagatcggcgtcatgttcggttcgccggagacgacgaccggcggcaacgcgctgaaattctatgcatcggttcgtctcgacatccgccgtatcggctcggtcaaggaccgggaagagacggtcggcaaccagacgcgcgtgaaggtggtcaaaaacaagatggcgccacccttcaagcaggtcgaattcgacatcatgtatggcgaaggcgtttcgaagaccggcgagcttgtcgatctcggagtgaaagcgggcgtggtggagaaggccggcgcctggttctcctataactcccagcgcctcggccaggggcgggagaacgcgaagcttttcctgcgcgacaatccggaggtcgcgcgcgagatcgagttggccctcaggcagaatgccggccttatcgccgagcgcttccttgaggcagacaaggacggttcgctggacgacgccgccgaaagctga

SEQ ID NO: 5620 - protein, 360 aa, Mesorhizobium sp
MAQNTLRLVEENGVDKSKALDAALSQIERAFGKGSIMRLGANDKVVEIETISTGSLGLDIALGVGGLPRGRIIEIYGPESSGKTTLALHTVAEAQKKGGICGFIDAEHALDPVYARKLGVDLENLLISQPDTGEQALEICDTLVRSGAVDVIVVDSVAALTPRAEIEGEMGESLPGMQARLMSQALRKLTASISRSNTMVIFINQIRMKIGVMFGSPETTTGGNALKFYASVRLDIRRIGSVKDREETVGNQTRVKVVKNKMAPPFKQVEFDIMYGEGVSKTGELVDLGVKAGVVEKAGAWFSYNSQRLGQGRENAKLFLRDNPEVAREIELALRQNAGLIAERFLEADKDGSLDDAAES

SEQ ID NO: 5621 - DNA, 1044 bp, Methylococcus capsulatus
  CDS (1)..(1044): transl_table=11
atggacgagaacaaacgcaaggccttgggtgccgctctttcccagatcgagaaacagttcggcaagggatcggtgatgcgcatgggcgatgtcgcggcggtccgggacatcgacgtgattcccaccggctccctggcgctggacatcgcgctgggctgcggcggtttgccgcgtggtcgcatcgtcgagatttacgggccggagtcctcgggcaagacgacgctgactctggaggtcatcgcccaggcgcagaagaccggcggcgtggcggctttcgtggatgccgagcatgccctggacccggtctatgccgagaagatcggagtgaacctcgacgatctgctggtgtcccagccggataccggcgagcaggcgctggaaatcgcggacgtgctggtgcgttccggcggcgtggacgtcgtggtgatcgactcggtggcggcgctgacgcccaaggccgaactcgaaggcgagatgggcgattcgcacatgggtctgcaggccagactgatgtcgcaggccttgcgcaagctgaccgccaacatcaagcgctccaacaccctggtgatcttcatcaatcagatccgcatgaagatcggcgtgatgttcggcaatccggagaccaccaccggcggtaacgcgctcaagttctacgcctcggtgcggctggacatccgccgttcgggggcgatcaagaacggcgacgaggtgatcgggaacgaaacccgcgtcaaggtcgtgaagaacaaggtggctccgccgttccgcaccgccgacttcgagattctctatggcgagggcatctcgcgcgagggcgaactgatcgacctcggcgtgaaccacgacatcgtacagaagtccggttcctggtacagctatggcggcgaccgcatcggccagggcaaggacaacgtccggatctatctcaaggagcatccggaggtcgcggctgccatcgaggcggccgttcgcgagaaggcgttggccgggttccagcacgcaccgtccgccgagcgtgcagcgctggaggagagcgggttctga

SEQ ID NO: 5622 - protein, 347 aa, Methylococcus capsulatus
MDENKRKALGAALSQIEKQFGKGSVMRMGDVAAVRDIDVIPTGSLALDIALGCGGLPRGRIVEIYGPESSGKTTLTLEVIAQAQKTGGVAAFVDAEHALDPVYAEKIGVNLDDLLVSQPDTGEQALEIADVLVRSGGVDVVVIDSVAALTPKAELEGEMGDSHMGLQARLMSQALRKLTANIKRSNTLVIFINQIRMKIGVMFGNPETTTGGNALKFYASVRLDIRRSGAIKNGDEVIGNETRVKVVKNKVAPPFRTADFEILYGEGISREGELIDLGVNHDIVQKSGSWYSYGGDRIGQGKDNVRIYLKEHPEVAAAIEAAVREKALAGFQHAPSAERAALEESGF

SEQ ID NO: 5623 - DNA, 1029 bp, Methylomonas clara
  CDS (1)..(1029): transl_table=11
atggatgacaacaaaagcaaagcgctcgccgccgcactttcccaaattgaaaaacagttcggcaaaggctccattatgcgcatgggcgatgctgatatcggcgaagacctgcaagtggtttccaccggctccctgggtctggatatcgcactgggggtgggtggcttgccacgtggccgtattatcgaaatttatggccctgagtcttcaggtaaaaccacattgaccttgtctgccattgccgaaatgcaaaagctgggtggtgtcgcagcatttatcgacgcggacgatgccctggacccgcaatacgcgtccaagctgggcgtgaatgtgccagagttgttgatttcacagccagacaccggcgaacaggcgctggaaatcgccgatatgctggtgcgctccggttccgtggatatcgtggtggtggactcggtagctgccttgactccgcgtgccgaaattgaaggtgaaatgggcgacagccatatgggtttgcaggcacgcttgatgtcacaggcattgcgtaaactgactggtaacatcaagcgtaccaatacgctggtgatttttattaaccagatccgtatgaagatcggtgtcatgttcggcaatccggaaacgaccaccggcggtaacgcgctcaagttttactcctcagtccgtctcgatatccgccgtaccggtgcgattaaaaaaggcgacgaggtcattggctccgagaccaaggtgaaggtgatcaagaacaaggttgcgccgccgttcaagcaggctgaatttgacatcatgtacggcgaaggtatttcccgtctgggcgaaatcattgagttgggtacaaatttgaaactggttgagaaatcaggtgcgtggtacagctacaacggtgaaaaaatcggccagggtaaagaaaacgctaaagagttcctgcgcgagaatccagcgattgcggcagaaattgaagccaagattcgcgacaactctaatgtgctggcagatagcatgactgcggccagaagtgaggacgattaa

SEQ ID NO: 5624 - protein, 342 aa, Methylomonas clara
MDDNKSKALAAALSQIEKQFGKGSIMRMGDADIGEDLQVVSTGSLGLDIALGVGGLPRGRIIEIYGPESSGKTTLTLSAIAEMQKLGGVAAFIDADDALDPQYASKLGVNVPELLISQPDTGEQALEIADMLVRSGSVDIVVVDSVAALTPRAEIEGEMGDSHMGLQARLMSQALRKLTGNIKRTNTLVIFINQIRMKIGVMFGNPETTTGGNALKFYSSVRLDIRRTGAIKKGDEVIGSETKVKVIKNKVAPPFKQAEFDIMYGEGISRLGEIIELGTNLKLVEKSGAWYSYNGEKIGQGKENAKEFLRENPAIAAEIEAKIRDNSNVLADSMTAARSEDD

SEQ ID NO: 5625 - DNA, 1035 bp, Methylobacillus flagellatus
  CDS (1)..(1035): transl_table=11
atggatgaaaacagaagcaaagcgctagccgccgccctctcgcaaatcgagaaacaatttggcaaaggctctatcatgcgcatgggcgacaccgatgtcgctgctgacatccaggcagtttctaccggctccctgggcctggacatcgccctgggtattggcggcttgccgcgcggccgcatcgtcgagatttacggcccggaatcctccggcaagaccacgctgacattgtctgtgatcgcgcagatgcaaaagctgggcggcacggcagcattcatcgacgcagaacacgcgctcgacccggtctacgcgcagaagctcggtgtcaatgtttccgatctgctcatctcccagcccgacaccggcgaacaggcgctcgagatcgccgacatgctggtgcgctccggctcggtagatgtcgtggtggtcgactccgtcgctgcgctgacgcccaaggccgaaatcgaaggcgaaatgggcgactcgcacatgggcctgcaggcccgcctgatgtcgcaggcactgcgcaagctcaccgccaacatcaagcgcaccaacaccttggtcatcttcatcaaccagatccgcatgaagatcggcgtgatgttcggcaaccccgagaccaccaccggcggcaatgcactcaagttctacgcctccgtgcgcctggacatccgccgcaccggcgcgatcaagaagggggacgaggtcacgggatcagaaacccgggtcaaggtagtgaagaacaaagtggcccctccgttcaagcaagcggaattcgacatcctctatggcgaaggtatctcgcgcgagggcgaaatcatcgaactcggcgtcaaccttaaattgatcgagaaggccggtgcctggtacagctacaagggcgagaagatcggccagggcaaggacaacgcgcgcgagttcctcagggagcacccggaaatcgccaatgagatcgacgccaagattcgcgagcattccaatctggccaacgccgcgatgacgacggcaccggatgaagaaagcgacgaataa

SEQ ID NO: 5626 - protein, 344 aa, Methylobacillus flagellatus
MDENRSKALAAALSQIEKQFGKGSIMRMGDTDVAADIQAVSTGSLGLDIALGIGGLPRGRIVEIYGPESSGKTTLTLSVIAQMQKLGGTAAFIDAEHALDPVYAQKLGVNVSDLLISQPDTGEQALEIADMLVRSGSVDVVVVDSVAALTPKAEIEGEMGDSHMGLQARLMSQALRKLTANIKRTNTLVIFINQIRMKIGVMFGNPETTTGGNALKFYASVRLDIRRTGAIKKGDEVTGSETRVKVVKNKVAPPFKQAEFDILYGEGISREGEIIELGVNLKLIEKAGAWYSYKGEKIGQGKDNAREFLREHPEIANEIDAKIREHSNLANAAMTTAPDEESDE

SEQ ID NO: 5627 - DNA, 1035 bp, Methylobacillus flagellatum
  CDS (1)..(1035): transl_table=11
atggatgaaaacagaagcaaagcgctagccgccgccctctcgcaaatcgagaaacaatttggcaaaggctctatcatgcgcatgggcgacaccgatgtcgctgctgacatccaggcagtttctaccggctccctgggcctggacatcgccctgggtattggcggcttgccgcgcggccgcatcgtcgagatttacggcccggaatcctccggcaagaccacgctgacattgtctgtgatcgcgcagatgcaaaagctgggcggcacggcagcattcatcgacgcagaacacgcgctcgacccggtctacgcgcagaagctcggtgtcaatgtttccgatctgctcatctcccagcccgacaccggcgaacaggcgctcgagatcgccgacatgctggtgcgttccggctcggtagatgtcgtggtggtcgactccgtcgctgcgctgacgcccaaggccgaaatcgaaggcgaaatgggcgactcgcacatgggcctgcaggcccgcctgatgtcgcaggcactgcgcaagctcaccgccaacatcaagcgcaccaacaccttggtcatcttcatcaaccagatccgcatgaagatcggcctgatgttcggcaaccccgagaccaccaccggcggcaatgcactcaagttctacgcctccgtgcgcctggacatccgccgcaccggcgcgatcaagaagggggacgaggtcacgggatcagaaacccgggtcaaggtagtgaagaacaacgtggcccctccgttcaagctagcggaattcgacatcctctatggcgaaggtatctcgcgcgagggcgaaatcatcgaactcggcgtcaaccttaaattgatcgagaaggccggtgcctggtacagctacaagggcgagaagatcggccagggcaaggacaacgcgcgcgagttcctcagggagcacccggaaatcgccaatgagatcgacgccaagattcgcgagcattccaatctggccaacgccgcgatgacgacggcaccggatgaagaaagcgacgaataa

SEQ ID NO: 5628 - protein, 344 aa, Methylobacillus flagellatum
MDENRSKALAAALSQIEKQFGKGSIMRMGDTDVAADIQAVSTGSLGLDIALGIGGLPRGRIVEIYGPESSGKTTLTLSVIAQMQKLGGTAAFIDAEHALDPVYAQKLGVNVSDLLISQPDTGEQALEIADMLVRSGSVDVVVVDSVAALTPKAEIEGEMGDSHMGLQARLMSQALRKLTANIKRTNTLVIFINQIRMKIGLMFGNPETTTGGNALKFYASVRLDIRRTGAIKKGDEVTGSETRVKVVKNNVAPPFKLAEFDILYGEGISREGEIIELGVNLKLIEKAGAWYSYKGEKIGQGKDNAREFLREHPEIANEIDAKIREHSNLANAAMTTAPDEESDE

SEQ ID NO: 5629 - DNA, 1053 bp, Mycobacterium avium
  CDS (1)..(1053): transl_table=11
atgacgcaagcccccgaccgcgagaaggctctcgaactggcgatggcccagatcgaaaagagttacgggaaaggctcggtgatgcgtctcggcgacgagatgcgtcagccgatctcggtcatcccgaccggatccatcgccctggacgtcgccctgggcatcggcggccttccccgcggccgggtcgtggagatctacggcccggaatcctcgggtaagaccaccgtcgccctgcacgcggtggccaacgcccaggccgccggcggtgtcgcggcgttcatcgacgccgagcacgcgctggaccccgagtacgccaagaagctcggcgtggacaccgattcgctgctggtcagccagccggacacgggggagcaggcgctcgagatcgccgacatgctgatccgctccggcgcgctggacatcctggtcatcgactcggtggccgcgctggtgccgcgcgccgagctggagggcgagatgggggacagccacgtcgggctgcaggcccggctgatgagccaggcgctgcgaaaaatgaccggcgcgctgaacaattcgggcaccaccgcgatcttcatcaaccagctgcgggagaagatcggggtgatgttcggcagcccggagaccacgacgggtggcaaggcgttgaagttctacgcctcggtgcgcatggacgtgcgccggatcgagacgctcaaggacggcaccaacgcggtcggcaaccgcacccgggtcaagatcgtcaagaacaaggtgtcgccgccgttcaagcaggccgagttcgacatcctctacggccggggaatcagccgggagggctcgctgatcgacatgggtgtggatcagggcttcatccgcaagtccggttcctggttcacctatgagggcgagcagctcggccagggcaaggagaacgcccgcaccttcttgatggagaacgacgaagtcgccaacgagatcgagaagaagatcaaggaaaagctcggcattggcgcggtcgtgaccgatgacttgtccgatgacggcgtcctgcccgcccccgtcgacttctga

SEQ ID NO: 5630 - protein, 350 aa, Mycobacterium avium
MTQAPDREKALELAMAQIEKSYGKGSVMRLGDEMRQPISVIPTGSIALDVALGIGGLPRGRVVEIYGPESSGKTTVALHAVANAQAAGGVAAFIDAEHALDPEYAKKLGVDTDSLLVSQPDTGEQALEIADMLIRSGALDILVIDSVAALVPRAELEGEMGDSHVGLQARLMSQALRKMTGALNNSGTTAIFINQLREKIGVMFGSPETTTGGKALKFYASVRMDVRRIETLKDGTNAVGNRTRVKIVKNKVSPPFKQAEFDILYGRGISREGSLIDMGVDQGFIRKSGSWFTYEGEQLGQGKENARTFLMENDEVANEIEKKIKEKLGIGAVVTDDLSDDGVLPAPVDF

SEQ ID NO: 5631 - DNA, 1050 bp, Mycobacterium smegmatis
  CDS (1)..(1050): transl_table=11
atggcgcagcaggccccagatcgcgaaaaggccctcgaactggcgatggcccagatcgacaagaatttcggcaaaggctcggtgatgcgcctcggcgaagaggtgcgccagccgatctcggtgatccccaccggctccatctcgctggatgtggcgctcggcatcggcggcctgccgcggggccgcgtcatcgagatctacggcccggagtcctcgggtaagaccaccgtggccctgcatgccgtcgccaacgcgcaggccgcgggcggtatcgcggcgttcatcgacgccgagcacgcgctggatcccgagtacgccaagaagctgggtgtggacaccgactcgctgctggtgtcgcagcccgacaccggtgagcaggcgctggagatcgccgacatgctggtgcggtccggcgcgctggacatcatcgtcatcgactcggtcgccgccctggtgccgcgcgccgagatcgagggcgagatgggtgacagccacgtcggcctgcaggcccgcctgatgagccaggcgctgcgcaagatgaccggcgcgttgaacaactcgggcaccaccgcgatcttcatcaaccagctccgcgagaagatcggtgtgatgttcggctcgcccgagaccaccacgggcggtaaggcactgaagttctacgcctcggtccgcctcgacgtgcgccgtatcgagacgctcaaggacggcaccgacgcggtcggtaaccgcacccgcgtcaaggtcgtcaagaacaaggtctccccgccgttcaagcaggccgagttcgacatcctctacggccagggcatcagccgcgagggttcgctcatcgacatgggcgtcgagcacggcttcatccgcaagtccgggtcctggttcacctacgagggtgagcagctgggccagggcaaggagaacgcccgcaagttcctgctggagaacaccgacgtcgccaacgagatcgagaagaagatcaaagagaagctcggtatcggcgccgtcgtgaccgctgaagccgatgacgtcctcccggccccggttgacttctga

SEQ ID NO: 5632 - protein, 349 aa, Mycobacterium smegmatis
MAQQAPDREKALELAMAQIDKNFGKGSVMRLGEEVRQPISVIPTGSISLDVALGIGGLPRGRVIEIYGPESSGKTTVALHAVANAQAAGGIAAFIDAEHALDPEYAKKLGVDTDSLLVSQPDTGEQALEIADMLVRSGALDIIVIDSVAALVPRAEIEGEMGDSHVGLQARLMSQALRKMTGALNNSGTTAIFINQLREKIGVMFGSPETTTGGKALKFYASVRLDVRRIETLKDGTDAVGNRTRVKVVKNKVSPPFKQAEFDILYGQGISREGSLIDMGVEHGFIRKSGSWFTYEGEQLGQGKENARKFLLENTDVANEIEKKIKEKLGIGAVVTAEADDVLPAPVDF

SEQ ID NO: 5633 - DNA, 1044 bp, Mycobacterium sp
  CDS (1)..(1044): transl_table=11
atggcaccgcaggcacccgatcgcgagaaggccctcgaactggcgctcgcgcagatcgagaagagtcacggtaaaggctcggtgatgcggctcggcgacgaggtccgcgcgccgatctcggtcatcccgaccggctccatcgccctggacgtggcgctgggcatcggcggcctgccgcgcggccgcgtcatcgagatctacggtccggagtcctccggtaagaccaccgtcgcattgcacgcggtggccaacgcccaggccgccggcggcatcgcggcgttcatcgacgccgagcacgcgctggatcccgactacgccaagaagctcggggtggacaccgactcgctgctggtctcccagcccgacaccggtgagcaggctctcgagatcgccgacatgctgatccgctccggtgcgctggacatcctggtcatcgactcggtcgccgcactggtgccccgcgccgagatcgagggtgagatgggcgacagtcacgtcggtctgcaggcccggttgatgagccaggcgctgcgcaagatcaccggcgcgctgagcaattcgggcaccaccgcgatcttcatcaaccagctccgcgagaagatcggcgtgatgttcggctcgcccgagaccaccacgggcggtaaggcgctgaagttctatgcctcggtccgcatggatgtccgccgcatcgagaccctcaaggacggcaccgatgcggtgggtaaccgcacccgggtcaagatcgtcaagaacaaggtgtcgccgccgttcaagcaggccgaattcgacatcctctacggcaagggcatcagcaaggaaggctcgctcatcgacatgggcgtggagcacggcttcatccgcaagtccggttcctggttcacctacgagggggagcagttgggccagggcaaggagaacgcccgtaagttcctgctggagaacggcgatgtggccaacgagatcgagaagaagatcaaagagaagctcaacatcggtgccgtggtgaccgctgatgacgtccttcccgcacccgtcgacttctga

SEQ ID NO: 5634 - protein, 347 aa, Mycobacterium sp
MAPQAPDREKALELALAQIEKSHGKGSVMRLGDEVRAPISVIPTGSIALDVALGIGGLPRGRVIEIYGPESSGKTTVALHAVANAQAAGGIAAFIDAEHALDPDYAKKLGVDTDSLLVSQPDTGEQALEIADMLIRSGALDILVIDSVAALVPRAEIEGEMGDSHVGLQARLMSQALRKITGALSNSGTTAIFINQLREKIGVMFGSPETTTGGKALKFYASVRMDVRRIETLKDGTDAVGNRTRVKIVKNKVSPPFKQAEFDILYGKGISKEGSLIDMGVEHGFIRKSGSWFTYEGEQLGQGKENARKFLLENGDVANEIEKKIKEKLNIGAVVTADDVLPAPVDF

SEQ ID NO: 5635 - DNA, 1047 bp, Neisseria gonorrhoeae
  CDS (1)..(1047): transl_table=11
atgtcagacgacaaaagcaaagcccttgccgccgcactggcgcaaatcgaaaaaagtttcggcaaaggcgccatcatgaaaatggacggcagccagcaggaagaaaacctcgaagtcatttccaccggatcgctcggattagacctcgccctcggagtcggcggcctgccgcgcgggcgcatcgtcgaaatcttcggccccgaatcctccggcaaaaccacactctgcctcgaagccgtcgcccaatgccagaaaaacggcggcgtgtgcgcctttgtcgatgccgaacacgccttcgatcccgtttacgcccgcaaactcggcgtaaaagtcgaagagctttacctgtcccagcccgataccggcgaacaggctttggaaatctgcgacacgctcgtccgttcgggcggcatagatatggtagtcgtcgattccgtagccgcactcgtccccaaagccgaaatcgaaggcgatatgggggacagccacgtcggactgcaggcgcgcctgatgagtcaggctttgcgcaaactgaccggacacatcaaaaaaaccaatacgctggttgtgttcatcaaccaaatccgaatgaagatcggcgtaatgttcggcagccccgagaccacgaccggcggcaacgcgctgaaattctattcttccgtccgcctcgacatccgccgcaccggatccatcaaaaaaggcgaagaagtattgggcaacgaaacccgcgtcaaagtcatcaaaaacaaagtcgcccccccgttccgtcaggcagagtttgacatcctctacggagaaggcatcagttgggaaggcgaattgatcgacatcggcgtgaaaaacgacatcatcaacaaatccggcgcgtggtacagctacaacggcgcgaaaatcggtcagggcaaagacaacgtccgcgtctggctgaaagaaaaccccgaaatttccgacgaaatcgacgcaaaaatccgcgccctcaacggcgtagaaatgcacatcaccgaagggacgcaggacgaaaccgacggcgaacgacccgaagaataa

SEQ ID NO: 5636 - protein, 348 aa, Neisseria gonorrhoeae
MSDDKSKALAAALAQIEKSFGKGAIMKMDGSQQEENLEVISTGSLGLDLALGVGGLPRGRIVEIFGPESSGKTTLCLEAVAQCQKNGGVCAFVDAEHAFDPVYARKLGVKVEELYLSQPDTGEQALEICDTLVRSGGIDMVVVDSVAALVPKAEIEGDMGDSHVGLQARLMSQALRKLTGHIKKTNTLVVFINQIRMKIGVMFGSPETTTGGNALKFYSSVRLDIRRTGSIKKGEEVLGNETRVKVIKNKVAPPFRQAEFDILYGEGISWEGELIDIGVKNDIINKSGAWYSYNGAKIGQGKDNVRVWLKENPEISDEIDAKIRALNGVEMHITEGTQDETDGERPEE

SEQ ID NO: 5637 - DNA, 1047 bp, Neisseria meningitidis serogroup A
  CDS (1)..(1047): transl_table=11
atgtcagacgacaaaagcaaagcccttgccgccgcactggcgcaaatcgaaaaaagtttcggcaaaggcgccatcatgaaaatggacggcagccagcaggaagaaaacctcgaagtcatttccaccggatcgctcggattagacctcgccctcggagtcggcggtctgccgcgcgggcgcatcgtcgaaatcttcggccccgaatcctccggcaaaaccaccctctgcctcgaagccgtcgcccaatgccagaaaaacggcggcgtgtgcgcctttgtcgatgccgaacacgccttcgatcccgtttacgcccgcaaactcggcgtaaaagtcgaagagctttacctgtcccagcccgataccggcgaacaggctttggaaatctgcgacacactcgtccgttcgggcggcatagatatggtagtcgtcgattccgtagccgcactcgtccccaaagccgaaatcgaaggcgatatgggggacagccatgtcggactgcaggcgcgcctgatgagtcaggctttgcgcaaactgaccggacacatcaaaaaaaccaacacgctggttgtgttcatcaaccaaatccggatgaagatcggcgtaatgttcggcagccccgaaaccaccaccggcggcaacgcgctgaaattctattcttccgtccgcctcgacatccgccgcaccggatccatcaaaaaaggcgaagaagtattgggcaacgaaacccgcgtcaaagtcatcaaaaacaaagtcgcccccccgttccgtcaggcagagtttgacatcctctacggagaaggcatcagttgggaaggcgaattgatcgacatcggcgtgaaaaacgacatcatcaacaaatccggcgcgtggtacagctacaacggtgcgaaaatcgggcagggcaaggacaacgtccgtgtctggttgaaggagaatcctgaggttgccgatgagatcgatgcgaaaatccgcgccctcaacggcgtagaaatgcacatcaccgaagggacacaggacgaaaccgacggcgaacgccccgaagaataa

SEQ ID NO: 5638 - protein, 348 aa, Neisseria meningitidis serogroup A
MSDDKSKALAAALAQIEKSFGKGAIMKMDGSQQEENLEVISTGSLGLDLALGVGGLPRGRIVEIFGPESSGKTTLCLEAVAQCQKNGGVCAFVDAEHAFDPVYARKLGVKVEELYLSQPDTGEQALEICDTLVRSGGIDMVVVDSVAALVPKAEIEGDMGDSHVGLQARLMSQALRKLTGHIKKTNTLVVFINQIRMKIGVMFGSPETTTGGNALKFYSSVRLDIRRTGSIKKGEEVLGNETRVKVIKNKVAPPFRQAEFDILYGEGISWEGELIDIGVKNDIINKSGAWYSYNGAKIGQGKDNVRVWLKENPEVADEIDAKIRALNGVEMHITEGTQDETDGERPEE

SEQ ID NO: 5639 - DNA, 1032 bp, Nitrosomonas europaea
  CDS (1)..(1032): transl_table=11
atggacgaaaacaaaaataaggcactttcagcagcgcttgcccagattgagaagcagtacggcaagggttcgatcatgcggcttggcgacagtgatgtggcaaaagatattcaggtggtatccacgggttcgctgggtctggatattgcactgggtgtgggcggccttccgcgcggacgcatcatcgagatttacggaccggaatcttcgggtaaaactaccctgacgctgcaagctatagccgaaatgcagaaactgggcgggacggcggcttttatcgatgcggaacatgcactggatccgcagtatgctcagaaaatcggcgtcaatgttcaggaattactgatttcccagccggataacggtgaacaggcactggaaattaccgatatgctggttcgatccggatcggtcgatgtggtggtggtcgactcagtggcagcgctgactccccgtgctgaaatagaaggggagatgggtgagccgcagatggggctgcaggcaaggctcatgtcccaggctttgcgcaagctgacggccaatatcaagcgtaccaataccatggtgattttcatcaaccagatacgtatgaagatcggggtgatatttggtaatcctgagacgaccacgggaggaaatgcgctgaaattttatgcttctgtgcgtctggatatccgccgtactggttcgatcaagcgtggtgaggaaatggtcgggaacgaaacccgggtcaagatcgttaaaaacaaggttgccccacctttcaaacaggcagatttcgatattttgtatggcgaaggtatctcgcgtgaaagcgaaatcatcgaactcggtgtattgcacaaattgatcgagaaagcgggggcctggtactcctataatggcgaaaagatagggcagggcaaggataatgtgcgtgattatctgaaagagcacaagagtattgcgcatgagatcgagcagaaaatacgcgctgccgtcgggcttgcagagacagacagtcgggttgttccaccctcctccggtgaataa

SEQ ID NO: 5640 - protein, 343 aa, Nitrosomonas europaea
MDENKNKALSAALAQIEKQYGKGSIMRLGDSDVAKDIQVVSTGSLGLDIALGVGGLPRGRIIEIYGPESSGKTTLTLQAIAEMQKLGGTAAFIDAEHALDPQYAQKIGVNVQELLISQPDNGEQALEITDMLVRSGSVDVVVVDSVAALTPRAEIEGEMGEPQMGLQARLMSQALRKLTANIKRTNTMVIFINQIRMKIGVIFGNPETTTGGNALKFYASVRLDIRRTGSIKRGEEMVGNETRVKIVKNKVAPPFKQADFDILYGEGISRESEIIELGVLHKLIEKAGAWYSYNGEKIGQGKDNVRDYLKEHKSIAHEIEQKIRAAVGLAETDSRVVPPSSGE

SEQ ID NO: 5641 - DNA, 1044 bp, Nocardia farcinica
  CDS (1)..(1044): transl_table=11
atggcaccacaggcctacgaccgcgacaaggccctcgagctcgcgctcgcccaggtcgagaagagcttcggcaagggcgcggtgatgcggctcggcgaggaggcccgccagcccatctcggtgatcccgacgggctccatcgcgctggacgtggcgctgggcatcggcggcctgccccgcggccgcatcgtcgagatctacggtccggaatcctccggtaagaccaccgtcgccctgcacgcggtcgccaacgcgcaggccgcgggcggtgtggccgccttcatcgacgccgagcacgcgctcgaccccgactatgcgcgcaagctcggcgtcgacaccgacgccctgctggtctcccagcccgacaccggtgagcaggcgctcgagatcgccgacatgctggtccgctccggcgccatcgacatcatcgtcatcgactcggtggccgcgctggtgccccgcgccgagatcgagggcgagatgggcgacagccacgtcggcctgcaggcccggctgatgagccaggcgctgcgcaagatgaccagcgcgctcaacaactccggtaccaccgccatcttcatcaaccagctgcgcgagaagatcggtgtcatgttcggctcgcccgagaccaccaccggcggcaaggcgctgaagttctacgcctcggtgcgcctggacgtgcgccgcatcgagaccctcaaggacggcagcgacgcggtcggcaaccgcacccgcgtcaaggtcgtcaagaacaaggtctccccgccgttcaagcaggccgagttcgacatcctctacggccagggcatctccaaggagggttcgctgatcgacatgggtgtggagcagggcttcatccgcaagtccggctcctggtacacctacgagggcgaccagctgggccagggcaaggagaacgcccgcaagttcctgctggagaacaccgacgtccgcgacgagatcgagaagaagatcaaggaaaagctcggcatcggcgccgatctgaccgccgaggacgcggccgaggtgcccgccgatttctga

SEQ ID NO: 5642 - protein, 347 aa, Nocardia farcinica
MAPQAYDRDKALELALAQVEKSFGKGAVMRLGEEARQPISVIPTGSIALDVALGIGGLPRGRIVEIYGPESSGKTTVALHAVANAQAAGGVAAFIDAEHALDPDYARKLGVDTDALLVSQPDTGEQALEIADMLVRSGAIDIIVIDSVAALVPRAEIEGEMGDSHVGLQARLMSQALRKMTSALNNSGTTAIFINQLREKIGVMFGSPETTTGGKALKFYASVRLDVRRIETLKDGSDAVGNRTRVKVVKNKVSPPFKQAEFDILYGQGISKEGSLIDMGVEQGFIRKSGSWYTYEGDQLGQGKENARKFLLENTDVRDEIEKKIKEKLGIGADLTAEDAAEVPADF

SEQ ID NO: 5643 - DNA, 1053 bp, Nocardioides sp
  CDS (1)..(1053): transl_table=11
atggctggaggagaccgcgagaaggccctggacgccgcactcgccaacatcgagaagcagttcggcaagggttcggtcatgcgcctcggtgacgaggtccgggccccgctcgagatcatcccgagcggctcgatcgccctcgacgtcgcactcggcctgggcggcttcccgcgcggtcgcgtcgtggagatctacggcccggagtcctcgggcaagacgaccgtcgccctgcacgcggtggccaacgcccagcgcgccggcggcatcgtggcgttcatcgacgccgagcacgccctcgaccccgactacgcgaagaacctcggcgtcgacaccgacgcgttgctggtctcccagcccgactccggtgagcaggcgctcgagatcgcggacatgctgatccgttccggtgcgctcgacctgatcgtgatcgactcggtcgccgcgctggtgccccgggccgagatcgagggcgagatgggcgacagtcacgtcggcctccaggcccgcctgatgagccaggcgctgcggaagatgaccggtgcgctcaacaactccaagaccacgatgatcttcatcaaccagctgcgcgagaagatcggcgtgatgttcggctcgcccgagaccaccaccggcggcaaggcactgaagttctacgcctcggtccgcctcgacgtgcgccgcatcgagacgctcaaggacggcaccgacatggtcggcaaccggacccgcgtcaaggtcgtgaagaacaaggtggccccgccgttcaagcaggccgagttcgacatcatgtacggcaagggcatcagccgcgagggtggcctgatcgacgtcggcgtcgaggcgggcctggttcgcaaggccggtgcctggtacacctacgagggcgaccagctcggccagggcaaggagaacgctcgcgccttcctgcgcgacaaccccgacctggccaacgagctcgagaagaagatcctcgagaagctcggcgtcgggccgaccgtcgaccaggacgtggccgagctgccggcggagccgatcggtgtcggcgacttctga

SEQ ID NO: 5644 - protein, 350 aa, Nocardioides sp
MAGGDREKALDAALANIEKQFGKGSVMRLGDEVRAPLEIIPSGSIALDVALGLGGFPRGRVVEIYGPESSGKTTVALHAVANAQRAGGIVAFIDAEHALDPDYAKNLGVDTDALLVSQPDSGEQALEIADMLIRSGALDLIVIDSVAALVPRAEIEGEMGDSHVGLQARLMSQALRKMTGALNNSKTTMIFINQLREKIGVMFGSPETTTGGKALKFYASVRLDVRRIETLKDGTDMVGNRTRVKVVKNKVAPPFKQAEFDIMYGKGISREGGLIDVGVEAGLVRKAGAWYTYEGDQLGQGKENARAFLRDNPDLANELEKKILEKLGVGPTVDQDVAELPAEPIGVGDF

SEQ ID NO: 5645 - DNA, 1071 bp, Paracoccus denitrificans
  CDS (1)..(1071): transl_table=11
atggcaggggcaacacttttcgacatgaacgacaagcgatccgcagacaagcagaaggcgctagacagcgcattggcccagatcgaacggcagttcggcaaaggctcgatcatgaagctgggcgccgacaatccggtggccgagatcgaggccacctcgaccggctcgctggggctcgacatcgcgctggggatcggcggtctgcccaagggccggatcatcgagatattcgggccggaaagctcgggcaagaccacgctgacgctgcatgtcgtggcggaagagcagaagaaaggcggcgtttgcgcctttgtcgatgccgaacatgcgctggacccgcaatatgccaagaagctgggcgtcaatctggacgagttgctgatcagccagcccgatacgggcgagcaggcgcttgagattgtcgatacgctggtggcttccggtgcggtcagcctggtggtggtcgattcggtcgcggcgctgacccccaagtccgagatcgaaggtgacatgggcgacatgcagatgggcagccaggcccggctgatgagccaggcgatgcgcaagctgaccgccagcatcggccggtcgaactgtatggtgatcttcatcaaccagatccgcatgaagatcggcgtgatgttcggaagcccagagacgacgaccggcggcaatgccctgaagttttatgcctcggtgcgcctggatatccgccgcgccggctcgatcaaggaccgtgacgaggtgaccggcaacgccactcgcgtcaaggtggtcaagaacaaggtcgcgccacctttccgtcaggtcgagttcgacatcatgtatggcgagggcatctcgaaggtcggcgaactgatcgacttgggcatcaaggccggcgtggtcgaaaaatcggggtcgtggtactcctatggcgacgagcgcatcggccagggccgtgagaatgccaagcaattcctgcgcgatcatcccgatatggcccatgcgatcgaggacaagatccgcgccagccacggcctggatttcggcgtcgcggacgatggcgatgaggtgatggccgaggattga

SEQ ID NO: 5646 - protein, 356 aa, Paracoccus denitrificans
MAGATLFDMNDKRSADKQKALDSALAQIERQFGKGSIMKLGADNPVAEIEATSTGSLGLDIALGIGGLPKGRIIEIFGPESSGKTTLTLHVVAEEQKKGGVCAFVDAEHALDPQYAKKLGVNLDELLISQPDTGEQALEIVDTLVASGAVSLVVVDSVAALTPKSEIEGDMGDMQMGSQARLMSQAMRKLTASIGRSNCMVIFINQIRMKIGVMFGSPETTTGGNALKFYASVRLDIRRAGSIKDRDEVTGNATRVKVVKNKVAPPFRQVEFDIMYGEGISKVGELIDLGIKAGVVEKSGSWYSYGDERIGQGRENAKQFLRDHPDMAHAIEDKIRASHGLDFGVADDGDEVMAED

SEQ ID NO: 5647 - DNA, 1107 bp, Pasteurella haemolytica
  CDS (1)..(1107): transl_table=11
atggcagagaaaaaaagtcaaaagaacactccggttaaacagattgatccggaacaaaaagaaaaagcgttggcagccgcattagctcaaattgaaaagcaatttggcaaaggctcaattatgaagttaggcgatactcaagcccttgatattgaagcagtttcaaccggttctcttggtttagactcagcattaggcattggtggtttaccaatgggtcgtattgtggaaatttatggaccggagtcttcaggtaaaactacattaactttatctgtggtggctcaagcccaaaaaaatggtaaaacttgtgcctttattgatgccgaacacgcacttgatcctatttacgcccgtaagttaggggtagatacagatggattattaatttcacaaccggataatggcgaacaagcattagaaatttgtgatgcgttagttcgttccggtgcggttgatgtaattattgtggactctgttgcggcacttacaccaaaagcagagattgaaggcgatatgggtgattcccatatgggcttacaagctcgtttaatgtcacaagcattgcgtaaattaaccgcaaatatcaaagcgaccaactgcttggtgattttcattaaccaaattcgtatgaaaattggagtaatgttcggtaaccctgaaaccacaactggtggtaatgcccttaaattctatgcttcagtacgtttagatattcgtcgttcaggcgtagtaaaagacggtgatgaggttatcggtagcgaaacaaaagtgaaaattgtgaaaaacaaggttgctccaccgttccgtgaagtccaatttgatattatgtacggtgagggcattgcccgtatgaatgaattactcattttagcggaatctcacggcttcattaataaagcaggggcttggttctcttatgaaggggagaaaatcggtcagggtaaaaataatgccatcaaatggttaaaagaacaccctgaagtggcgagtaaaattgagcaagatattcgaaatctactcatttcaaacccaacttttacggctactccagattctgaaaatgcagacaatgcagatgatgaatttagtgaagaagaactctaa

SEQ ID NO: 5648 - protein, 368 aa, Pasteurella haemolytica
MAEKKSQKNTPVKQIDPEQKEKALAAALAQIEKQFGKGSIMKLGDTQALDIEAVSTGSLGLDSALGIGGLPMGRIVEIYGPESSGKTTLTLSVVAQAQKNGKTCAFIDAEHALDPIYARKLGVDTDGLLISQPDNGEQALEICDALVRSGAVDVIIVDSVAALTPKAEIEGDMGDSHMGLQARLMSQALRKLTANIKATNCLVIFINQIRMKIGVMFGNPETTTGGNALKFYASVRLDIRRSGVVKDGDEVIGSETKVKIVKNKVAPPFREVQFDIMYGEGIARMNELLILAESHGFINKAGAWFSYEGEKIGQGKNNAIKWLKEHPEVASKIEQDIRNLLISNPTFTATPDSENADNADDEFSEEEL

SEQ ID NO: 5649 - DNA, 1065 bp, Pasteurella multocida
  CDS (1)..(1065): transl_table=11
atggcaacaaaagaagaaaaaaataaagcactggcagcagcacttgggcagattgaaaaacaatttgggaaaggctctattatgaaattgggcgatacccaagccttggatgttgaagccgtgtcaacaggctccttaagcctcgacgtcgcacttggcattggcgggttaccaatgggtcgtattgttgaaattttcggacctgaatcttccggtaaaaccaccttaaccctttctgtcattgcgcaagcacaaaaagaaggcaaaacctgtgcctttattgacgcagaacacgcattagatccaatttatgctgccaaactgggcgtcaatgtgaatgaactgttagtttcccaacctgataacggtgaacaagcactcgaaatttgcgatgcgttagtgcgttcaggtgcagtagatgtgatcattgtggactcagtcgcagcattaaccccgaaagcggaaattgaaggagaaatgggtgactcacacatgggcttacaagcacgtttgatgtcacaagcgttacgtaaactcactggacaaatcaaaaactcaaattgcttagtggtctttattaaccaaatccgtatgaaaattggtgttatgttcggtaacccagaaaccacaacagggggtaatgcactgaaattctatgcctctgtacgtttagatattcgccgtacgggtgcgattaaagagggtgaagaagtgatcggtaacgaaacccgtgtcaaagtggtgaaaaacaaagtggcggcaccattccgtcaagtagatttccaaattctttacggtcaaggtatttctaaaacaggcgagctcatcgagttaggcgtaaaacacaaattagtggataaagcaggtgcatggtacgcttacaatggtgaaaaaatcggtcaaggtaaagctaacgcgatgaaatggttagaagagcatcctgaagaagcattggctttagaaacgaaattacgcaatgagttgctcgcgaatccagaaaaagtactcgcggcagacattgcggaaaaaaatgaaagctctacgggcttagaagcggattattaa

SEQ ID NO: 5650 - protein, 354 aa, Pasteurella multocida
MATKEEKNKALAAALGQIEKQFGKGSIMKLGDTQALDVEAVSTGSLSLDVALGIGGLPMGRIVEIFGPESSGKTTLTLSVIAQAQKEGKTCAFIDAEHALDPIYAAKLGVNVNELLVSQPDNGEQALEICDALVRSGAVDVIIVDSVAALTPKAEIEGEMGDSHMGLQARLMSQALRKLTGQIKNSNCLVVFINQIRMKIGVMFGNPETTTGGNALKFYASVRLDIRRTGAIKEGEEVIGNETRVKVVKNKVAAPFRQVDFQILYGQGISKTGELIELGVKHKLVDKAGAWYAYNGEKIGQGKANAMKWLEEHPEEALALETKLRNELLANPEKVLAADIAEKNESSTGLEADY

SEQ ID NO: 5651 - DNA, 1068 bp, Photorhabdus luminescens subsp
  CDS (1)..(1068): transl_table=11
atggctattgatgaaaataaacaaaaagcactagcagcggcactcggccaaattgaaaaacagtttggtaaaggttccatcatgcgtttgggcgaagaccgttcaatggacgttgaaactatctccacgggttcattatcactggatattgcattaggtgctggtggtctgccgatggggcgtattgttgaaatctatggcccggaatcttcgggtaagacaacgctgacattacaggttattgctgcggcacaacgtgaaggtaaaacctgtgcgtttattgatgctgaacacgctcttgatcccatctatgctaagaagttgggtgttgatattgataacttgttgtgttctcaacccgatacgggggaacaggctcttgagatctgtgatgcgttgactcgctccggcgctgttgatgtcattatcgtagactccgttgccgctttaacgccaaaagccgaaatagaaggagaaattggtgattctcatatggggctggccgctcgaatgatgagtcaggcaatgcgtaaactggccggtaacttgaaaagttctaatacgttgttgatctttatcaaccagattcgtatgaaaattggtgtcatgtttggtaaccctgaaactaccaccggtggtaacgcgctgaaattctatgcttctgttcgtctggatattcgccgcattggttctgtgaaaaatggtgaagaggtcgttggtagcgagacccgtgttaaggtggtaaaaaacaaagtggcagcgccatttaagcaagcagaattccagattatgtatggtgaaggcattaacacttatggtgaattaatcgatttaggtgtgaagcataaactggtggaaaaagcaggcgcatggtacagctataatggcgataaaattggtcaaggcaaagcgaatgctaccatctatctgaaagagcatcctgaagttgctactgagctggataaaaaattacgtgaaatgctgttgcacaatgccggcgaattcaatagtgctgcttctgattatgaagacaatgaaaatgaagagatgaataacgaagaattctaa

SEQ ID NO: 5652 - protein, 355 aa, Photorhabdus luminescens subsp
MAIDENKQKALAAALGQIEKQFGKGSIMRLGEDRSMDVETISTGSLSLDIALGAGGLPMGRIVEIYGPESSGKTTLTLQVIAAAQREGKTCAFIDAEHALDPIYAKKLGVDIDNLLCSQPDTGEQALEICDALTRSGAVDVIIVDSVAALTPKAEIEGEIGDSHMGLAARMMSQAMRKLAGNLKSSNTLLIFINQIRMKIGVMFGNPETTTGGNALKFYASVRLDIRRIGSVKNGEEVVGSETRVKVVKNKVAAPFKQAEFQIMYGEGINTYGELIDLGVKHKLVEKAGAWYSYNGDKIGQGKANATIYLKEHPEVATELDKKLREMLLHNAGEFNSAASDYEDNENEEMNNEEF

SEQ ID NO: 5653 - DNA, 1071 bp, Photobacterium profundum
  CDS (13)..(1071): transl_table=11
ttggagagtcgaatggacgataataagcagaaggctcttgccgcagcattaggccagattgaaaagcagtttggtaaaggctcaatcatgagattgggcgataataagacaatggatatcgaaacggtatcgacaggttctttagctctggatattgctctaggtgctggcggtttgccaatggggcgtattgtcgagatttacggtcctgaatcatcaggtaaaacaaccctaactcttgaagttattgcctccgctcagaaagccggtaagacatgtgcttttattgatgctgaacatgctcttgatcctatctatgcacagaagctgggtgtcgatattgaccaactactgtgttctcagcctgatacgggtgagcaagcgctagaaatcgtcgatgcactcgcacgttctggtgccgttgatctgattgttgtcgattctgtagcggcattgaccccgaaagccgaaattgaaggtgaaatgggcgacagccatatgggattgcaagctaggatgttgtcgcaggccatgcgaaaactgactggtaatttaaaaaatgcaaattgcatgtgtatcttcattaaccaaattcgaatgaagattggtgtaatgtttggcaatccagaaacgactactggtggtaatgcccttaaattctacgcctctgttcgtcttgatattcgccgtactggtgcaattaaagatggtgatgaagttgttggtaacgaaacacgcatcaaggttgttaaaaataaaattgccgcgccgtttaagcaagctgaaacacaaattctttatggtcaaggcttcaaccgtaacggtgagctaattgatctaggtgttaagcataagctggtagaaaaagcgggtgcttggtacagctataaaggtaataagattggtcaaggtaaggctaattcttgtaagcacctagttgaaaacccagcaatagctgaagagattgaaaaactactgcgtgacatgttgttatcaccagttggtgaagaagtagaaaaagcagatgtaaaaaaagatgcaaaaaaagatgcagctgaagcactaaaataa

SEQ ID NO: 5654 - protein, 352 aa, Photobacterium profundum
MDDNKQKALAAALGQIEKQFGKGSIMRLGDNKTMDIETVSTGSLALDIALGAGGLPMGRIVEIYGPESSGKTTLTLEVIASAQKAGKTCAFIDAEHALDPIYAQKLGVDIDQLLCSQPDTGEQALEIVDALARSGAVDLIVVDSVAALTPKAEIEGEMGDSHMGLQARMLSQAMRKLTGNLKNANCMCIFINQIRMKIGVMFGNPETTTGGNALKFYASVRLDIRRTGAIKDGDEVVGNETRIKVVKNKIAAPFKQAETQILYGQGFNRNGELIDLGVKHKLVEKAGAWYSYKGNKIGQGKANSCKHLVENPAIAEEIEKLLRDMLLSPVGEEVEKADVKKDAKKDAAEALK

SEQ ID NO: 5655 - DNA, 1023 bp, Prevotella ruminicola
  CDS (1)..(1023): transl_table=11
atggcaaaagaaaaagatgaggccttgtcgcctcagcaggagaagttgaaagcgcttcaggccgccatgtcgaagattgagaaagactatggtaagggctcgattatgcgcatgggagacgagcagatagataatgtagaagttatcccaacaggttcgataggtttgaatgcagccttaggtgtaggtggctaccccaaaggtcgtatcatcgagatatatggtcccgagtcgtcaggtaaaaccacactggccatccacgctattgccgagtgccagaagaatggtggtattgccgctttcatcgatgccgagcatgctttcgaccgtttctatgcagcccacctgggtgttgatgtagagaacctctatatctcacagcccgataatggtgagcaggctctggagattgccgaccagttgattcgttcgagtgctatcgatatcatcgtcatcgactctgtagccgctctgactcctaagaaggagattgagggcgatatgggtgattctgcagttggtctgcaggcccgtctgatgagccaggcactccgcaagctcacctcaaccatctcgaagactaacactacctgtatcttcatcaaccagttgcgtgagaagattggtgtaatgttcggtaaccccgaaactaccacaggtggtaacgccctgaagttctacgcttcagtacgtctggatatccgcaaggttactgccattaaggatggcgacaacatcattggtaaccaggtacgcgtaaaggtgattaagaataaggtagctcccccattccgcaaggccgaattcgagattacctttggcgagggcatctcaaagattggcgagattgtagatctgggtgttgagtacgagattatcaagaagagtggttcatggttcagctatggcgactcgaagttggctcagggccgtgatgcagtaaaagcgctgctcaaggataatccagagctttgcgaggaactcgaagcaaagattatggaagctatcgctgacaagaaataa

SEQ ID NO: 5656 - protein, 340 aa, Prevotella ruminicola
MAKEKDEALSPQQEKLKALQAAMSKIEKDYGKGSIMRMGDEQIDNVEVIPTGSIGLNAALGVGGYPKGRIIEIYGPESSGKTTLAIHAIAECQKNGGIAAFIDAEHAFDRFYAAHLGVDVENLYISQPDNGEQALEIADQLIRSSAIDIIVIDSVAALTPKKEIEGDMGDSAVGLQARLMSQALRKLTSTISKTNTTCIFINQLREKIGVMFGNPETTTGGNALKFYASVRLDIRKVTAIKDGDNIIGNQVRVKVIKNKVAPPFRKAEFEITFGEGISKIGEIVDLGVEYEIIKKSGSWFSYGDSKLAQGRDAVKALLKDNPELCEELEAKIMEAIADKK

SEQ ID NO: 5657 - DNA, 1047 bp, Propionibacterium acnes
  CDS (1)..(1047): transl_table=11
atggcagcgaccgctgaccgcgaaaaggcccttgccacggccttgcagcagatcgagaagcagcacggcaagggctctatcatgcgccttggcgagcaggagaccgttaagatcgccgctatccccacgggctcggtggccctcgacgtcgcgttgggtgtcggaggcctcccacgtggcagaatcgtggagatctatggtcccgaatcctccggcaagacgacggtggctttgcacgcaatcgctaatgcccaggctgaaggcggcatctgtgcctttattgacgccgagcacgctctcgacccggaatacgcacgcaaactcggggtcgatacagattccctgctggtgagccagcctgacaatggtgagcaggctctcgagattgctgacaccctcgtccgctcgggtgccttggagctcatcgttgttgactcggtggccgctctgaccccgaaggctgagatcgagggcgagatgggtgattcccatgttggtttgcaggcccgccttatgagccaggccctgcgcaagatgaccggtgcgttgaatgcggccggtaccactgccatcttcattaatcagctgcgcgagaagatcggtgtcatgtttggctccccggagacaacgacaggtggtcgcgccctcaagttctactcgtccgtgcgcctcgacgtgcggcgtgtcgaaactcttaaagacggatcagagatggtcggtaaccgcactcgtgtcaaggttgccaagaacaaggtcgccccaccttttaagcaggcagagtttgacatcctttacggacagggcatttctcgcgagggaagcctcatcgacatgggcgtagattgcggcatcatcaccaaatccggttcgtggttcagctacaacaatgagcagttgggtcagggtaaggagaacgtccgaaagttcctcagaggtaacccggatgttgccaatgagattgaggacaagatcctgactcaccttggcctgcgcgaagccgaggtccctgaaggtgtcgatccccgaactggcgaggtggaattctga

SEQ ID NO: 5658 - protein, 348 aa, Propionibacterium acnes
MAATADREKALATALQQIEKQHGKGSIMRLGEQETVKIAAIPTGSVALDVALGVGGLPRGRIVEIYGPESSGKTTVALHAIANAQAEGGICAFIDAEHALDPEYARKLGVDTDSLLVSQPDNGEQALEIADTLVRSGALELIVVDSVAALTPKAEIEGEMGDSHVGLQARLMSQALRKMTGALNAAGTTAIFINQLREKIGVMFGSPETTTGGRALKFYSSVRLDVRRVETLKDGSEMVGNRTRVKVAKNKVAPPFKQAEFDILYGQGISREGSLIDMGVDCGIITKSGSWFSYNNEQLGQGKENVRKFLRGNPDVANEIEDKILTHLGLREAEVPEGVDPRTGEVEF

SEQ ID NO: 5659 - DNA, 1068 bp, Proteus mirabilis
  CDS (1)..(1068): transl_table=11
atggctattgatgaaaacaaacaaaaagcattggccgcagcacttggtcaaattgaaaagcaatttggtaaaggttctatcatgcgtctgggcgaagaccgttccatgaacgtagaaactatctctacaggatctttatcattagacgttgctttaggtgcaggtggattgccacgtggccgtattgttgaaatctatggccctgaatcttctggtaaaacaaccttgactctacaagttattgcctctgctcagcgtgaaggaaaaatttgtgcatttattgatgctgaacatgcattagacccaatttatgctcaaaagctaggtgtcgatatcgataatctactctgctctcaacctgacacaggtgaacaagctctggaaatttgtgatgcattatctcgctctggtgcggtcgatgttattgtcgtggactccgtggcagcattaacaccaaaagctgaaattgaaggtgaaattggtgattcacacgttggtttagccgcacgtatgatgagccaagctatgcgtaaactagcgggtaaccttaaaaactctaatacactgctgattttcattaaccaaattcgtatgaaaatcggtgttatgtttggtaacccagaaaccacgaccggtggtaatgcgcttaaattctatgcttctgttcgtttagacattcgtcgcattggctctgtcaaaaatggtgatgaagtcattggtagtgagactcgcgttaaagttgttaaaaataaagtggctgcaccgtttaaacaagctgaattccaaattatgtacggtgaaggtattaatacctatggcgaactgattgatttaggtgttaaacataagttagtagagaaagcaggtgcttggtatagctacaatggcgaaaaaattggtcaaggtaaagctaacgcaaccaattacttaaaagaacatcctgaaatgtacaatgagttaaacactaaattgcgtgaaatgttgttaaatcatgctggtgaattcacaagtgctgcggattttgcaggtgaagagtcagacagtgatgctgacgacacaaaagagtaa

SEQ ID NO: 5660 - protein, 355 aa, Proteus mirabilis
MAIDENKQKALAAALGQIEKQFGKGSIMRLGEDRSMNVETISTGSLSLDVALGAGGLPRGRIVEIYGPESSGKTTLTLQVIASAQREGKICAFIDAEHALDPIYAQKLGVDIDNLLCSQPDTGEQALEICDALSRSGAVDVIVVDSVAALTPKAEIEGEIGDSHVGLAARMMSQAMRKLAGNLKNSNTLLIFINQIRMKIGVMFGNPETTTGGNALKFYASVRLDIRRIGSVKNGDEVIGSETRVKVVKNKVAAPFKQAEFQIMYGEGINTYGELIDLGVKHKLVEKAGAWYSYNGEKIGQGKANATNYLKEHPEMYNELNTKLREMLLNHAGEFTSAADFAGEESDSDADDTKE

SEQ ID NO: 5661 - DNA, 978 bp, Proteus vulgaris
  CDS (1)..(978): transl_table=11
atggctattgatgagaacaaacaaaaggcacttgcggcagcactgggtcaaatcgaaaagcaatttggtaaaggttctatcatgcggttgggcgaggatcgctcgatggatgttgaaaccatttctacgggctctttgtcccttgatattgctctgggggccggcggtttacctatggggcgcatcgttgagatttatggcccagaatcttctggtaaaaccacgctgaccttacaggtgattgccgctgctcaacgcgaaggaaaaacctgtgcgttcatcgatgctgaacatgcgttggacccgatttatgcgaaaaaacttggcgtagatattgataacctgctgtgttctcagccggataccggtgagcaagcactggagatctgtgatgcactcacgcgctctggcgctgttgacgttatcattgtcgactctgttgcagccttgacaccaaaagctgaaattgaaggcgaaatcggtgactctcacatgggccttgcggcacgtatgatgagccaggctatgcgtaaactggcaggtaacctgaaacaagccaatacgctgctaatcttcattaaccagatccgtatgaaaattggtgtgatgtttggtaaccctgaaaccactaccggtggtaacgcactgaaattttatgcctctgttcgtctggatattcgtcgtactggcgctatcaaggacggtgaagaagttgtcggtagcgaaactcgcgttaaagtcgtgaagaataaagtggcagcaccgttcaaacaggctgaattccaaattttgtatggtgaaggtatcaatatccatggtgagttagttgatctgggtgtgaaacacaaactgatcgaaaaagcgggtgcatggtatagctataacggcgacaaaatcggccagggtaaagcaaacgcctgcaatttcctgaaagagaattcgctggtgaaggaaacgaagaattttaatggctgctga

SEQ ID NO: 5662 - protein, 325 aa, Proteus vulgaris
MAIDENKQKALAAALGQIEKQFGKGSIMRLGEDRSMDVETISTGSLSLDIALGAGGLPMGRIVEIYGPESSGKTTLTLQVIAAAQREGKTCAFIDAEHALDPIYAKKLGVDIDNLLCSQPDTGEQALEICDALTRSGAVDVIIVDSVAALTPKAEIEGEIGDSHMGLAARMMSQAMRKLAGNLKQANTLLIFINQIRMKIGVMFGNPETTTGGNALKFYASVRLDIRRTGAIKDGEEVVGSETRVKVVKNKVAAPFKQAEFQILYGEGINIHGELVDLGVKHKLIEKAGAWYSYNGDKIGQGKANACNFLKENSLVKETKNFNGC

SEQ ID NO: 5663 - DNA, 1053 bp, Pseudomonas fluorescens
  CDS (1)..(1053): transl_table=11
atggacgacaacaagaagaaagccttggctgcggccctgggtcagatcgaacgtcaattcggcaagggtgccgtaatgcgtatgggcgatcacgaccgtcaggcgatcccggccatttccaccggctctctgggtctggacattgctctgggcattggcggtctgccaaaaggccgtatcgttgaaatctacggccctgagtcgtccggtaaaactaccctgactctgtcggttattgcccaggcgcagaaagccggtgccacttgtgcgttcgtcgatgccgagcacgcactggatccggaatacgccggcaagctgggtgtgaatgttgacgacctgctggtttcccagccggacaccggcgaacaggccctggaaatcaccgacatgctggtgcgttccaacgcggttgacgtgatcatcgtcgactccgtggcggccctggtgcccaaggctgaaatcgaaggtgaaatgggcgacatgcacgtgggcctgcaagcccgcctgatgtcccaggcgctgcgcaaaatcaccggtaacatcaagaacgccaactgcctggtgatcttcatcaaccagatccgcatgaagatcggcgtgatgttcggtagcccggaaaccaccaccggtggtaacgcgctgaagttctacgcttcggtccgtctggacatccgccgtaccggcgcggtgaaggaaggcgacgaagtggtgggcagtgaaacccgggtcaagatcgtcaagaacaaggtggctccgccgttccgtcaggccgagttccagattctttacggcaagggcatctacctcaacggtgaaatcatcgatctgggcgtgctgcacggcttcctggagaaatccggtgcctggtacagctaccagggcaacaagatcggtcagggcaaggccaactcggccaagttcctgcaggacaacccggaaatcggcaacgcgctggagaagcagatccgtgaaaaactgctgactgcatcgccagacgtcaaagccaacccggtcaaagagaccgaagacgatatggccgacgctgatatctga

SEQ ID NO: 5664 - protein, 350 aa, Pseudomonas fluorescens
MDDNKKKALAAALGQIERQFGKGAVMRMGDHDRQAIPAISTGSLGLDIALGIGGLPKGRIVEIYGPESSGKTTLTLSVIAQAQKAGATCAFVDAEHALDPEYAGKLGVNVDDLLVSQPDTGEQALEITDMLVRSNAVDVIIVDSVAALVPKAEIEGEMGDMHVGLQARLMSQALRKITGNIKNANCLVIFINQIRMKIGVMFGSPETTTGGNALKFYASVRLDIRRTGAVKEGDEVVGSETRVKIVKNKVAPPFRQAEFQILYGKGIYLNGEIIDLGVLHGFLEKSGAWYSYQGNKIGQGKANSAKFLQDNPEIGNALEKQIREKLLTASPDVKANPVKETEDDMADADI

SEQ ID NO: 5665 - DNA, 1059 bp, Pseudomonas fluorescens
  CDS (1)..(1059): transl_table=11
atggacgacaacaagaagaaagccttggctgcggccctgggtcagatcgaacgtcaattcggcaagggtgccgtaatgcgtatgggcgatcacgaccgtcaagcgatcccggctatttccactggctctctgggtctggacatcgcactcggcattggcggcctgccaaaaggccgtatcgttgaaatctacggtcctgaatcttccggtaaaaccaccctgaccctgtcggtgattgcccaagcgcaaaaaatgggcgccacctgtgcgttcgtcgacgccgagcacgcccttgacccggaatacgccggtaagctgggcgtcaacgttgacgacctgctggtttcccagccggacaccggtgagcaagccctggaaatcaccgacatgctggtgcgctccaacgccatcgacgtgatcgtggtcgactccgtggctgccctggtaccgaaagctgaaatcgaaggcgaaatgggcgacatgcacgtgggcctgcaagcccgcctgatgtcccaggcgctgcgtaaaattaccggtaacatcaagaacgccaactgcctggtgatcttcatcaaccagatccgtatgaagatcggcgtaatgttcggcagcccggaaaccactaccggtggtaacgcgctgaagttctacgcttcggtccgtctggacatccgccgtaccggcgcggtgaaggaaggtgacgaagttgttggtagcgaaactcgcgttaaagtcgtgaagaacaaggtcgctccgcctttccgtcaggcagagttccagattctctacggcaagggtatctacctgaacggcgagatgattgacctgggcgtactgcacggtttcgtcgagaagtccggtgcctggtatgcctacaacggcagcaagatcggtcagggcaaggccaactcggccaagttcctggcagacaacccggatatcgtcgccacgcttgagaagcagattcgcgacaagctgctgaccccagcgccagacgtgaaagctgccgccaaccgcgagccggttgaagaagtggaagaagctgacactgatatctga

SEQ ID NO: 5666 - protein, 352 aa, Pseudomonas fluorescens
MDDNKKKALAAALGQIERQFGKGAVMRMGDHDRQAIPAISTGSLGLDIALGIGGLPKGRIVEIYGPESSGKTTLTLSVIAQAQKMGATCAFVDAEHALDPEYAGKLGVNVDDLLVSQPDTGEQALEITDMLVRSNAIDVIVVDSVAALVPKAEIEGEMGDMHVGLQARLMSQALRKITGNIKNANCLVIFINQIRMKIGVMFGSPETTTGGNALKFYASVRLDIRRTGAVKEGDEVVGSETRVKVVKNKVAPPFRQAEFQILYGKGIYLNGEMIDLGVLHGFVEKSGAWYAYNGSKIGQGKANSAKFLADNPDIVATLEKQIRDKLLTPAPDVKAAANREPVEEVEEADTDI

SEQ ID NO: 5667 - DNA, 1047 bp, Pseudomonas oleovorans
  CDS (1)..(1047): transl_table=11
atggatcaggcaaaaagcaaagcgttagaagcggctctttctcaaattgagaagcagtttggtaagggttccatcatgcggctgggctccgaccgcactatggatatagatgttatatcgactggctcactcggcttggacatcgccttgggggtgggtgggttgccgcgcggccgtatcgttgaaatctatgggccggagtcttctggtaaaaccacgcttacgctgtcggtgattgctgaagcgcagcgtcaaggtttgacttgtgcatttgtcgatgctgagcacgcgcttgatccgatctacgcagccaagctcggcgttaatattgacgaactcctgtgctcacagcctgacactggtgagcaggcacttgaaatcgtagacatcttgacgcgttctggggcagtcaatcttattgtcgttgactctgttgctgctcttgttccgaaggctgagattgaaggcgaaatcggggattcccatgtaggtcttgccgcccgaatgatgtcgcaggcgatgaggaagatcactggtaacctgaagaactccaatactatgtgtatcttcattaaccagattcgtatgaagatcggtgtaatgtttggcaacccggaaaccaccaccggcggtaacgccctgaagttctacgcctcggtgcgcctggacatccgtcgtaccggcgcggtcaaggaaggcgaggaagtggtgggcagcgaaacccgtgtgaaagtggtcaagaacaaagttgctgctccattcaggcaagcagagttccagatcgtttacggtcagggtattagcaaggcgggtgagatcgttgacctcgctgttgctaacaactttgttgaaaagtcaggcgcttggtactccttcgaaggtaacaagatcggccaaggtaaggccaataccatgaaatggctgttggaaaacaaacctactatggacaagctggaaggtatgattcgcgaaaagttgatgtctaagcctcaggctgaaacctctgcacgtctcgcaacccaagaagaactggctgacgactattga

SEQ ID NO: 5668 - protein, 348 aa, Pseudomonas oleovorans
MDQAKSKALEAALSQIEKQFGKGSIMRLGSDRTMDIDVISTGSLGLDIALGVGGLPRGRIVEIYGPESSGKTTLTLSVIAEAQRQGLTCAFVDAEHALDPIYAAKLGVNIDELLCSQPDTGEQALEIVDILTRSGAVNLIVVDSVAALVPKAEIEGEIGDSHVGLAARMMSQAMRKITGNLKNSNTMCIFINQIRMKIGVMFGNPETTTGGNALKFYASVRLDIRRTGAVKEGEEVVGSETRVKVVKNKVAAPFRQAEFQIVYGQGISKAGEIVDLAVANNFVEKSGAWYSFEGNKIGQGKANTMKWLLENKPTMDKLEGMIREKLMSKPQAETSARLATQEELADDY

SEQ ID NO: 5669 - DNA, 1059 bp, Pseudomonas fluorescens
  CDS (1)..(1059): transl_table=11
atggacgacaacaagaagaaagccttggctgcggccctgggtcagatcgaacgtcaattcggcaagggtgccgtaatgcgtatgggcgatcaggaccgtcaggcgatcccggccatttccaccggctctctgggtctggacatcgcactcggcatcggcggcctgccaaaaggccgtatcgttgaaatctacggtcctgaatcttccggtaaaaccacactgacgctgtccgtgatcgcccaggctcaaaaagccggtgcgacctgcgccttcgtcgacgccgaacacgccctcgacccagagtacgccggcaagctgggcgtcaatgtcgacgacctgctggtttcccagccggacaccggcgagcaggccctggaaatcaccgacatgctggtgcgctccaacgccgttgacgtgatcatcgtcgactccgtggccgctctggtaccgaaggcagaaatcgaaggcgaaatgggtgacatgcacgtgggcctgcaagcccgtctgatgtcccaggcgctgcgtaaaatcaccggtaacatcaagaacgccaactgcctggtgatcttcatcaaccagatccgcatgaagatcggcgtgatgttcggcagcccggaaaccaccaccggtggtaacgcgctgaagttctacgcctcggttcgtctcgacatccgccgtaccggcgcggtgaaggaaggcgacgaagtggtcggcagcgaaacccgcgtcaaggttgtgaagaacaaggtggcttcgccgttccgtcaggccgagttccagattctctacggcaagggtatctacctgaacggcgagatgatcgacctgggcgttctgcacgggttcgtcgagaagtccggcgcctggtatgcctacgaaggcaccaagatcggtcagggcaaggccaactcggccaagttcctggcggacaacccggaagtcgcggccaagctcgagaagcaactgcgtgacaagctgctgtcgccagccgtgatcgccgactccaaggcttctgcggtcaaagagaccgaagacgacctggctgacgctgacatctga

SEQ ID NO: 5670 - protein, 352 aa, Pseudomonas fluorescens
MDDNKKKALAAALGQIERQFGKGAVMRMGDQDRQAIPAISTGSLGLDIALGIGGLPKGRIVEIYGPESSGKTTLTLSVIAQAQKAGATCAFVDAEHALDPEYAGKLGVNVDDLLVSQPDTGEQALEITDMLVRSNAVDVIIVDSVAALVPKAEIEGEMGDMHVGLQARLMSQALRKITGNIKNANCLVIFINQIRMKIGVMFGSPETTTGGNALKFYASVRLDIRRTGAVKEGDEVVGSETRVKVVKNKVASPFRQAEFQILYGKGIYLNGEMIDLGVLHGFVEKSGAWYAYEGTKIGQGKANSAKFLADNPEVAAKLEKQLRDKLLSPAVIADSKASAVKETEDDLADADI

SEQ ID NO: 5671 - DNA, 1068 bp, Pseudomonas putida
  CDS (1)..(1068): transl_table=11
atggacgacaacaagaagcgcgccttggctgcggccctgggtcagatcgaacgtcaattcggtaaaggcgcggtcatgcgcatgggtgaccaggagcgtcaaggcattccggccatctccaccggctcgctgggcctggacatcgcccttggcatcggcggcctgccaaaaggccgtatcgtcgagatctacggcccggaatcgtcgggcaagaccacgctgaccctatcggtcatcgccgaagctcagaaaaacggtgccacctgcgccttcgtcgacgccgaacacgccctcgaccctgagtacgccggcaagctgggcgtcaacgtcgacgacctgctggtttcgcagccggacactggcgaacaggccctggaaatcaccgacatgctggtgcgctccaacgccgttgacgtgatcatcgtcgactccgtggccgcgttggtgccgaaggccgagatcgaaggcgagatgggtgacatgcacgtcggcctgcaggctcgcctgatgtcccaggcgctgcgcaagatcactggtaacatcaagaacgctaactgcctggtcatcttcatcaaccagatccgtatgaagattggcgtgatgttcggcagcccggaaaccaccaccggtggtaacgccctgaagttctacgcctcggtgcgtctggatatccgtcgtaccggcgcggtcaaggaaggcgacgaagtggtcggtagcgaaacccgcgtcaagatcgtcaagaacaaggtatcgcctccgttccgtcaggccgagttccagattctttacggcaaaggtatctaccgtaacggcgagatcattgacctgggtgtgtctcagggcctggtcgagaaatccggtgcctggtacgcctaccagggcaacaagatcggtcaaggtaaagccaacgctgccaagtatctggcggaaaacccggctattggtgccgagatcgagaagcagatccgtgaaaagctgttgaaagccggtgctgccgctgaagccggcaaggctgccgccgttgatgccagtgccgacgatgtggctgacgccgaagccggttattga

SEQ ID NO: 5672 - protein, 355 aa, Pseudomonas putida
MDDNKKRALAAALGQIERQFGKGAVMRMGDQERQGIPAISTGSLGLDIALGIGGLPKGRIVEIYGPESSGKTTLTLSVIAEAQKNGATCAFVDAEHALDPEYAGKLGVNVDDLLVSQPDTGEQALEITDMLVRSNAVDVIIVDSVAALVPKAEIEGEMGDMHVGLQARLMSQALRKITGNIKNANCLVIFINQIRMKIGVMFGSPETTTGGNALKFYASVRLDIRRTGAVKEGDEVVGSETRVKIVKNKVSPPFRQAEFQILYGKGIYRNGEIIDLGVSQGLVEKSGAWYAYQGNKIGQGKANAAKYLAENPAIGAEIEKQIREKLLKAGAAAEAGKAAAVDASADDVADAEAGY

SEQ ID NO: 5673 - DNA, 1068 bp, Pseudomonas putida
  CDS (1)..(1068): transl_table=11
atggacgacaacaagaagcgcgccttggctgcggccctgggtcagatcgaacgccaattcggtaaaggcgcagtcatgcgcatgggcgaccacgagcgccaggcgatcccggccatctccaccggttcgctgggcctggacatcgcactgggcattggcggcctgccaaaaggccgtatcgtcgagatctacggcccggaatcgtcgggtaaaaccacgctgaccctgtcggtcatcgccgaagcccagaaaaacggcgccacctgcgccttcgtcgacgccgagcacgccctcgaccctgaatacgcgggcaagctgggcgtcaacgtagacgacctgctggtttcgcagccggacaccggcgaacaggccctggaaatcaccgacatgctggtgcgttccaacgcggttgacgtgatcatcgtcgactccgtggccgccctggtgccgaaggccgagatcgaaggcgaaatgggtgacatgcacgtgggcctgcaggctcgcctgatgtcccaggcgctgcgcaaaatcaccggtaacatcaagaacgccaactgcctggtcatcttcatcaaccagatccgtatgaagatcggcgtaatgttcggcagcccggaaaccaccaccggtggtaacgccctgaaattctacgcctcggtgcgcctggacatccgtcgaacgggtgcggtcaaggaaggcgacgaggtggtcggcagcgaaacccgcgtcaagatcgtcaagaacaaggtttcgccaccgttccgtcaggccgagttccagatcctctacggcaagggtatctaccgcaatggcgaaatcatcgacctgggtgtttcccaaggtctggtcgagaagtccggtgcctggtatgcctatcaaggcaacaagattggacaaggtaaagccaacgccgccaagtacctggctgagaacccggcgattggtgccgagatcgagaagcagattcgcgacaagttgctgacttctggcgctgtcgctgcggctggcaaagctgcggctgtcgaagcagatgccgatgacatggccgacgctgacgccggttattga

SEQ ID NO: 5674 - protein, 355 aa, Pseudomonas putida
MDDNKKRALAAALGQIERQFGKGAVMRMGDHERQAIPAISTGSLGLDIALGIGGLPKGRIVEIYGPESSGKTTLTLSVIAEAQKNGATCAFVDAEHALDPEYAGKLGVNVDDLLVSQPDTGEQALEITDMLVRSNAVDVIIVDSVAALVPKAEIEGEMGDMHVGLQARLMSQALRKITGNIKNANCLVIFINQIRMKIGVMFGSPETTTGGNALKFYASVRLDIRRTGAVKEGDEVVGSETRVKIVKNKVSPPFRQAEFQILYGKGIYRNGEIIDLGVSQGLVEKSGAWYAYQGNKIGQGKANAAKYLAENPAIGAEIEKQIRDKLLTSGAVAAAGKAAAVEADADDMADADAGY

SEQ ID NO: 5675 - DNA, 1044 bp, Pseudomonas stutzeri
  CDS (1)..(1044): transl_table=11
atggacgagaacaagaagcgtgccttggccgctgccctgggccagatcgaaaagcagttcggcaaaggcgcggtcatgcgcatgggcgatcatgatcgccaggcgatcccttctatttccaccggctccctggggctggatatcgccctcggcataggcggtctgccgaaaggccggatcgtcgaaatctacggcccggaatcttcgggtaaaaccaccctgaccctctcggtcatcgccgccgcccagagaatgggctccacctgcgccttcgtcgatgccgagcatgcgctggaccccgattacgccggcaagctgggcgtcaacgtcgacgacctgctggtctcgcagcccgacacgggcgagcaggcgctggaaatcaccgacatgctggtgcgctccaatgcagtggacgtgatcatcgtcgactccgtggcagcgctggtgcccaaggcggaaatcgaaggcgagatgggcgatgcccacgtcggtctgcaggcccgcctgatgtcccaggcgctgcgcaagatcaccggcaacatcaagaacgccaactgcctggtgatcttcatcaaccagatccgcatgaagatcggcgtgatgttcggtagcccggaaaccaccaccggcggtaacgcgctgaagttctacgcttcggtccgcctggacatccgccgtactggcgcggtgaaggaaggcgacgaagtggtgggcagcgaaacccgcgtcaaggtcgtcaagaacaaggtggccccgccgttccgccaggccgagttccagatcctctacgatcaagctttctaccgcaacggcgagatcatcgatctcggcgtgcagcagggcctggtggagaaatccggtgcctggtacgcctacaagggcagcaagatcggccagggcaaggccaatgcggccaagtatctggaagagaacccggagatcggccaggagatcgaacagcagattcgcgccaagctgctggtgacttcggccaataccaaggccaccccggtagccgaagatctggcggacgccgacatctga

SEQ ID NO: 5676 - protein, 347 aa, Pseudomonas stutzeri
MDENKKRALAAALGQIEKQFGKGAVMRMGDHDRQAIPSISTGSLGLDIALGIGGLPKGRIVEIYGPESSGKTTLTLSVIAAAQRMGSTCAFVDAEHALDPDYAGKLGVNVDDLLVSQPDTGEQALEITDMLVRSNAVDVIIVDSVAALVPKAEIEGEMGDAHVGLQARLMSQALRKITGNIKNANCLVIFINQIRMKIGVMFGSPETTTGGNALKFYASVRLDIRRTGAVKEGDEVVGSETRVKVVKNKVAPPFRQAEFQILYDQAFYRNGEIIDLGVQQGLVEKSGAWYAYKGSKIGQGKANAAKYLEENPEIGQEIEQQIRAKLLVTSANTKATPVAEDLADADI

SEQ ID NO: 5677 - DNA, 1059 bp, Pseudomonas tolaasii
  CDS (1)..(1059): transl_table=11
atggacgacaacaagaagaaagccttggctgcggccctgggtcagatcgaacgtcaattcggcaagggtgccgtaatgcgtatgggcgatcacgaccgtcaggcgatcccggctatttccacgggctctctgggtctggacatcgcgctcggcattggcggcctgccaaaaggccgtatcgttgaaatctatggtcctgaatcttccggtaaaacgaccctgaccctgtcggtgattgcccaggcacaaaaaatgggcgccacttgcgcgttcgtcgatgccgagcacgccctggacccagagtacgccggcaagctgggcgtcaacgttgacgacctgctggtttcccagccggacaccggtgagcaagccctggaaatcaccgacatgctggtgcgctccaacgccatcgacgtgatcgtggtcgactccgtggcagccctggtaccgaaggctgaaatcgaaggcgaaatgggtgacatgcacgttggcctgcaagcccgtctgatgtcccaggcgctgcgtaaaatcaccggtaacatcaagaatgccaactgcctggtgatcttcatcaaccagatccgcatgaagatcggcgtgatgttcggcagcccggaaaccaccacgggtggtaacgcgttgaagttctacgcttcggtccgtctggatatccgccgtactggcgcggtgaaggaaggtgacgaggtggtgggcagcgaaacccgcgttaaagtcgtgaagaacaaggtggccccgccattccgtcaggccgaattccagattctctacggcaagggtatctacctgaacggtgagatgatcgacctgggcgtgctgcacggttttgtcgagaaatccggtgcctggtatgcctacaacggcagcaagatcggtcagggcaaggccaactcggccaagttcctggcggacaacccggacatcgcagccacgcttgagaagcagattcgcgacaagctgctgactgcagcgccagacgtgaaagcggccgccaaccgtgagccggttgacgagatggaagaagtcgacactgacatctga

SEQ ID NO: 5678 - protein, 352 aa, Pseudomonas tolaasii
MDDNKKKALAAALGQIERQFGKGAVMRMGDHDRQAIPAISTGSLGLDIALGIGGLPKGRIVEIYGPESSGKTTLTLSVIAQAQKMGATCAFVDAEHALDPEYAGKLGVNVDDLLVSQPDTGEQALEITDMLVRSNAIDVIVVDSVAALVPKAEIEGEMGDMHVGLQARLMSQALRKITGNIKNANCLVIFINQIRMKIGVMFGSPETTTGGNALKFYASVRLDIRRTGAVKEGDEVVGSETRVKVVKNKVAPPFRQAEFQILYGKGIYLNGEMIDLGVLHGFVEKSGAWYAYNGSKIGQGKANSAKFLADNPDIAATLEKQIRDKLLTAAPDVKAAANREPVDEMEEVDTDI

SEQ ID NO: 5679 - DNA, 1065 bp, Pseudomonas syringae pv
  CDS (1)..(1065): transl_table=11
atggacgacaacaagaagaaagccttggctgcggccttgggtcagatcgagcgtcagttcggtaaaggcgccgtgatgcgcatgggcgatcacgatcgccaggcgatccctgccatctccaccggttcgctgggtctggatatcgctctcggtattggcggactgccaaaaggccggatcgtggaaatctacggtcctgagtcttccggtaaaaccacactgacgctgtcggtcatcgcccaggcccagaaaatgggcgctacctgtgcctttgtcgacgccgaacacgcgctggatccggagtacgcaggcaaactgggcgtcaatgtcgacgacctgctggtttcgcagccggacactggtgagcaggcgctggaaatcaccgacatgctggtgcgctccaatgccatcgacgtgatcgtggtcgactccgttgctgcgctggtgccgaaggcagagatcgaaggcgaaatgggtgacatgcacgtgggtctgcaggcgcgtctgatgtcgcaggcgctgcgcaagatcaccggcaacatcaagaacgccaactgcctggtgatcttcatcaaccagatccgcatgaagatcggcgtgatgttcggcagcccggaaaccaccaccggtggtaacgcgctgaagttttacgcttcggtacgcctggacatccgtcgtacgggcgcggtcaaggaaggcgatgaggttgtcggcagcgaaacccgcgtcaaggttgtgaagaacaaggtggctccgccgttccgtcaggccgagttccagattctttacggcaagggtatctacctgaacggtgaaatcgtcgatctggccgttctgcatggttttgtcgagaagtccggtgcctggtacagctaccagggcagcaagattggtcagggcaaggccaactcggccaagttcctggcagataacccggaaatctgcaaagcgctcgagaagcagatccgcgacaaattgctgacccctggcgtcgacaccaaggctgtcggctcccgtgaagcagtggctgccgatgatatgtctgaagcagatgtcgatatctga

SEQ ID NO: 5680 - protein, 354 aa, Pseudomonas syringae pv
MDDNKKKALAAALGQIERQFGKGAVMRMGDHDRQAIPAISTGSLGLDIALGIGGLPKGRIVEIYGPESSGKTTLTLSVIAQAQKMGATCAFVDAEHALDPEYAGKLGVNVDDLLVSQPDTGEQALEITDMLVRSNAIDVIVVDSVAALVPKAEIEGEMGDMHVGLQARLMSQALRKITGNIKNANCLVIFINQIRMKIGVMFGSPETTTGGNALKFYASVRLDIRRTGAVKEGDEVVGSETRVKVVKNKVAPPFRQAEFQILYGKGIYLNGEIVDLAVLHGFVEKSGAWYSYQGSKIGQGKANSAKFLADNPEICKALEKQIRDKLLTPGVDTKAVGSREAVAADDMSEADVDI

SEQ ID NO: 5681 - DNA, 1059 bp, Psychrobacter arcticus
  CDS (1)..(1059): transl_table=11
atggacgacaataaagccaaagcccttaaagctgcgctcgctcaaatcgaaaagcaatttggtaaaaataccatcatgcatttgggtgatgactcagcagcacttgatgtcgatgtggtctctactggctcattaggtttagatattgctctagggattggtggtctgccaaaaggtcgtatcgttgaaatttacggccctgaaagctcaggtaaaacgacgatgaccttacaggcgattgcagagtgccaaaagcaaggcggtgtttgtgcctttatcgatgctgagcacgcactagatccagtatatgcacgcaagcttggcgtcaatacggatgatttactactctcacagcctgataatggagagcaagcgcttgaaattactgatatgttggtacgttcaggggcgatcgatatgatcgttattgactcggttgccgctttgacaccacgtgcagagattgaaggcgagatgggcgattcacatatgggtctgcaagcacgtctgatgagccaagccttacgtaaaattactggtaacgccaagcgctcaaactgtatggtgttatttattaaccaaattcgtatgaaaattggcgttatgtttggtagccctgagaccacaaccggtggtaatgcgcttaaattctatgcctctgtgcgtatggatattcgccgtattggtgcggtgaagaatggtgatgaaatcatcggtaaccaaactcgcgttaaagtcatcaaaaataaaatggcaccaccatttcgtcaagctgagtttgagattacttacggtgaaggtaccaatcacttagccgaagtgattgatttaggtgttgagattggtgcggttggtaaagcgggttcttggtacagctatggtgatgaaaaaatcggtcaaggcaaagccaattctgtactgttcttaaaagagaaccctgctattgctgaagagatagaagccaaaatccgtgctgaaaagcttggcgtaaaggatgatagcaaagcagcggtcgtggctgagactaatgaagaactagcctctgaacctgtacaataa

SEQ ID NO: 5682 - protein, 352 aa, Psychrobacter arcticus
MDDNKAKALKAALAQIEKQFGKNTIMHLGDDSAALDVDVVSTGSLGLDIALGIGGLPKGRIVEIYGPESSGKTTMTLQAIAECQKQGGVCAFIDAEHALDPVYARKLGVNTDDLLLSQPDNGEQALEITDMLVRSGAIDMIVIDSVAALTPRAEIEGEMGDSHMGLQARLMSQALRKITGNAKRSNCMVLFINQIRMKIGVMFGSPETTTGGNALKFYASVRMDIRRIGAVKNGDEIIGNQTRVKVIKNKMAPPFRQAEFEITYGEGTNHLAEVIDLGVEIGAVGKAGSWYSYGDEKIGQGKANSVLFLKENPAIAEEIEAKIRAEKLGVKDDSKAAVVAETNEELASEPVQ

SEQ ID NO: 5683 - DNA, 1062 bp, Ralstonia eutropha
  CDS (1)..(1062): transl_table=11
atggatgacaagaaggcaggtgccggcctgagcgccgagaagcagaaggcgcttgccgccgcgctctcgcagatcgagaagcagtttggcaagggctcgatcatgcgcatgggcgacggcgaggtcgagaaggacatccaggtggtctccaccggctccctcggccttgacatcgcgctgggcgtcggcggcctgccgcgcggccgcgtggtcgagatctacggcccggaatcgtcgggcaagaccacgctgacgctgcaggtcgttgccgaaatgcagaagcttggcggcacctgcgcctttatcgatgccgagcacgcgctcgacgtcaactacgcctccaagcttggcgtggacgtgggcgagctgctgatctcccagccggacactggcgaacaagcgctcgaaatcaccgatgcgctggtgcgctcgggctcgatcgacctgatcgtgatcgactcggtggccgcgctggtgccgaaggctgaaatcgaaggcgaaatgggtgattcgctgcccggcctgcaggcccgcctgatgagccaggcgctgcgcaagctgaccggcaccatcaagcgcaccaactgcctggtgatcttcatcaaccagatccgtatgaagatcggtgtgatgttcggttcgcctgaaacgaccacgggcggcaatgcgctgaagttctacgcttccgtgcgcctggacatccgccgcatcggctcgatcaagaagggcgacgacgtgatcggcaacgagaccaaggtcaaggtggtcaagaacaaggtatcgccgccgttccgcgaggccttcttcgacatcctctatggccagggcatctcgcgccagggcgagatcatcgacctcggcgtggacgccaagatcgtcgagaagtcgggcgcctggtacagctacaacggcgacaagatcgggcagggcaaggacaatgcgcgcgagtacctgcgcgaaaatcccgacatcgctcaggaaatcgagaacaaggtccgcgccgcgctgggcgttgcgccgatgaacagtgttccggcggccgaggtcgtgacggaagactga

SEQ ID NO: 5684 - protein, 353 aa, Ralstonia eutropha
MDDKKAGAGLSAEKQKALAAALSQIEKQFGKGSIMRMGDGEVEKDIQVVSTGSLGLDIALGVGGLPRGRVVEIYGPESSGKTTLTLQVVAEMQKLGGTCAFIDAEHALDVNYASKLGVDVGELLISQPDTGEQALEITDALVRSGSIDLIVIDSVAALVPKAEIEGEMGDSLPGLQARLMSQALRKLTGTIKRTNCLVIFINQIRMKIGVMFGSPETTTGGNALKFYASVRLDIRRIGSIKKGDDVIGNETKVKVVKNKVSPPFREAFFDILYGQGISRQGEIIDLGVDAKIVEKSGAWYSYNGDKIGQGKDNAREYLRENPDIAQEIENKVRAALGVAPMNSVPAAEVVTED

SEQ ID NO: 5685 - DNA, 1062 bp, Ralstonia eutropha
  CDS (1)..(1062): transl_table=11
atggacgacaagaaggccggcgccggcgtgagcgctgagaagcagaaggcgcttgccgccgcgctctcccagattgagaagcagtttggcaagggctcgatcatgcgcctgggcgatggcgaaatcgaacaggacatccaggtagtgtccaccggctcgctggggctggacatcgcgctgggcgtgggtggcctgccgcgcggccgcgtggtcgagatctacggtccggaatcgtccggcaagaccacgctgacgttgcaggtggtggccgaaatgcagaagctgggcggcacctgcgcgttcatcgacgccgagcacgccctggatgtccaatatgctggcaagctcggcgtggacgtcggcaatctgctgatctcccagcccgataccggcgagcaggccctggaaatcaccgacgcgctggtgcgctcgggttcgatcgacctgatcgtgatcgactcggtggccgctctggtgccaaaggcagaaatcgagggcgaaatgggcgattcgctgcccggcctgcaggcccgcctgatgagccaggggctgcgcaagctgaccggcacgatcaagcgcacgaactgcctggtgatcttcatcaaccagatccgtatgaagatcggtgtgatgtttggttctcccgaaaccaccaccggcggtaacgcgctgaagttctacgcctcggtgcgcctggacatccgccgtatcggctcgatcaagaagggcgacgaagtcgtcggcaacgagaccaaggtcaaggtggtcaagaacaaggtgtcacctccgttccgcgaggcgttcttcgacatcctctatggccagggcatctcgcgccagggtgaaatcatcgacctgggcgtggacgccaagatcgttgagaaggccggcgcctggtacagctacaacggcgagaagatcggccagggcaaggacaacgcacgcgagtatctgcgcgagaacccggacatcgccgacgagatcgagaacaaggtgcgtctggcgctgggcgtggcgccgctgaacaccgtggcgggcgcgccagcagaggtcgaaggctga

SEQ ID NO: 5686 - protein, 353 aa, Ralstonia eutropha
MDDKKAGAGVSAEKQKALAAALSQIEKQFGKGSIMRLGDGEIEQDIQVVSTGSLGLDIALGVGGLPRGRVVEIYGPESSGKTTLTLQVVAEMQKLGGTCAFIDAEHALDVQYAGKLGVDVGNLLISQPDTGEQALEITDALVRSGSIDLIVIDSVAALVPKAEIEGEMGDSLPGLQARLMSQGLRKLTGTIKRTNCLVIFINQIRMKIGVMFGSPETTTGGNALKFYASVRLDIRRIGSIKKGDEVVGNETKVKVVKNKVSPPFREAFFDILYGQGISRQGEIIDLGVDAKIVEKAGAWYSYNGEKIGQGKDNAREYLRENPDIADEIENKVRLALGVAPLNTVAGAPAEVEG

SEQ ID NO: 5687 - DNA, 1062 bp, Ralstonia metallidurans
  CDS (1)..(1062): transl_table=11
atggacgacaagaaggccggcgccggcgtgagcgctgagaagcagaaggcgcttgccgccgcgctctcccagattgagaagcagtttggcaagggctcgatcatgcgcctgggcgatggcgaaatcgaacaggacatccaggtagtgtccaccggctcgctggggctggacatcgcgctgggcgtgggtggcctgccgcgcggccgcgtggtcgagatctacggtccggaatcgtccggcaagaccacgctgacgctgcaggtggtggccgaaatgcagaagctgggcggcacctgcgcgttcatcgacgccgagcacgccctggatgtccaatatgctggcaagctcggcgtggacgtcggcaatctgctgatctcccagcccgataccggcgagcaggccctggaaatcaccgacgcgctggtgcgctcgggttcgatcgacctgatcgtgatcgactcggtggccgctctggtgccaaaggcagaaatcgagggcgaaatgggcgattcgctgcccggcctgcaggcccgcctgatgagccaggcgctgcgcaagctgaccggcacgatcaagcgcacgaactgcctggtgatcttcatcaaccagatccgtatgaagatcggtgtgatgtttggttctcccgaaaccaccaccggcggtaacgcgctgaagttctacgcctcggtgcgcctggacatccgccgtatcggctcgatcaagaagggcgacgaagtcgtcggcaacgagaccaaggtcaaggtggtcaagaacaaggtgtcacctccgttccgcgaggcgttcttcgacatcctctatggccagggcatctcgcgccagggtgaaatcatcgacctgggcgtggacgccaagatcgttgagaaggccggcgcctggtacagctacaacggcgagaagatcggccagggcaaggacaacgcacgcgagtatctgcgcgagaacccggacatcgccgacgagatcgagaacaaggtgcgtctggcgctgggcgtggcgccgctgaacaccgtggcgggcgcgccagcagaggtcgaaggctga

SEQ ID NO: 5688 - protein, 353 aa, Ralstonia metallidurans
MDDKKAGAGVSAEKQKALAAALSQIEKQFGKGSIMRLGDGEIEQDIQVVSTGSLGLDIALGVGGLPRGRVVEIYGPESSGKTTLTLQVVAEMQKLGGTCAFIDAEHALDVQYAGKLGVDVGNLLISQPDTGEQALEITDALVRSGSIDLIVIDSVAALVPKAEIEGEMGDSLPGLQARLMSQALRKLTGTIKRTNCLVIFINQIRMKIGVMFGSPETTTGGNALKFYASVRLDIRRIGSIKKGDEVVGNETKVKVVKNKVSPPFREAFFDILYGQGISRQGEIIDLGVDAKIVEKAGAWYSYNGEKIGQGKDNAREYLRENPDIADEIENKVRLALGVAPLNTVAGAPAEVEG

SEQ ID NO: 5689 - DNA, 1059 bp, Ralstonia solanacearum
  CDS (1)..(1059): transl_table=11
atggaagacggcaagaaggcagcctcgatgagcgcagaaaagcagaaggcgctggctgccgcgctcgcgcagatcgaaaagcagttcggcaagggctcgatcatgaagatgggcgacgccgaggtggagccggtccaggttgtgtccaccggctcgctgggtctggacgtcgcgctgggcgtcggcggcctgccgcgcggtcgcgtggtcgagatctacggccccgaatcgtccggcaagaccacgctgacgctgcaggtggtcgccgagatgcagaagctgggcggcacctgcgccttcatcgacgccgagcatgcgctggacgtcacctatgccgacaagctcggcgtgaaggtgccggacctgctgatctcccaaccggacaccggtgagcaggcgctggaaatcgctgacgcgctggtgcgctcgggctcggtcgacctgatcgtcatcgactcggtggccgcgctggtgcccaaggccgaaatcgaaggcgagatgggcgacgcgctgcccggtctgcaggcccgcctgatgagccaggcgctgcgcaagctgaccggcaccatcaagcgcaccaactgcctggtgatcttcatcaaccagatccgcatgaagatcggcgtgatgttcggctcgccggaaaccaccacgggcggcaatgcgctcaagttttacgcttcggtgcgtctggacatccgccgcatcggctcgatcaagaagggcgatgaggtggtcggcaacgagaccaaggtcaaggtcgtcaagaacaaggtggcgccgccgttccgcgaggcgatcttcgacatcctctacggtgcgggcgtgtcgcgcgaaggcgagatcatcgatctgggcgtggaagccaaggtggtcgagaaatccggcgcctggtacagctacaacggcgagcgcatcggtcagggccgtgacaactgccgcgaattcctgcgcgaaaacgccgaactggcccgcgagatcgaaaacaaggtccgcgaacacctgggcgtgacgccgatgggcgccgtcacgctggccgaggaagtcgaggaagattga

SEQ ID NO: 5690 - protein, 352 aa, Ralstonia solanacearum
MEDGKKAASMSAEKQKALAAALAQIEKQFGKGSIMKMGDAEVEPVQVVSTGSLGLDVALGVGGLPRGRVVEIYGPESSGKTTLTLQVVAEMQKLGGTCAFIDAEHALDVTYADKLGVKVPDLLISQPDTGEQALEIADALVRSGSVDLIVIDSVAALVPKAEIEGEMGDALPGLQARLMSQALRKLTGTIKRTNCLVIFINQIRMKIGVMFGSPETTTGGNALKFYASVRLDIRRIGSIKKGDEVVGNETKVKVVKNKVAPPFREAIFDILYGAGVSREGEIIDLGVEAKVVEKSGAWYSYNGERIGQGRDNCREFLRENAELAREIENKVREHLGVTPMGAVTLAEEVEED

SEQ ID NO: 5691 - DNA, 1086 bp, Rhizobium etli
  CDS (1)..(1086): transl_table=11
atgtctcagaattcattgcggctggtagaggacaaatcggtggacaaaagcaaggcgcttgaagcggcactctcacagattgagcggtcgttcggcaagggctcgatcatgaaactcggttccaacgagaacgtcatcgaaatcgagacgatttcgacgggttcgctggggctcgatatcgcgcttggcgtcggcggcctgccgaagggccgcatcatcgaaatctacgggccggaaagctcaggcaagacgacgctggcgctgcagaccatcgcggaatcgcagaagaagggcggcatctgcgcctttgtcgacgccgaacatgcgctcgatccggtctatgcccgcaagcttggcgtcgatctccagaaccttctgatctcgcagcccgataccggcgagcaggcgcttgagattaccgatacgctggtgcgctccggcgccgtcgacgttctggtcgtcgactcggtcgccgcactgacgccgcgtgccgaaatcgaaggtgaaatgggcgacagccttcccggcttgcaggcacgtctgatgagccaggcgctgcgcaagctgaccgcctcgatctccaagtcgaatacgatggtgatcttcatcaaccagatccgcatgaagatcggcgtcatgttcggttcgcctgagacaacgacgggcggcaatgcgctgaaattctatgcctccgtgcgcctcgacatccgtcgcatcggctcggtcaaggagcgcgaagaggtgatcggcaaccaaacccgcgtcaaggtcgtcaagaacaagatggcgcctcccttcaagcaggtcgaattcgacatcatgtatggcgaaggcgtatcgaagaccggcgaactcgtcgatctcggcgtcaaggccggcatcgtcgaaaagtcgggcgcctggttttcctataacagccagcgtctcggccagggcggcgaaaacgccaagaccttcctgcgcgacaatcccgatctcgcccgtgagatcgagctggcgttgcgcgaaaatgccggtctcatcgcagaccgcttcctgcagaacggcgggccggatgcagacgacggcgatggcgcggacatgtaa

SEQ ID NO: 5692 - protein, 361 aa, Rhizobium etli
MSQNSLRLVEDKSVDKSKALEAALSQIERSFGKGSIMKLGSNENVIEIETISTGSLGLDIALGVGGLPKGRIIEIYGPESSGKTTLALQTIAESQKKGGICAFVDAEHALDPVYARKLGVDLQNLLISQPDTGEQALEITDTLVRSGAVDVLVVDSVAALTPRAEIEGEMGDSLPGLQARLMSQALRKLTASISKSNTMVIFINQIRMKIGVMFGSPETTTGGNALKFYASVRLDIRRIGSVKEREEVIGNQTRVKVVKNKMAPPFKQVEFDIMYGEGVSKTGELVDLGVKAGIVEKSGAWFSYNSQRLGQGGENAKTFLRDNPDLAREIELALRENAGLIADRFLQNGGPDADDGDGADM

SEQ ID NO: 5693 - DNA, 1095 bp, Rhizobium leguminosarum bv
  CDS (1)..(1095): transl_table=11
atgtctcagaattcattgcggctggtagaggacaaatcggtggacaaaagcaaggcgcttgaagcggcactctcacagatagagcggtcgttcggcaagggctcgatcatgaaactcggctccaacgagaatgttgtcgagatcgagacgatctcgaccggctcgcttggtctcgatattgcactcggcgttggtggcctgccgaggggccgcatcatcgaaatctacgggccggaaagctccggtaagacgacgcttgcactgcagacgattgccgaagcgcagaagaagggcggcatctgcgccttcgtcgatgccgaacatgcgctcgatcccgtctatgcccgcaagcttggcgtcgacctgcagaaccttctgatctcgcagcccgataccggcgagcaggcgcttgaaatcaccgatacgctggtgcgctccggcgccgtcgacgttctcgtcgtcgactcggttgcggcattgacgccgcgcgccgaaatcgaaggcgaaatgggcgacagccttcccggcctgcaggcacgattgatgagccaggcgctgcgcaagctcaccgcttcgatctcgaagtcgaacactatggtgatcttcatcaaccagatccgcatgaagatcggcgtcatgttcggctcgccggaaacgacgacaggcggcaatgcgctgaaattctatgcttccgtgcgccttgacatccgccgcatcggcgctgtcaaggagcgcgaagaggtgatcggcaaccagacccgcgtcaaggtcgtcaagaacaagatggcgccacccttcaagcaggtcgagttcgacatcatgtatggcgagggtgtttccaagaccggcgaactggtcgatctcggcgtcaaggccggcatcgtcgaaaagtcgggcgcctggttctcctataacagccagcgtctcggccagggccgtgaaaacgccaagactttcctgcgcgacaatccggacctcgcccgcgagatcgaactgtcgctgcgccagaatgccggcctgatcgccgaccgtttcctgcagaacggtggaccggaccccgatgacggcgatggcgatgccactgcggaaatgtaa

SEQ ID NO: 5694 - protein, 364 aa, Rhizobium leguminosarum bv
MSQNSLRLVEDKSVDKSKALEAALSQIERSFGKGSIMKLGSNENVVEIETISTGSLGLDIALGVGGLPRGRIIEIYGPESSGKTTLALQTIAEAQKKGGICAFVDAEHALDPVYARKLGVDLQNLLISQPDTGEQALEITDTLVRSGAVDVLVVDSVAALTPRAEIEGEMGDSLPGLQARLMSQALRKLTASISKSNTMVIFINQIRMKIGVMFGSPETTTGGNALKFYASVRLDIRRIGAVKEREEVIGNQTRVKVVKNKMAPPFKQVEFDIMYGEGVSKTGELVDLGVKAGIVEKSGAWFSYNSQRLGQGRENAKTFLRDNPDLAREIELSLRQNAGLIADRFLQNGGPDPDDGDGDATAEM

SEQ ID NO: 5695 - DNA, 1098 bp, Rhizobium loti
  CDS (1)..(1098): transl_table=11
atggctcagaattctttgcggcttgtagaggataaggcagtggacaaatcaaaggctctggatgcggcgctgtcgcaaatcgagcgggctttcggcaagggctcgatcatgcggctcggcgcgaacgagcaggtcgtcgagatcgaaaccgtgccgaccggctcgctcggcctcgacatcgcgctcggcgtcggtggcctgccgcgcggccgcatcatcgagatctacggaccggaaagctcgggcaagacgacgctggccctccacacggtggccgaagcccagaagaagggcggcatctgcgccttcgtcgacgccgaacacgcgctcgatccggtctatgcccgcaagctcggcgtcgaccttgaaaacctgctgatctcgcagcccgataccggcgagcaggcgctggagatctgcgacacgctggtgcgttccggcgccatcgacgtgctggtggtcgattcggtcgcggcactgacgccgcgcgccgaaatcgagggcgagatgggcgattcgctgcccggcctgcaggctcgactgatgagccaggcgctgcgcaagctgaccgcctcgatctcgcgctccaacaccatggtcatcttcatcaaccagatccgcatgaagatcggcgtcatgttcggttcgcccgagaccacgaccggcggcaatgcgctgaaattctatgcgtcggtgcgcctcgatatccgccgcatcggctcggtcaaggaccgcgacgaggtcgttggcaaccagacccgcgtcaaggtggtcaagaacaagctggcgccgcccttcaaggtggtcgagttcgacatcatgtatggcgagggcgtgtccaagaccggcgaactggtcgacctcggcgtcaaggccggcgtggttgagaaatcgggcgcctggttctcctacaattcgcaacgtctcggccaggggcgcgaaaatgcaaagctgttcctgcgcgacaatcccgataccgcacgcgagatcgaactggcgctcaggcagaatgccgggctgatcgccgaaaaattcctcgagaatggcggctctgaaggcggcgacgacggttttgaggacgaagccggcgcaatgtag

SEQ ID NO: 5696 - protein, 365 aa, Rhizobium loti
MAQNSLRLVEDKAVDKSKALDAALSQIERAFGKGSIMRLGANEQVVEIETVPTGSLGLDIALGVGGLPRGRIIEIYGPESSGKTTLALHTVAEAQKKGGICAFVDAEHALDPVYARKLGVDLENLLISQPDTGEQALEICDTLVRSGAIDVLVVDSVAALTPRAEIEGEMGDSLPGLQARLMSQALRKLTASISRSNTMVIFINQIRMKIGVMFGSPETTTGGNALKFYASVRLDIRRIGSVKDRDEVVGNQTRVKVVKNKLAPPFKVVEFDIMYGEGVSKTGELVDLGVKAGVVEKSGAWFSYNSQRLGQGRENAKLFLRDNPDTAREIELALRQNAGLIAEKFLENGGSEGGDDGFEDEAGAM

SEQ ID NO: 5697 - DNA, 1056 bp, Rhizobium leguminosarum bv
  CDS (1)..(1056): transl_table=11
gtggacaaaagcaaggcgcttgaagcggcactctcacagatagagcggtcgttcggcaagggctcgatcatgaaactcggctccaacgagaatgttgtcgagatcgagacgatctcgaccggctcgcttggtctcgatattgcactcggcgttggtggcctgccgaggggccgcatcatcgaaatctacgggccggaaagctccggtaagacgacgcttgcactgcagacgattgccgaagcgcagaagaagggcggcatctgcgccttcgtcgatgccgaacatgcgctcgatcccgtctatgcccgcaagcttggcgtcgacctgcagaaccttctgatctcgcagcccgataccggcgagcaggcgcttgaaatcaccgatacgctggtgcgctccggccgcgtcgacgttctcgtcgtcgactcggttgcggcattgacgccgcgcgccgaaatcgaaggcgaaatgggcgacaccgttcccggcctgcaggcacgattgatgagccaggcgctgcgcaagctcaccgcttcgatctcgaagtcgaacactatggtgatcttcatcaaccagatccgcatgaagatcggcgtcatgttcggctcgccggaaacgacgacaggcggcaatgcgctgaaattctatgcttccgtgcgccttgacatccgccgcatcggcgctgtcaaggagcgcgaagaggtgatcggcaaccagacccgcgtcaaggtcgtcaagaacaagatggcgccacccttcaagcaggtcgagttcgacatcatgtatggcgagggtgtttccaagaccggcgaactggtcgatctcggcgtcaaggccggcatcgtcgaaaagtcgggcgcctggttctcctataacagccagcgtctcggccagggccgtgaaaacgccaagactttcctgcgcgacaatccggacctcgcccgcgagatcgaactgtcgctgcgccagaatgccggcctgatcgccgaccgtttcctgcagaacggtggaccggaccccgatgacggcgatggcgatgccactgcggaaatgtaa

SEQ ID NO: 5698 - protein, 351 aa, Rhizobium leguminosarum bv
MDKSKALEAALSQIERSFGKGSIMKLGSNENVVEIETISTGSLGLDIALGVGGLPRGRIIEIYGPESSGKTTLALQTIAEAQKKGGICAFVDAEHALDPVYARKLGVDLQNLLISQPDTGEQALEITDTLVRSGRVDVLVVDSVAALTPRAEIEGEMGDTVPGLQARLMSQALRKLTASISKSNTMVIFINQIRMKIGVMFGSPETTTGGNALKFYASVRLDIRRIGAVKEREEVIGNQTRVKVVKNKMAPPFKQVEFDIMYGEGVSKTGELVDLGVKAGIVEKSGAWFSYNSQRLGQGRENAKTFLRDNPDLAREIELSLRQNAGLIADRFLQNGGPDPDDGDGDATAEM

SEQ ID NO: 5699 - DNA, 1047 bp, Rhizobium meliloti
  CDS (1)..(1047): transl_table=11
gtggacaaaagcaaggcacttgaagcggctctttcccagatcgaacgttcgttcggcaagggatcgatcatgaagctcggagcgaaggacagcgtagttgagatcgaaaccgtctccaccggttcgctcggcctcgatatcgcgctcggcatcggcggcctgccgaagggccgtatcatcgagatctatggtccggaaagctcgggcaagacgacgctggcgctgcagaccattgccgaggcacagaagaagggcggcatctgcggcttcgtcgatgccgagcatgcactcgatccggtctatgcacgaaagctcggggtcgatctcgaaaatctcctgatttcgcagcctgatacgggcgagcaggcgctggaaatcaccgatacgctggtccgttcgggtgcgatcgacattctcgtcatcgattcggtggccgcactcgtgccgcgcgccgaaatcgagggcgagatgggcgacagtctgccgggcatgcaggcgcgcctcatgagccaggcgctgcgcaagcttacggcatcgatctccaagtcgaactgcatggtgatcttcatcaaccagatccgcatgaagatcggcgtgatgttcggctcgccggaaacgacgacgggcggcaatgcgctcaagttctacgcttcggtgcgcctcgacattcgccgcatcggttcggtcaaggagcgcgaggaagtggtcggcaaccagacccgcgtcaaggtcgtcaagaacaagatggcaccgcccttcaagcaggtcgagttcgacatcatgtatggcgaaggcgtttcgaagacgggcgaattgatcgatctcggcgtcaaggcgggcatcgtcgagaaatcgggcgcctggttctcctataacagccagcggctcggccagggacgggaaaacgccaagctcttcctgcgggagaatcccgaactgttgcgcgaaatcgaaacggctctgcggcagaatgcgggtctcatcgccgaccggttcctggagaatggcgggccggaaagcgacggcgacgaagccgccgatatgtaa

SEQ ID NO: 5700 - protein, 348 aa, Rhizobium meliloti
MDKSKALEAALSQIERSFGKGSIMKLGAKDSVVEIETVSTGSLGLDIALGIGGLPKGRIIEIYGPESSGKTTLALQTIAEAQKKGGICGFVDAEHALDPVYARKLGVDLENLLISQPDTGEQALEITDTLVRSGAIDILVIDSVAALVPRAEIEGEMGDSLPGMQARLMSQALRKLTASISKSNCMVIFINQIRMKIGVMFGSPETTTGGNALKFYASVRLDIRRIGSVKEREEVVGNQTRVKVVKNKMAPPFKQVEFDIMYGEGVSKTGELIDLGVKAGIVEKSGAWFSYNSQRLGQGRENAKLFLRENPELLREIETALRQNAGLIADRFLENGGPESDGDEAADM

SEQ ID NO: 5701 - DNA, 1068 bp, Rhodobacter capsulatus
  CDS (1)..(1068): transl_table=11
atggcaacgacgggcttgttcgagatgaacgacaaaggcaaggcagacaagcaaaaggcgctggaatgcgcccttgcgcagatcgaacggcagttcggcaagggctcgatcatgaagcttggcggcgacaccccgccgccggagatcgaggccacctcgaccggctcgcttggcctggacattgcgcttggcatcggcggtctgccgaaggggcggatcgtcgagatctacgggccggaaagctcggggaagaccacgctgacgctgcattgcattgcggaagaacagaaaaagggcggagtctgcgcctttgtcgacgccgaacatgcgcttgacccctattatgcgaagaagctaggcgtcagtctggaagatctgctgatctcgcagcccgacaccggggaacaggcgctggaaatcgtcgacacgctggtgcgctcgggcgcggtgagcctggtcgtcgtcgactcggtggcggcgctgacgccgaaggccgagatcgagggcgacatgggcgatgcgaccgtgggcgcgcaggcccggctgatgagccaggcgatgcggaaactgaccgcctcgatcggtcggtcgaactgcatggtgatcttcatcaaccagatccggatgaagatcggcgtgatgttcggctcgcccgagacgacctcgggcggcaatgcgctgaaattctacgcttcggtgcgtctggacatccgccgcaccggcgcgatcaaggaccgcgacgaggtgatcggcaaccagacccgggtcaaggtggtgaagaacaaggtggcgccgcccttccgcgaggtcgaattcgacatcctttacggcgagggcatttccaaggtcggcgagctggtcgatctgggcgtcaaggcgggcgtggtggcgaaatcgggcgcctggtattcctatggcgacgagcgcatcggccagggccgcgagaatgccaagcaattcctgcgcgacaatcccgacatcgcctatgagatcgaggacaagatccgggccagccacgggctggaattcggtgtcgatccgaccgcggaagatctgaccgaagagtaa

SEQ ID NO: 5702 - protein, 355 aa, Rhodobacter capsulatus
MATTGLFEMNDKGKADKQKALECALAQIERQFGKGSIMKLGGDTPPPEIEATSTGSLGLDIALGIGGLPKGRIVEIYGPESSGKTTLTLHCIAEEQKKGGVCAFVDAEHALDPYYAKKLGVSLEDLLISQPDTGEQALEIVDTLVRSGAVSLVVVDSVAALTPKAEIEGDMGDATVGAQARLMSQAMRKLTASIGRSNCMVIFINQIRMKIGVMFGSPETTSGGNALKFYASVRLDIRRTGAIKDRDEVIGNQTRVKVVKNKVAPPFREVEFDILYGEGISKVGELVDLGVKAGVVAKSGAWYSYGDERIGQGRENAKQFLRDNPDIAYEIEDKIRASHGLEFGVDPTAEDLTEE

SEQ ID NO: 5703 - DNA, 1092 bp, Rhodopseudomonas palustris
  CDS (43)..(1092): transl_table=11
atggctgcccccaccgcattgcgtatcgtcgaaggttcctcaatggacaaatccaaggcgctctccgccgcgctgtctcagatcgagcgtcagttcggcaagggctcggtgatgaggctcggcaagaacgaccgctcgatggacatcgagacgatctcctccggctcgctcgggctcgacatcgcgctcggcgtcggcggtctgccgaaggggcggatcgttgagatctacgggccggaatcctccggcaagaccacgctggcgctgcactgcgtcgcggaagcccagaagaagggcggcatttgtgccttcgtcgacgccgaacacgcgctcgatccggtctatgcccgcaagctcggcgtcaatgtcgacgacctgctgatctcgcagcccgatcacggcgagcaggcgcttgagatcgccgacacgctggtgcgctccggcgcgatcgacgtgctgatcgtcgactcggtggcggcgctggtgccgcgcgccgaactcgaaggcgaaatgggtgacgcgctgcccggcctgcaggcgcggttgatgagccaggcgctgcgcaagctcaccgcctcgatcaacaagtccaataccatggtgatcttcatcaaccagatccggatgaagatcggcgtgatgtacggctcgccggaaaccaccaccggcggcaacgcgctgaaattctacgcctcggtccggctcgacatccgccgcatcggccagatcaaggaacgcgacgaggtggtcggcaaccagacccgcgtcaaggtggtgaagaacaagctggcgccgccgttcaagcaggtcgaattcgacatcatgtacggcgaaggcgtctccaagatgggcgagatcctcgatctcggcgtcaaggccggcatcgtcgaaaagtcgggcgcctggttctcgcatgacagccagcggctcggccagggacgcgagaacgccaaggcgttcctcaaggccaaccccgacatgaccgccaagatcgaggcggcgatccgccagaattccggactgatcgccgaacagattctcgcaggctcgcccgagagcgatgccgacggcgaggagccgatggaagagtaa

SEQ ID NO: 5704 - protein, 349 aa, Rhodopseudomonas palustris
MDKSKALSAALSQIERQFGKGSVMRLGKNDRSMDIETISSGSLGLDIALGVGGLPKGRIVEIYGPESSGKTTLALHCVAEAQKKGGICAFVDAEHALDPVYARKLGVNVDDLLISQPDHGEQALEIADTLVRSGAIDVLIVDSVAALVPRAELEGEMGDALPGLQARLMSQALRKLTASINKSNTMVIFINQIRMKIGVMYGSPETTTGGNALKFYASVRLDIRRIGQIKERDEVVGNQTRVKVVKNKLAPPFKQVEFDIMYGEGVSKMGEILDLGVKAGIVEKSGAWFSHDSQRLGQGRENAKAFLKANPDMTAKIEAAIRQNSGLIAEQILAGSPESDADGEEPMEE

SEQ ID NO: 5705 - DNA, 1101 bp, Rhodospirillum rubrum
  CDS (1)..(1101): transl_table=11
atgtcgcagagcgtcttgcgtctggtggataaggatacgatggacaagcaaaaggctttggaagcggctgtgggccagatcgagcgcgcctttggcaagggctcgatcatgaaactcggccagcgcggcagtgtcgtcgacatcgagtcgatcagcaccggatccctgggcctggatatcgccctgggcatcggcggtctgccgcgcgggcgcatcgtcgagatctacgggcccgaaagctcgggcaagaccacgctcgccctgcatgtggtggccgaggcgcagaagaagggcggtcaatgcgccttcgtcgacgccgagcacgccttcgatccgctctatgcccgcaagcttggcgtcagccttgatgacctgctggtgtcccagcccgacaccggcgaacaggccctggaaatcgccgataccctggtgcggtcgggcgccatcgatgtgctggtgattgactcggtggcggcgctggtgcccaaggccgaactggaaggcgatatgggcgattcccatgtcggcctgcaggcgcggttgatgagccaagccctgcgcaagctgaccggcacggtctcgcgctccaacaccttgattatcttcatcaaccagatccgcatgaagatcggcgtgatgttcggcaaccccgaaaccaccaccggcggcaatgcgctgaagttctacgcctcggtccgtctcgacatccgccgcatcggcgcggtgaaggacaaggaggaggtcgtcggcaaccagacgcgggtcaaggtggtcaagaacaaggtcgccccgccgttcaaggtggtcgaattcgacatcatgtatggcgagggcatctccaagctaggcgagatgctcgacctgggggtgaaggccaatatcatcgagaagtcgggggcgtggttctcgtataattccacccgcatcggccagggccgcgagaacgccaagcagttcctgcgcgacaatccggcgatggccgaggaaatcgaaaacgccgtgcgcgccaatgccgggctgatcgccgaggagatgatcggcggtccgggcggcgaggatgacgacgccggtggcgccgccggagtcggcgacgaagcctga

SEQ ID NO: 5706 - protein, 366 aa, Rhodospirillum rubrum
MSQSVLRLVDKDTMDKQKALEAAVGQIERAFGKGSIMKLGQRGSVVDIESISTGSLGLDIALGIGGLPRGRIVEIYGPESSGKTTLALHVVAEAQKKGGQCAFVDAEHAFDPLYARKLGVSLDDLLVSQPDTGEQALEIADTLVRSGAIDVLVIDSVAALVPKAELEGDMGDSHVGLQARLMSQALRKLTGTVSRSNTLIIFINQIRMKIGVMFGNPETTTGGNALKFYASVRLDIRRIGAVKDKEEVVGNQTRVKVVKNKVAPPFKVVEFDIMYGEGISKLGEMLDLGVKANIIEKSGAWFSYNSTRIGQGRENAKQFLRDNPAMAEEIENAVRANAGLIAEEMIGGPGGEDDDAGGAAGVGDEA

SEQ ID NO: 5707 - DNA, 1044 bp, Rhodococcus sp
  CDS (1)..(1044): transl_table=11
atggcaccacaggcacacgatcgagacaaggcgctcgacctcgcgctggcgcagatcgacaagaacttcggcaagggctcggtgatgcgcctgggcgaaggtgtccgtcagcccatcgccgtcatcccgaccggctccatcgcgctggacgtcgccctcggcatcggcgggctgccccgcggccgtgtcgtcgagatctacggcccggagtcctcgggtaagaccaccgtggctctgcacgctgtcgccaacgcccaggcggcaggcggtatcgccgcgttcatcgacgccgagcacgcgctcgaccccgactacgcccagaagctcggcgtcgacaccgacgcgctgctggtgtcgcagcccgacaccggtgagcaggcgctggaaatcgcagacatgctgatccgctccggcgccctcgacatcctcgtggtcgactccgtggccgctctggtcccgcgcgccgagatcgagggtgagatgggcgacagccacgtcggtctgcaggcccgtctgatgagccaggcgctccgtaagatgaccggtgcgctcagcaattccggcaccaccgcgatcttcatcaaccagctgcgcgaaaagatcggcgtcatgttcggttcccccgaaaccaccaccggtggtaaggcattgaagttctactcgtcggtgcgcctcgacgtgcggcggatcgagaccctgaaggacggcaccgacgcggtgggtaaccgtacccgcgtcaaggtggtcaagaacaaggtcgcgccgccgttcaagcaggccgagttcgacatcctctacggcctgggaatcagcaaggaaggctcgctgatcgacatgggtgtcgaacacgggttcatccgcaagtcgggctcctggtacacctacgaaggcgaccagctgggacagggcaaggagaacgcccgcaagttcctgttggagaacaccgacatccgggacgagatcgagaagaagatcaaggaaaagctcggaatcggcgccgacgtcactgctgctacggatgacgccgccccggtcgaattctaa

SEQ ID NO: 5708 - protein, 347 aa, Rhodococcus sp
MAPQAHDRDKALDLALAQIDKNFGKGSVMRLGEGVRQPIAVIPTGSIALDVALGIGGLPRGRVVEIYGPESSGKTTVALHAVANAQAAGGIAAFIDAEHALDPDYAQKLGVDTDALLVSQPDTGEQALEIADMLIRSGALDILVVDSVAALVPRAEIEGEMGDSHVGLQARLMSQALRKMTGALSNSGTTAIFINQLREKIGVMFGSPETTTGGKALKFYSSVRLDVRRIETLKDGTDAVGNRTRVKVVKNKVAPPFKQAEFDILYGLGISKEGSLIDMGVEHGFIRKSGSWYTYEGDQLGQGKENARKFLLENTDIRDEIEKKIKEKLGIGADVTAATDDAAPVEF

SEQ ID NO: 5709 - DNA, 1047 bp, Rhodopseudomonas viridis
  CDS (1)..(1047): transl_table=11
atggacaaaaccaaggcgctcgacgccgcgctcactcagatcgagcgggcattcggcaagggctcgatcatgcggctcggcaaatccggcgcggcgctggaggtcgagacgatttcgaccggctcgctcgggctcgacatcgcgctcggcatcggcgggctgccgcgcggccgagtggtcgagattttcggcccggaatcgtcgggcaagaccacgctggcgctgcacaccgtcgccgaggcgcagaagaagggcggggtttgtgccttcatcgacgccgagcacgccctcgacccgctctatgcccgcaagcttggggtcaatctcgacgacctgttgatctcgcagccggatgctggtgagcaggcgctggagatcgccgacacgctggttcgctcgggcgccatcgacgtgctggtggtcgactcggtcgccgccctggtgccgcgcgccgagctggaaggcgaaatgggcgacagtcagccgggcatgcaggcgcggttgatgagccaggcgcttcgcaagctcactgcctcgatctcgcgctccaactgcatggtgatcttcatcaaccagatccgcatgaagatcggcgtgatgtacggctcgccggagaccaccaccgggggtaacgccctgaaattctacgcctcggtccgcctcgacatccgccgcatcggtgcaatcaaggaacgcgacgaggttgtgggcaaccagacccgggtgaaagtggtcaagaacaagctcgccccgccgttcaagcaggtcgagttcgacatcatgtacggcgagggcatctccaaggccggtgagttgatcgacctcggtgtcaaagccggcgtggttgataagtcgggctcatggttctcccacgatagccagcgcatcggtcagggccgcgagaacgtcaagggcttcctcaagggccaccccgacgtcgccggccgcatcgaggcggcgattcgccagaatgccggcttgatcgccgagcggattctcggttcctcggaggacagcgaggacggcgaggacgctgccgaggcgtga

SEQ ID NO: 5710 - protein, 348 aa, Rhodopseudomonas viridis
MDKTKALDAALTQIERAFGKGSIMRLGKSGAALEVETISTGSLGLDIALGIGGLPRGRVVEIFGPESSGKTTLALHTVAEAQKKGGVCAFIDAEHALDPLYARKLGVNLDDLLISQPDAGEQALEIADTLVRSGAIDVLVVDSVAALVPRAELEGEMGDSQPGMQARLMSQALRKLTASISRSNCMVIFINQIRMKIGVMYGSPETTTGGNALKFYASVRLDIRRIGAIKERDEVVGNQTRVKVVKNKLAPPFKQVEFDIMYGEGISKAGELIDLGVKAGVVDKSGSWFSHDSQRIGQGRENVKGFLKGHPDVAGRIEAAIRQNAGLIAERILGSSEDSEDGEDAAEA

SEQ ID NO: 5711 - DNA, 1089 bp, Rickettsia conorii; identical to SEQ ID NO: 5273
  CDS (58)..(1089): transl_table=11

SEQ ID NO: 5712 - protein, 343 aa, Rickettsia conorii
MSNTDKERAIAAALAQIEKSYGKGSVMKLGQRPHVDIEAVSTGSLGLDIALGIGGVPKGRIIEIFGPESSGKTTLTLHLIAEAQKKGGTCAFIDAEHALDPAYAKKLGVNIDELIISQPDTGEQALEIADTLIRSSGIDMIIIDSVAALVPKSEIEGEMGDAQMASQARLMSQALRKLTASINRTNCITVFINQIRMKIGVMFGSPETTTGGNALKFYASVRIDIRRIGSIKDKEEVIGSQTKVKVVKNKVSPPFKTADFDIMYGSGISKEGEIIDLGVKLDIVEKSGSWFSYKNVRIGQGRENVKQYLKEHPQISNEIEKIIREKSSKITNINLDQTEEEND

SEQ ID NO: 5713 - DNA, 1032 bp, Rickettsia felis
  CDS (1)..(1032): transl_table=11
atgtcaaatacagataaggaaagagccattgccgcagcactcgcacaaatcgaaaaaagctacggtaaaggttcggtaatgaaactagggcagcgtccgaacattgatatagaagccgtatcaaccggttcacttgggcttgatatagctcttggaatcggcggtgttcctaaaggtagaatcattgaaatttttggtcctgaaagctcaggtaaaaccactttaacgctacatttaattgccgaagcacagaaaaagggcggtacatgtgcctttattgatgccgagcatgcccttgaccctgcttatgctaaaaaattaggcgtaaatattgatgagcttattatttcacaaccagatacaggtgaacaagctctagaaattgccgatacgttaattcgttccggcggtattgatatgataataatagatagtgttgcggctttagtaccgaaatcagagattgagggcgagatgggtgatgcccaaatggcttctcaagcaagattaatgagccaggctttacgtaaacttaccgcatcaattaatcgtaccaattgtattactgttttcatcaaccaaatcagaatgaaaataggcgtaatgttcggtaatcccgaaactacgacaggcggtaatgctttgaaattctatgcttctgttaggatcgatataagaagaataggctccattaaagataaagaagaagtaataggcagccaaactaaagtaaaagtagtcaagaacaaagtatctcctccgtttaaaactgcagattttgatataatgtacggttcaggtatttcaaaagaaggcgagataatcgaccttggagttaagcttgatattgttgagaaatccggctcttggttttcctataataacgtacgaatcggtcaagggcgtgaaaacgtcaaacaatatttaaaagaacatccacaaatttccaatgaaattgagaaaatcatacgcgaaaaatcgtcaaaaattactaatataaatcttgatcaaacggaggaagaaaatgattga

SEQ ID NO: 5714 - protein, 343 aa, Rickettsia felis
MSNTDKERAIAAALAQIEKSYGKGSVMKLGQRPNIDIEAVSTGSLGLDIALGIGGVPKGRIIEIFGPESSGKTTLTLHLIAEAQKKGGTCAFIDAEHALDPAYAKKLGVNIDELIISQPDTGEQALEIADTLIRSGGIDMIIIDSVAALVPKSEIEGEMGDAQMASQARLMSQALRKLTASINRTNCITVFINQIRMKIGVMFGNPETTTGGNALKFYASVRIDIRRIGSIKDKEEVIGSQTKVKVVKNKVSPPFKTADFDIMYGSGISKEGEIIDLGVKLDIVEKSGSWFSYNNVRIGQGRENVKQYLKEHPQISNEIEKIIREKSSKITNINLDQTEEEND

SEQ ID NO: 5715 - DNA, 1023 bp, Rickettsia typhi
  CDS (1)..(1023): transl_table=11
atgtcaaatacagacaaggaacgagccattgctgcagcactcgcacaaatagaaaaaagctacggtaaaggttccgtaatgaaactagggcaacgtccaaatattgatatagaagcaatatcaacaggctcacttggactagatatagcacttggaataggaggtgtccctaaaggcagaataattgagatttttggacctgaaagctcaggtaaaactactttgacactacatttaattgcggaatctcaaaaaaatggtggtacatgtgcgtttattgatgcagagcatgccttagacccagcttatgcaaagaaattaggcgtaaatattgatgagcttatcatttcacaaccagatacaggtgaacaagcgctagaaattgctgatacgttaattcgctcaggtggtattgatatgataataatagatagtgttgctgctttagtaccaaaatcagaaattgaaggtgaaatgggtgatgcccaaatggcttctcaagcaagattaatgagccaggcactccgtaaacttactgcatcaattaatcgtacaaattgtattactgtttttatcaaccaaatcagaatgaaaataggtgttatgttcggtagtcctgaaactacaacaggcggtaatgctttaaaattctatgcttctgttagaattgatataagaagaattggctccattaaagataaagaagaagtaataggtagccaaactaaagtaaaagtagtcaaaaacaaagtatctccaccatttaaaactgcagattttgatataatgtatggttcaggtatttccaaagaaggtgagataattgatcttggtgttaagcttgagattattgagaaatcaggctcgtggtttgcttacaataaagtacgcataggtcaaggacgtgaaaacgtcaaacaatatttaaaagaacatccacaaattgccaacgaaattgagaaaataatacgagaaaaatcgtcagcaattactaatataaatcttgatcaaacggaggaataa

SEQ ID NO: 5716 - protein, 340 aa, Rickettsia typhi
MSNTDKERAIAAALAQIEKSYGKGSVMKLGQRPNIDIEAISTGSLGLDIALGIGGVPKGRIIEIFGPESSGKTTLTLHLIAESQKNGGTCAFIDAEHALDPAYAKKLGVNIDELIISQPDTGEQALEIADTLIRSGGIDMIIIDSVAALVPKSEIEGEMGDAQMASQARLMSQALRKLTASINRTNCITVFINQIRMKIGVMFGSPETTTGGNALKFYASVRIDIRRIGSIKDKEEVIGSQTKVKVVKNKVSPPFKTADFDIMYGSGISKEGEIIDLGVKLEIIEKSGSWFAYNKVRIGQGRENVKQYLKEHPQIANEIEKIIREKSSAITNINLDQTEE

SEQ ID NO: 5717 - DNA, 1035 bp, Rubrobacter xylanophilus
  CDS (1)..(1035): transl_table=11
atggcattggacaagagcaaggcgctagacaccgccgtatcgcagatagagcggcagtttggcaagggttcgatcatgcggatgggcgaccgggcctcccagaaggtcgcctccatctccaccggctccctggcgctcgacctcgccctcggggtcgggggggtccccagggggcgcatcgtggagatcttcggtccggagtccagcggaaagaccaccctcgccctgcacatcatcgccgaggcccagagggccggcgggctcgccgcgttcatagacgccgagcacgccctcgaccccacctacgccgaggccataggcgtcgacctggagaacctctacttctcccagcccgacagcggcgagcaggccctcgagatcgccgacaccctcgtccgctccggggccctcgacgccgtggtcatagactccgtggccgcgctggtccctagagccgagatagagggtgagatgggggactctcacgtggggcttcaggcccggcttatgagccaggctctgaggaagctctcggggtcgctctcgcggtcggggaccacggcgatcttcataaaccagctgcgggagaagataggggtgatgttcggctcgccggagaccacgccggggggtcgggcgctgaagttctacgcgagcgtgcggatggacatccggcgcatcggggcgctgaaggccggcaacgagacggtgggcaaccagacgcgggtgaagatcgtcaagaacaaggttgcgccgccgttcaaggaggtcaccttcgacatcatgtacggggaggggatctccagggaggggagcctgctggacgtggggatagagcagggtgtgatccagaagagcggcgcctggttcgcctacggggaggagaggatcgggcaggggcgcgagaacgcccgcaagttcctcaaggagcacccggagatacgcgaccggataacccgcgaggtctacgagcggctgggcctcggcggggaggagcgggaggagctggagggccgggccgagccggtcctgtag

SEQ ID NO: 5718 - protein, 344 aa, Rubrobacter xylanophilus
MALDKSKALDTAVSQIERQFGKGSIMRMGDRASQKVASISTGSLALDLALGVGGVPRGRIVEIFGPESSGKTTLALHIIAEAQRAGGLAAFIDAEHALDPTYAEAIGVDLENLYFSQPDSGEQALEIADTLVRSGALDAVVIDSVAALVPRAEIEGEMGDSHVGLQARLMSQALRKLSGSLSRSGTTAIFINQLREKIGVMFGSPETTPGGRALKFYASVRMDIRRIGALKAGNETVGNQTRVKIVKNKVAPPFKEVTFDIMYGEGISREGSLLDVGIEQGVIQKSGAWFAYGEERIGQGRENARKFLKEHPEIRDRITREVYERLGLGGEEREELEGRAEPVL

SEQ ID NO: 5719 - DNA, 1047 bp, Saccharophagus degradans
  CDS (1)..(1047): transl_table=11
atggatgccagtaaatcaaaagcgttagaagctgcactttctcaaattgatcgccagttcggtaagggcacggttatgcgccttggcgataaaggcagagaaaaaatgcctgctatttcaaccggttcactcggtttagatgtggccttaggtataggtggcttgcccaaaggacgtattgttgagatttacggccctgaatcttcaggtaaaaccacgctaacccttcaagttattgcagaagcgcagcgccaaggtggcacttgtgctttcgttgatgccgagcatgcactagaccctgtatacgccgaaaagcttggtgtaaatgtagacgacctaattatttctcagccagataacggtgaacaggccttagaagttgccgatatgttggttcgttctggcgctgtagatgtgcttgttgtcgactccgtggcggcgcttactcccaaggccgaaatcgaaggcgatatgggcgaccaccacgttggtttgcaagcgcgattaatgtcgcaagcactgcgaaaaattacgggcaacattaaaaacgctaactgtttagcaatttttattaaccaaattcgtatgaagattggtgtgatgttcggcaacccagaaaccactaccggtggtaacgcgctgaagttctactcttcggttcgtttagatatccgtcgcattggctcagttaaagagggcgatgaggttgttggctcggatacgcgcgttaaagttgttaaaaataaagttgcgccaccctttaagcaagccgagtttcaaattttgtatggtcagggcataaaccgcttgggcgagattgtagactttggtgttaagcttggtttaattgataaagctggtgcttggtatagctataacggcgataaaattggccagggtaaagcaaatgctatgcaataccttcgcgataacaaagaagttgccgagttcttagagcaaaaaataaaggcggaattactgggcgatattaagcctgtagctaaagaaggcgctgaagttgaagaagagagcgcagagcaggagtaa

SEQ ID NO: 5720 - protein, 348 aa, Saccharophagus degradans
MDASKSKALEAALSQIDRQFGKGTVMRLGDKGREKMPAISTGSLGLDVALGIGGLPKGRIVEIYGPESSGKTTLTLQVIAEAQRQGGTCAFVDAEHALDPVYAEKLGVNVDDLIISQPDNGEQALEVADMLVRSGAVDVLVVDSVAALTPKAEIEGDMGDHHVGLQARLMSQALRKITGNIKNANCLAIFINQIRMKIGVMFGNPETTTGGNALKFYSSVRLDIRRIGSVKEGDEVVGSDTRVKVVKNKVAPPFKQAEFQILYGQGINRLGEIVDFGVKLGLIDKAGAWYSYNGDKIGQGKANAMQYLRDNKEVAEFLEQKIKAELLGDIKPVAKEGAEVEEESAEQE

SEQ ID NO: 5721 - DNA, 1062 bp, Salmonella choleraesuis
  CDS (1)..(1062): transl_table=11
atggctatcgacgaaaacaaacagaaagcgttggcggcagcactgggccaaattgaaaagcaatttggtaaaggctccatcatgcgtctgggtgaagaccgttctatggatgtggaaactatctccaccggttcgctttcactggacatcgcactcggtgcgggcggtctgccgatggggcgtatcgtcgaaatttacgggccggaatcttccggtaaaacgaccctgacgctgcaggtgattgccgctgcgcagcgtgaaggtaaaacctgtgcgtttatcgatgcggaacacgcgcttgaccctgtttacgcacgcaagctgggcgtcgatatcgataacctgctctgctctcagccggataccggcgagcaggcgctggaaatctgtgacgcgctggcgcgttcaggcgcggtggacgtcattgtggtcgactccgtagcggcgctaacgccgaaagcggaaatcgaaggcgaaattggcgactctcacatgggcctcgcggcgcgtatgatgagccaggcgatgcgtaagctggcggggaacctgaaacagtccaacacgctgttgattttcatcaaccagatccgtatgaagattggcgtgatgttcggtaacccggaaaccaccaccggcggtaacgcgctgaaattctacgcctctgttcgtcttgatatccgtcgtattggcgcggtgaaagagggcgataatgtcgtgggtagcgaaacgcgtgtgaaagtggtgaaaaacaaaatcgccgcgccgtttaagcaggccgagttccagatcctctacggcgaaggcatcaacttctatggcgaactggttgacctgggcgtgaaagagaagctgatcgagaaagcgggcgcatggtacagctacaacggcgagaagattggccagggtaaagcgaacgcgactacctggctgaaagagaacccggcgacagcgaaagagatcgagaaaagggttcgtgaattactgttgagtaatcagaatgccacgcccgatttcgccgttgacgatagcgaaggcgttgcagaaaccaacgaagatttttaa

SEQ ID NO: 5722 - protein, 353 aa, Salmonella choleraesuis
MAIDENKQKALAAALGQIEKQFGKGSIMRLGEDRSMDVETISTGSLSLDIALGAGGLPMGRIVEIYGPESSGKTTLTLQVIAAAQREGKTCAFIDAEHALDPVYARKLGVDIDNLLCSQPDTGEQALEICDALARSGAVDVIVVDSVAALTPKAEIEGEIGDSHMGLAARMMSQAMRKLAGNLKQSNTLLIFINQIRMKIGVMFGNPETTTGGNALKFYASVRLDIRRIGAVKEGDNVVGSETRVKVVKNKIAAPFKQAEFQILYGEGINFYGELVDLGVKEKLIEKAGAWYSYNGEKIGQGKANATTWLKENPATAKEIEKRVRELLLSNQNATPDFAVDDSEGVAETNEDF

SEQ ID NO: 5723 - DNA, 1062 bp, Salmonella paratyphi A
  CDS (1)..(1062): transl_table=11
atggctatcgacgaaaacaaacagaaagcgttggcggcagcaatgggccaaattgaaaagcaatttggtaaaggctccatcatgcgtctgggtgaagaccgttctatggatgtggaaactatctccaccggttcgctttcactggacatcgcactcggtgcgggcggtctgccgatggggcgtatcgtcgaaatttacgggccggaatcttccggtaaaacgaccctgacgctgcaggtgattgccgctgcgcagcgtgaaggtaaaacctgtgcgtttatcgatgcggaacacgcgcttgaccctgtttacgcacgcaagctgggcgtcgatatcgataacctgctttgttctcagccggataccggcgagcaggcgctggaaatctgtgacgcgctggcgcgttcaggcgcggtggacgtcattgtggtcgactccgtagcggcgctaacgccgaaagcggaaatcgaaggcgaaattggcgactctcacatgggcctcgcggcgcgtatgatgagccaggcgatgcgtaagctggcggggaacctaaaacagtccaacacgctgttgattttcatcaaccagatccgtatgaagattggcgtgatgttcggtaacccggaaaccaccaccggcggtaacgcgctgaaattctacgcctctgttcgtcttgatatccgtcgtattggcgcggtgaaagagggcgataatgtcgtgggtagcgaaacacgtgtgaaagtggtgaaaaacaaaatcgccgcgccgtttaagcaggccgagttccagatcctctacggcgaaggcatcaacttctatggcgaactggttgacctgggcgtgaaagagaagctgatcgagaaagcgggcgcatggtacagctacaacggcgagaagattggccagggtaaagcgaacgcgactacctggctgaaagagaacccggcgacagcgaaagagatcgagaaaagggttcgtgaattactgttgagtaatcagaatgccacgcccgatttcgccgttgacgatagcgaaggcgttgcagaaaccaacgaagatttttaa

SEQ ID NO: 5724 - protein, 353 aa, Salmonella paratyphi A
MAIDENKQKALAAAMGQIEKQFGKGSIMRLGEDRSMDVETISTGSLSLDIALGAGGLPMGRIVEIYGPESSGKTTLTLQVIAAAQREGKTCAFIDAEHALDPVYARKLGVDIDNLLCSQPDTGEQALEICDALARSGAVDVIVVDSVAALTPKAEIEGEIGDSHMGLAARMMSQAMRKLAGNLKQSNTLLIFINQIRMKIGVMFGNPETTTGGNALKFYASVRLDIRRIGAVKEGDNVVGSETRVKVVKNKIAAPFKQAEFQILYGEGINFYGELVDLGVKEKLIEKAGAWYSYNGEKIGQGKANATTWLKENPATAKEIEKRVRELLLSNQNATPDFAVDDSEGVAETNEDF

SEQ ID NO: 5725 - DNA, 1065 bp, Serratia marcescens
  CDS (1)..(1065): transl_table=11
atggctattgatgagaacaagcaaaaggcgttagctgcggcactgggccagattgagaaacagttcggcaaaggctccatcatgcgtctgggtgaagaccgctccatggacgtggaaacgatctccaccggctcactgtcactcgatatcgccctgggcgccggcggcctgccgatgggccgcatcgtagaaatctacggcccggaatcgtccggtaaaaccactttgacgctgcaggtgatcgccgccgcgcagcgcgaaggcaaaacctgtgcgttcatcgacgccgaacacgcgctggatcctatctatgcgaaaaagctgggcgtcgatatcgacaacctgctgtgctcccagccggataccggcgagcaggcgctggaaatctgtgatgcgctgacccgctccggcgcggttgatgtcatcatcgtcgactccgtggcggcgctgacgccgaaagcggaaatcgaaggtgaaatcggcgattcgcacatgggcctggcggcgcgcatgatgagccaggcgatgcgtaagctggccggcaacctgaaaaacgccaataccctgctgatcttcatcaaccagatccgtatgaaaattggtgtgatgttcggcaacccggaaaccacgaccggcggtaacgccctgaagttctatgcttcggtgcgtttggatatccgtcgtatcggcgccatcaaagaaggcgacgaagtggtgggcagcgaaacccgcgtgaaagtggtgaagaacaaaatcgctgcgccgttcaaacaggctgagttccaaatcatgtacggcgaaggcatcaacagccgcggcgaactggtcgatctgggcgtgaagcacaagatgatcgaaaaagccggcgcctggtacagctataacggcgagaagatcggtcagggcaaggcgaatgcctgtaacttcctgaaagaaaacccggctattgccgccgagctggataagaagctgcgtgacctgctgctgcacagcggcggtgagctggtggctgcctccggtgacgacttcgaagacgacgaagcggaaaccagcgagcagttctaa

SEQ ID NO: 5726 - protein, 354 aa, Serratia marcescens
MAIDENKQKALAAALGQIEKQFGKGSIMRLGEDRSMDVETISTGSLSLDIALGAGGLPMGRIVEIYGPESSGKTTLTLQVIAAAQREGKTCAFIDAEHALDPIYAKKLGVDIDNLLCSQPDTGEQALEICDALTRSGAVDVIIVDSVAALTPKAEIEGEIGDSHMGLAARMMSQAMRKLAGNLKNANTLLIFINQIRMKIGVMFGNPETTTGGNALKFYASVRLDIRRIGAIKEGDEVVGSETRVKVVKNKIAAPFKQAEFQIMYGEGINSRGELVDLGVKHKMIEKAGAWYSYNGEKIGQGKANACNFLKENPAIAAELDKKLRDLLLHSGGELVAASGDDFEDDEAETSEQF

SEQ ID NO: 5727 - DNA, 1074 bp, Shewanella oneidensis
  CDS (1)..(1074): transl_table=11
atgaaggtcgatccaaacaaagagaaagcacttgctgcggtattgagccaaattgagaagcaatttggtaaaggctccatcatgaagctgggcgaagaccgctctatggatgttgagaccatttctacaggttctctttcccttgacgtcgctcttggggcaggtggtttgcctatgggccgtatcgttgagatctatggtccagagtcatcaggtaaaacaactctgacattagaagtgattgccgccgctcagcgcgaaggtaaaacctgtgcctttatcgatgcagaacacgctcttgatcctatctacgcgaaaaaattaggcgttgatattgataacttattgtgttcacagcccgataccggtgagcaagcccttgagatttgtgatgcattaacccgttctggtgcggttgatgtgattatcgttgactcggtagcggcattaacaccaaaggcggagattgaaggtgaaattggtgactcacacatgggcttagcggctcgtatgatgagccaagcaatgcgtaagttagcgggtaacctcaagcaatcgaacactctgttaatcttcatcaaccaaattcgtatgaagattggggtgatgtttggtaacccagaaaccacaacgggtggtaatgctctgaaattctatgcctctgttcgtttggatatccgccgtacaggcgctatcaaagaaggtgatgaggtggttggtaacgagacacgcgtaaaagtcgttaaaaacaaagttgcagcgccatttaaacaagcagagttccaaattctatacggtcaaggtatcaaccgtactggcgagttagttgatttaggtgtagcccataaactgattgagaaagcaggcgcttggtatagctacaagggcgataaaattggtcaaggccgtgcaaatgcgggtaaatatttgactgaaaacccagctatagccgctgaaatcgataagacattgcgtgagctattgttgagtaacccgagtgccctggcatcatcggcatccgatgatgacaatgtcgaggggaatattgatttagaaacaggcgaagtgttctga

SEQ ID NO: 5728 - protein, 357 aa, Shewanella oneidensis
MKVDPNKEKALAAVLSQIEKQFGKGSIMKLGEDRSMDVETISTGSLSLDVALGAGGLPMGRIVEIYGPESSGKTTLTLEVIAAAQREGKTCAFIDAEHALDPIYAKKLGVDIDNLLCSQPDTGEQALEICDALTRSGAVDVIIVDSVAALTPKAEIEGEIGDSHMGLAARMMSQAMRKLAGNLKQSNTLLIFINQIRMKIGVMFGNPETTTGGNALKFYASVRLDIRRTGAIKEGDEVVGNETRVKVVKNKVAAPFKQAEFQILYGQGINRTGELVDLGVAHKLIEKAGAWYSYKGDKIGQGRANAGKYLTENPAIAAEIDKTLRELLLSNPSALASSASDDDNVEGNIDLETGEVF

SEQ ID NO: 5729 - DNA, 1074 bp, Shewanella sp
  CDS (1)..(1074): transl_table=11
atgaaagtcgatccaaacaaagagaaagcacttgctgcggtattgagccaaattgaaaagcaatttggtaaaggctccatcatgaagctgggcgaagaccgctctatggatgttgagactatttctactggttcactttcccttgacgtcgccttaggggctggcggtttaccaatgggacgtatcgttgagatctatggtcccgaatcatcaggtaaaacgacgctgacattagaagtgattgccgctgctcagcgcgaaggtaaaacctgtgcctttatcgatgccgagcacgcgctagaccctatctatgctaaaaagttaggcgtagatatcgataacttactgtgttcacaacccgataccggcgaacaagcccttgagatctgtgatgcgttaacccgttctggcgcggtagatgtgatcatcgttgactcggttgcggcattaacacccaaagcagaaattgaaggtgaaattggtgactcacacatgggcctagcggcgcgtatgatgagccaagcgatgcgtaagctcgcgggtaacctcaagcaatcgaatacactattaatcttcattaaccaaattcgtatgaagattggtgtgatgtttggtaacccagaaaccacaacgggcggtaacgcgctgaagttctacgcttctgttcgtctcgatattcgccgtactggtgctatcaaagaaggcgatgaagtggtgggtaacgagacgcgcgttaaagtggttaaaaacaaggttgccgcgccgtttaaacaagctgagttccaaattctttacggtcaaggtatcaaccgtactggtgagttagtcgatttaggtgttgcccataaactgattgaaaaagccggtgcatggtacagctacaagggtgacaagattggtcaaggtcgtgcaaatgccggtaaatatctgactgaaaacccagcaattgccgctgaaatcgataaaacactgcgtgagttactgctgagtaacccaagcgctatgtcttcatcttcatctgatgatgaaaacagcgaaggcaatgttgatttcgaaacaggcgaagtattctga

SEQ ID NO: 5730 - protein, 357 aa, Shewanella sp
MKVDPNKEKALAAVLSQIEKQFGKGSIMKLGEDRSMDVETISTGSLSLDVALGAGGLPMGRIVEIYGPESSGKTTLTLEVIAAAQREGKTCAFIDAEHALDPIYAKKLGVDIDNLLCSQPDTGEQALEICDALTRSGAVDVIIVDSVAALTPKAEIEGEIGDSHMGLAARMMSQAMRKLAGNLKQSNTLLIFINQIRMKIGVMFGNPETTTGGNALKFYASVRLDIRRTGAIKEGDEVVGNETRVKVVKNKVAAPFKQAEFQILYGQGINRTGELVDLGVAHKLIEKAGAWYSYKGDKIGQGRANAGKYLTENPAIAAEIDKTLRELLLSNPSAMSSSSSDDENSEGNVDFETGEVF

SEQ ID NO: 5731 - DNA, 1074 bp, Shewanella sp
  CDS (1)..(1074): transl_table=11
atgaaggtcgatccaaacaaagagaaagcacttgctgcggtattgagccaaattgaaaagcaatttggtaaaggctccatcatgaagctgggcgaagaccgctctatggatgttgagactatttctactggttcactttcccttgacgtcgccttaggtgctggcggtttaccaatgggacgtatcgttgagatttatggtcctgaatcatcaggtaaaacaacgctaacattagaagtgattgccgccgctcagcgggaaggtaaaacctgtgcctttatcgacgccgagcacgcgctagaccctatctatgctaaaaaattaggcgtagatatcgataacttactgtgttcacaacccgatactggtgaacaagcccttgagatctgtgatgcgttaacccgctctggcgcagtagatgtgatcatcgttgactcggtcgcggcattaacacccaaagcagaaattgaaggtgaaatcggtgactcacatatgggcttagcggcgcgtatgatgagccaagcgatgcgtaagttagcgggtaacctcaagcaatcgaatacactgttaatcttcatcaaccaaattcgtatgaagattggtgtgatgtttggtaacccagaaaccacaacgggcggtaacgcgctgaaattctacgcctctgttcgtcttgatattcgccgtactggtgctatcaaagaaggcgatgaagtggtaggtaacgagacgcgcgttaaagtggttaaaaacaaagttgctgcgccgtttaagcaagctgagttccaaattctttacggtcaaggtatcaaccgtaccggtgaattagtcgatttaggtgtggctcataaacttatcgaaaaagccggtgcatggtacagctacaagggtgacaagattggtcagggccgtgcaaatgctggcaaatatttgactgaaaacccagcgatagcagctgaaattgataaaacactacgtgagctattattgagtaaccctgcagccttgtcatcatcagcttctgatgatgagaatagtgaaggcaatgttgacttcgaaacaggcgaagtattctga

SEQ ID NO: 5732 - protein, 357 aa, Shewanella sp
MKVDPNKEKALAAVLSQIEKQFGKGSIMKLGEDRSMDVETISTGSLSLDVALGAGGLPMGRIVEIYGPESSGKTTLTLEVIAAAQREGKTCAFIDAEHALDPIYAKKLGVDIDNLLCSQPDTGEQALEICDALTRSGAVDVIIVDSVAALTPKAEIEGEIGDSHMGLAARMMSQAMRKLAGNLKQSNTLLIFINQIRMKIGVMFGNPETTTGGNALKFYASVRLDIRRTGAIKEGDEVVGNETRVKVVKNKVAAPFKQAEFQILYGQGINRTGELVDLGVAHKLIEKAGAWYSYKGDKIGQGRANAGKYLTENPAIAAEIDKTLRELLLSNPAALSSSASDDENSEGNVDFETGEVF

SEQ ID NO: 5733 - DNA, 1062 bp, Shigella sonnei
  CDS (1)..(1062): transl_table=11
atggctatcgacgaaaacaaacagaaagcgttggcggcagcactgggccagattgagaaacaatttggtaaaggctccatcatgcgcctgggtgaagaccgttccatggatgtggaaaccatctctaccggttcgctttcactggatatcgcgcttggggcaggtggtctgccgatgggccgtatcgtcgaaatctacggaccggaatcttccggtaaaaccacgctgacgctgcaggtgatcgccgcagcgcagcttgaaggtaaaacctgtgcgtttatcgatgctgaacacgcgctggacccaatctacgcacgtaaactgggcgtcgatatcgataacctgctgtgctcccagccggacaccggcgagcaggcactggaaatctgtgacgccctggcgcgttctggcgcagtagacgttatcgtcgttgactccgtggcggcactgacgccgaaagcggaaatcgaaggcgaaatcggcgactctcacatgggccttgcggcacgtatgatgagccaggcgatgcgtaagctggcgggtaacctgaagcagtccaacacgctgctgatcttcatcaaccagatccgtatgaaaattggtgtgatgttcggtaacccggaaaccactaccggtggtaacgcgctgaaattctacgcctctgttcgtctcgacatccgtcgtatcggcgcggtgaaagagggcgaaaacgtggtgggtagcgaaacccgcgtgaaagtggtgaagaacaaaatcgctgcaccgtttaaacaggctgaatttcagatcctctacggcgaaggtatcaacttctacggcgaactggttgacctgggcgtaaaagagaagctgatcgagaaagcaggcgcgtggtacagctacaaaggtgagaagatcggtcagggtaaagcgaatgcaactgcctggctgaaagataacccggaaaccgcgaaagagatcgagaagaaagtacgtgagttgctgctgagcaacccgaactcaacgccggatttctctgtagatgacagcgaaggcgtagcagaaactaacgaagatttttaa

SEQ ID NO: 5734 - protein, 353 aa, Shigella sonnei
MAIDENKQKALAAALGQIEKQFGKGSIMRLGEDRSMDVETISTGSLSLDIALGAGGLPMGRIVEIYGPESSGKTTLTLQVIAAAQLEGKTCAFIDAEHALDPIYARKLGVDIDNLLCSQPDTGEQALEICDALARSGAVDVIVVDSVAALTPKAEIEGEIGDSHMGLAARMMSQAMRKLAGNLKQSNTLLIFINQIRMKIGVMFGNPETTTGGNALKFYASVRLDIRRIGAVKEGENVVGSETRVKVVKNKIAAPFKQAEFQILYGEGINFYGELVDLGVKEKLIEKAGAWYSYKGEKIGQGKANATAWLKDNPETAKEIEKKVRELLLSNPNSTPDFSVDDSEGVAETNEDF

SEQ ID NO: 5735 - DNA, 1044 bp, Silicibacter pomeroyi
  CDS (1)..(1044): transl_table=11
atgagcagcaaacagagcgcggacaagcagaaggcgctggacagcgccctggcccagatcgaacgacagttcggcaaggggtcgatcatgaggctgggcggcgagaacgccattcaggagatcgaggcaagctcgaccggttcgctggggctggacatcgcgttggggatcggtggcttgccgatgggccggatcgtcgagatctatgggccggaaagctcgggcaagaccacgctgaccctgcattgcatcgccgagcagcaaaaacgcggtggcgtctgtgcctttgtcgatgccgaacatgcgcttgacccgcaatatgcgcgcaagctgggcgtcgatctggacgagcttctgatcagccagcccgataccggagaacaggcgctggagatcaccgacacgctggtgcgctcgggcgcggtcaacatggtggtggtcgattcggtcgccgcgctgaccccgaaatccgagcttgaaggcgacatgggcgattccagcgtcggcgtgcatgcccgcctgatgagccaggccatgcgcaagctgaccggctcgatcagccgctcgaaatgcatggtgatcttcatcaaccagatccgcatgaagatcggcgtgatgttcggcagcccggaaaccaccaccggcggcaacgcattgaaattctacagttcggtgcgtctggatatccgtcgcatcggcgccatcaaggaccgcgatgaggtggtgggcaacgccacccgcgtcaaggtggtcaagaacaaggtggcaccgcccttcaagcaggtggaattcgacatcatgtatggcgaaggcatctccaagaccggcgaactgctggacctgggcgtcaaggccggtgtggtcgataaatccggcagctggttctcttatggggacgagcgcatcggccagggccgcgaaaacgccaagaccttcctgagggaaaaccagtccatcgcgctggcgatcgaagacaagatccgcgccgcgcacgggttggaattcgacatgagcgacgatggcgaggacatcctcgaagcgtga

SEQ ID NO: 5736 - protein, 347 aa, Silicibacter pomeroyi
MSSKQSADKQKALDSALAQIERQFGKGSIMRLGGENAIQEIEASSTGSLGLDIALGIGGLPMGRIVEIYGPESSGKTTLTLHCIAEQQKRGGVCAFVDAEHALDPQYARKLGVDLDELLISQPDTGEQALEITDTLVRSGAVNMVVVDSVAALTPKSELEGDMGDSSVGVHARLMSQAMRKLTGSISRSKCMVIFINQIRMKIGVMFGSPETTTGGNALKFYSSVRLDIRRIGAIKDRDEVVGNATRVKVVKNKVAPPFKQVEFDIMYGEGISKTGELLDLGVKAGVVDKSGSWFSYGDERIGQGRENAKTFLRENQSIALAIEDKIRAAHGLEFDMSDDGEDILEA

SEQ ID NO: 5737 - DNA, 1068 bp, Sodalis glossinidius
  CDS (1)..(1068): transl_table=11
atggctattgatgagaataaacaaaaggcgttagcggcagcactgggccagattgaaaagcaattcggcaagggctcgatcatgcgtctgggtgaagatcgctccatggatgttgaaacgatctccacaggttctctgtctctggatatagcgttgggcgccggtgggcttcccatgggccgcatcgtcgaaatctacggcccggaatcatcgggtaaaacgaccctgaccctgcaggtcatcgccgcggcgcagcgtgaagtcaaaacctgcgcctttatcgatgctgaacacgccctggatcccatctatgccaaaaagctgggcgtcgatatcgacaatctgctgtgctcccagccggataccggcgaacaggcgctggaaatctgtgacgccttgacccgctccggcgcggtagacgtcatcatcgtcgactccgtggcagcgctgacgccgaaagcagaaatcgagggcgaaatcggcgattcccatatggggctggccgcccgtatgatgagccaggcgatgcggaaactggcgggcaacctgaaaaacgccaacacactcctgattttcatcaaccagatccgtatgaagatcggcgtcatgttcggcaatccggaaaccaccaccggcggtaatgcgcttaagttttacgcgtcggttcgcctggatatccgtcgtatcggctcggtaaaagaaggcgatgtggtggtgggcagtgaaacccgcgtcaaagtcgtgaagaacaaagttgccgcgccgtttaaacaggccgaattccagatcatgtacggcgaaggtatcaatattcgcggtgaattggttgatttgggcgtcaagcacaagctaattgagaaagccggcgcctggtacagctacaacggcgagaagatcggccagggcaaagccaatgcctgcagcttcttgaaggatcatcccgaggtggcggctgagctggacaaaaagctgcgcgacatgttgctgcacagcgctgaaggcaacagcctggtcagcgacgtggaaagtgaggatgaaggcgctagcgagagcaatgaagagttttaa

SEQ ID NO: 5738 - protein, 355 aa, Sodalis glossinidius
MAIDENKQKALAAALGQIEKQFGKGSIMRLGEDRSMDVETISTGSLSLDIALGAGGLPMGRIVEIYGPESSGKTTLTLQVIAAAQREVKTCAFIDAEHALDPIYAKKLGVDIDNLLCSQPDTGEQALEICDALTRSGAVDVIIVDSVAALTPKAEIEGEIGDSHMGLAARMMSQAMRKLAGNLKNANTLLIFINQIRMKIGVMFGNPETTTGGNALKFYASVRLDIRRIGSVKEGDVVVGSETRVKVVKNKVAAPFKQAEFQIMYGEGINIRGELVDLGVKHKLIEKAGAWYSYNGEKIGQGKANACSFLKDHPEVAAELDKKLRDMLLHSAEGNSLVSDVESEDEGASESNEEF

SEQ ID NO: 5739 - DNA, 1050 bp, Staphylococcus epidermidis
  CDS (1)..(1050): transl_table=11
ttggataatgaacgtcaaaaagctttagatacagtcattaaaaacatggaaaaatcttttggtaaaggtgccgttatgaagttaggcgataataaaggtcgcagagtatcaagtacttcaagtggttctgttacagttgataatgcattaggggttggaggttatcctaaaggaagaattatcgaaatatatggacctgaaagttcaggtaagacgacagtagctttacatgctatcgccgaagtacaaaaaaacggtggtgtagcagcatttatcgatgccgaacatgctctcgatccagtatatgcacaagcattaggtgtagatattgataatttatacttatctcaacctgatcatggtgaacaaggtcttgaaatcgccgaagcttttgttcgtagtggtgctgtggacattgttgttgtcgattcagtagcagcattaacacctaaagctgaaattgaaggtgaaatgggagatactcatgttggtttacaagcaagattaatgtctcaagcattaagaaagttatcaggggctatttctaaatctaatactacagctatatttattaaccaaattcgtgaaaaggtcggtgtgatgttcgggaatcctgaaacaacgcccggtggtagagccctaaaattctatagttctgtacgtttagaggtaagaagagcagagcagttaaaacaaggtcaagatattgtaggtaacagaaccaaaataaaagttgtaaaaaataaagttgcacctccatttagagttgcagaagtagatattatgtatggtcaaggtatctctaaggaaggagagctcattgatttaggtgtagagaatgatatcgttgataaatcaggtgcttggtattcttataatggagatagaatgggccaaggtaaagaaaacgtcaaaaattatcttaaggaaaatccacaaatcaaagaagaaattgaccgtaagttacgtgaaaagttaggtattttcgatggtgatgtggatgaaaatgagaatgaagacgattcaccaaaaactttatttgatgaatag

SEQ ID NO: 5740 - protein, 349 aa, Staphylococcus epidermidis
MDNERQKALDTVIKNMEKSFGKGAVMKLGDNKGRRVSSTSSGSVTVDNALGVGGYPKGRIIEIYGPESSGKTTVALHAIAEVQKNGGVAAFIDAEHALDPVYAQALGVDIDNLYLSQPDHGEQGLEIAEAFVRSGAVDIVVVDSVAALTPKAEIEGEMGDTHVGLQARLMSQALRKLSGAISKSNTTAIFINQIREKVGVMFGNPETTPGGRALKFYSSVRLEVRRAEQLKQGQDIVGNRTKIKVVKNKVAPPFRVAEVDIMYGQGISKEGELIDLGVENDIVDKSGAWYSYNGDRMGQGKENVKNYLKENPQIKEEIDRKLREKLGIFDGDVDENENEDDSPKTLFDE

SEQ ID NO: 5741 - DNA, 1119 bp, Streptomyces ambofaciens
  CDS (1)..(1119): transl_table=11
atggcaggaaccgaccgcgagaaggctcttgacgccgcactcgcacagattgaacggcagttcggcaagggcgcggtcatgcgcatgggcgaccggtcgaaggagcccatcgaggtcatcccgaccgggtcgaccgcgctcgacgtggccctcggcgtcggcggcctgccgcgcggccgcgtcatcgaggtctacggtccggagtcctccggtaagacgaccctgaccctgcacgccgtggcgaacgcgcagaaggccggcggccaggtggcgttcgtggacgcggagcacgccctcgaccccgagtacgcccagaagctcggcgtcgacatcgacaacctgatcctgtcccagccggacaacggtgagcaggccctggagatcgtggacatgctggtccgctccggcgccctcgacctcatcgtcatcgactccgtcgccgcgctcgtcccgcgcgcggagatcgagggcgagatgggtgacagccacgtcggtctccaggcccggctgatgagccaggcgctccggaagatcaccagcgcgctcaaccagtccaagaccaccgcgatcttcatcaaccagctccgcgagaagatcggcgtcatgttcggctccccggagaccacgaccggtggccgggcgctcaagttctacgcctcggtgcgactcgacatccgacgcatcgagacgctcaaggacggcaccgacgcggtcggcaaccgcacgcgcgtcaaggtcgtcaagaacaaggtcgcgccgcccttcaagcaggccgagttcgacatcctctacggccagggcatcagccgcgagggcggcctgatcgacatgggcgtggagcacggcttcgtccgcaaggccggcgcctggtacacgtacgagggcgaccagctcggccagggcaaggagaacgcgcgcaacttcctgaaggacaaccccgacctcgccaacgagatcgagaagaagatcaaggagaagctgggcgtcggagtccgtcccgaggagccgacggccaccgagtccggaccggacgccgcgacggccgaatccgcaccggcggtgcccgcgcccgcgaccgccaaggtcaccaaggccaaggccgcggcagccaagagctga

SEQ ID NO: 5742 - protein, 372 aa, Streptomyces ambofaciens
MAGTDREKALDAALAQIERQFGKGAVMRMGDRSKEPIEVIPTGSTALDVALGVGGLPRGRVIEVYGPESSGKTTLTLHAVANAQKAGGQVAFVDAEHALDPEYAQKLGVDIDNLILSQPDNGEQALEIVDMLVRSGALDLIVIDSVAALVPRAEIEGEMGDSHVGLQARLMSQALRKITSALNQSKTTAIFINQLREKIGVMFGSPETTTGGRALKFYASVRLDIRRIETLKDGTDAVGNRTRVKVVKNKVAPPFKQAEFDILYGQGISREGGLIDMGVEHGFVRKAGAWYTYEGDQLGQGKENARNFLKDNPDLANEIEKKIKEKLGVGVRPEEPTATESGPDAATAESAPAVPAPATAKVTKAKAAAAKS

SEQ ID NO: 5743 - DNA, 1134 bp, Streptomyces avermitilis
  CDS (1)..(1134): transl_table=11
atggcaggaaccgaccgcgagaaggcgctcgacgccgcgctcgcacagattgaacggcaattcggcaagggcgcggtgatgcgcctgggcgagcggccgaatgagcccatcgaggtcatccccaccgggtcgaccgcgctcgacgtcgccctcggcgtcggcggcctgccgcgcggccgagtggtggaggtgtacggcccggagtcctccggtaagacgaccctgacgctgcacgcggtggcgaacgcgcagaaggccggcggccaggtggccttcgtggacgccgagcacgccctcgaccccgagtacgcgaagaagctcggcgtcgacatcgacaacctgatcctgtcgcagccggacaacggtgagcaggctctggagatcgtggacatgctggtccgctccggcgcgctcgacctgatcgtcatcgactccgtcgccgccctggtgccgcgcgcggagatcgagggcgagatgggcgactcgcacgtgggtctgcaggcccgcctgatgagccaggccttgcggaagatcaccagcgcgctcaaccagtcgaagaccaccgcgatcttcatcaaccagctccgcgagaagatcggcgtgatgttcggctctccggagaccacgacgggtggccgggcgctgaagttctacgcctcggtgcggctcgacatccgtcgcatcgagacgctgaaggacggcaccgacgcggtcggcaaccgcacccgcgtcaaggtcgtcaagaacaaggtcgcgccgcccttcaagcaggccgagttcgacatcctctacgggcagggcatcagccgcgaaggcggcctgatcgacatgggcgtggagaacggcttcgtccgcaaggctggcgcctggtacacgtacgagggcgaccagctcggccagggcaaggagaacgcgcgcaacttcctgaaggacaaccccgacctcgccaacgagatcgagaagaagatcaaggagaagctgggcgtcggcgtacggccggaggagcccacggcggagccgggcgcggacgcggcggtcacgtcggccgcggctgccacggacgacaccgcgaagacggtgtccgctcccgcggccaagaccaccaagtccaaggccgcggcggccaagagctag

SEQ ID NO: 5744 - protein, 377 aa, Streptomyces avermitilis
MAGTDREKALDAALAQIERQFGKGAVMRLGERPNEPIEVIPTGSTALDVALGVGGLPRGRVVEVYGPESSGKTTLTLHAVANAQKAGGQVAFVDAEHALDPEYAKKLGVDIDNLILSQPDNGEQALEIVDMLVRSGALDLIVIDSVAALVPRAEIEGEMGDSHVGLQARLMSQALRKITSALNQSKTTAIFINQLREKIGVMFGSPETTTGGRALKFYASVRLDIRRIETLKDGTDAVGNRTRVKVVKNKVAPPFKQAEFDILYGQGISREGGLIDMGVENGFVRKAGAWYTYEGDQLGQGKENARNFLKDNPDLANEIEKKIKEKLGVGVRPEEPTAEPGADAAVTSAAAATDDTAKTVSAPAAKTTKSKAAAAKS

SEQ ID NO: 5745 - DNA, 1125 bp, Streptomyces coelicolor
  CDS (1)..(1125): transl_table=11
atggcaggaaccgaccgcgagaaggccctggacgccgcgctcgcacagattgaacggcaattcggcaagggcgcggtcatgcgcatgggtgaccggaccaacgagcccatcgaggtcatcccgaccgggtctaccgcgctcgacgtggccctcggcgtcggaggcatcccgcgtggccgtgtcgtggaggtctacggccccgagtcctcgggcaagacgaccctgaccctgcacgcggtggcgaacgcgcagaaggccggcggccaggtcgcgttcgtggacgccgagcacgccctcgaccccgagtacgcgaagaagctcggtgtcgacatcgacaacctgatcctgtcccagccggacaacggtgagcaggccctggagatcgtggacatgctggtccgctccggcgccctcgacctcatcgtcatcgactccgtcgccgcgctcgtcccgcgcgcggagatcgagggcgagatgggcgacagccacgtcggtctgcaggcccggctgatgagccaggccctgcggaagatcaccagcgcgctcaaccagtccaagaccaccgcgatcttcatcaaccagctccgcgagaagatcggcgtgatgttcggctccccggagaccacgaccggtggccgggcactgaagttctacgcctcggtgcgactcgacatccggcggatcgagacgctgaaggacggcaccgacgcggtcggcaaccgcacccgcgtcaaggtggtcaagaacaaggtcgcgccgcccttcaagcaggccgagttcgacatcctctacggccagggcatcagccgcgagggcggtctgatcgacatgggcgtggagaacggcttcgtccgcaaggccggcgcctggtacacgtacgagggcgaccagctcggtcagggcaaggagaacgcgcgcaacttcctgaaggacaaccccgacctggccaacgagatcgagaagaagatcaagcagaagctgggcgtcggcgtgcaccccgaggagtcggccaccgagcccggcgcggacgccgcctccgccgccccggccgacgccgcaccggcggtgcccgcacccacgaccgccaaggccaccaagtccaaggccacggcagccaagagctga

SEQ ID NO: 5746 - protein, 374 aa, Streptomyces coelicolor
MAGTDREKALDAALAQIERQFGKGAVMRMGDRTNEPIEVIPTGSTALDVALGVGGIPRGRVVEVYGPESSGKTTLTLHAVANAQKAGGQVAFVDAEHALDPEYAKKLGVDIDNLILSQPDNGEQALEIVDMLVRSGALDLIVIDSVAALVPRAEIEGEMGDSHVGLQARLMSQALRKITSALNQSKTTAIFINQLREKIGVMFGSPETTTGGRALKFYASVRLDIRRIETLKDGTDAVGNRTRVKVVKNKVAPPFKQAEFDILYGQGISREGGLIDMGVENGFVRKAGAWYTYEGDQLGQGKENARNFLKDNPDLANEIEKKIKQKLGVGVHPEESATEPGADAASAAPADAAPAVPAPTTAKATKSKATAAKS

SEQ ID NO: 5747 - DNA, 1125 bp, Streptomyces lividans
  CDS (1)..(1125): transl_table=11
atggcaggaaccgaccgcgagaaggccctggacgccgcgctcgcacagattgaacggcaattcggcaagggcgcggtcatgcgcatgggtgaccggaccaacgagcccatcgaggtcatcccgaccgggtctaccgcgctcgacgtggccctcggcgtcggaggcatcccgcgtggccgtgtcgtggaggtctacggccccgagtcctcgggcaagacgaccctgaccctgcacgcggtggcgaacgcgcagaaggccggcggccaggtcgcgttcgtggacgccgagcacgccctcgaccccgagtacgcgaagaagctcggtgtcgacatcgacaacctgatcctgtcccagccggacaacggtgagcaggccctggagatcgtggacatgctggtccgctccggcgccctcgacctcatcgtcatcgactccgtcgccgcgctcgtcccgcgcgcggagatcgagggcgagatgggcgacagccacgtcggtctgcaggcccggctgatgagccaggccctgcggaagatcaccagcgcgctcaaccagtccaagaccaccgcgatcttcatcaaccagctccgcgagaagatcggcgtgatgttcggctccccggagaccacgaccggtggccgggcactgaagttctacgcctcggtgcgactcgacatccggcgtatcgagacgctgaaggacggcaccgacgcggtcggcaaccgcacccgcgtcaaggtggtcaagaacaaggtcgcgccgcccttcaagcaggccgagttcgacatcctctacggccagggcatcagccgcgagggcggtctgatcgacatgggcgtggagaacggcttcgtccgcaaggccggcgcctggtacacgtacgagggcgaccagctcggtcagggcaaggagaacgcgcgcaacttcctgaaggacaaccccgacctggccaacgagatcgagaagaagatcaagcagaagctgggcgtcggcgtgcaccccgaggagtcggccaccgagcccggcgcggacgccgcctccgccgccccggccgacgccgcaccggcggtgcccgcacccacgaccgccaaggccaccaagtccaaggccgcggcagccaagagctga

SEQ ID NO: 5748 - protein, 374 aa, Streptomyces lividans
MAGTDREKALDAALAQIERQFGKGAVMRMGDRTNEPIEVIPTGSTALDVALGVGGIPRGRVVEVYGPESSGKTTLTLHAVANAQKAGGQVAFVDAEHALDPEYAKKLGVDIDNLILSQPDNGEQALEIVDMLVRSGALDLIVIDSVAALVPRAEIEGEMGDSHVGLQARLMSQALRKITSALNQSKTTAIFINQLREKIGVMFGSPETTTGGRALKFYASVRLDIRRIETLKDGTDAVGNRTRVKVVKNKVAPPFKQAEFDILYGQGISREGGLIDMGVENGFVRKAGAWYTYEGDQLGQGKENARNFLKDNPDLANEIEKKIKQKLGVGVHPEESATEPGADAASAAPADAAPAVPAPTTAKATKSKAAAAKS

SEQ ID NO: 5749 - DNA, 1131 bp, Streptomyces rimosus
  CDS (1)..(1131): transl_table=11
atggcaggcactgaccgcgagaaggcgctggacgccgcgctcgcacagattgaacggcaattcggcaagggtgccgtgatgaggatgggagagcgctcgaaggagcccatcgaggtcatccccaccgcgtcgaccgcactggacgtcgcgctcggcgtcggcggtatcccccgcggccgcgtggtggagatctacggcccggagtcctccggcaagacgaccctgaccctgcacgcggtggcgaacgcgcagaaggccggcggctccgtcgccttcatcgacgccgagcacgcgctcgaccccgagtacgccaagaagctgggcgtggacacggacgcgctgatcctgtcccagccggacaacggcgagcaggccctggagatcgtggacatgctggtccgctccggcgcgctcgacctcatcgtgatcgactcggtcgccgcgctggtgccccgggcggagatcgagggtgagatgggcgactcccacgtgggtctccaggcccgtctgatgagccaggcgctgcggaagatcaccagcgcgctcaaccagtccaagaccaccgcgatcttcatcaaccagctccgcgagaagatcggcgtgatgttcggctcgccggagaccacgaccggtggccgcgccctgaagttctacgcctcggtgcgcatcgacatccgccgtatcgagaccctcaaggacggcaccgaagcggtcggcaaccgcacccgctgcaaggtcgtcaagaacaaggtcgccccgcccttcaagcaggccgagttcgacatcctgtacggccagggcatcagccgtgagggcggcctgatcgacatgggcgtcgagcacggcttcatccgcaagtcgggcgcctggtacacctacgagggcgaccagctcggccagggcaaggagaacgcccgcaacttcctcaaggacaaccccgacctcgccaacgaggtggagaagaagatcaaggagaagctgggcgtcggcgtgaagccggaagacctgacggcggagcccggcgcggacgcggcgggtgcggcggccgacgcggaggccccggccaagtccgtaccggcaccggccgccaagagtgccaagggctccaaggccgcagcggccaagagctag

SEQ ID NO: 5750 - protein, 376 aa, Streptomyces rimosus
MAGTDREKALDAALAQIERQFGKGAVMRMGERSKEPIEVIPTASTALDVALGVGGIPRGRVVEIYGPESSGKTTLTLHAVANAQKAGGSVAFIDAEHALDPEYAKKLGVDTDALILSQPDNGEQALEIVDMLVRSGALDLIVIDSVAALVPRAEIEGEMGDSHVGLQARLMSQALRKITSALNQSKTTAIFINQLREKIGVMFGSPETTTGGRALKFYASVRIDIRRIETLKDGTEAVGNRTRCKVVKNKVAPPFKQAEFDILYGQGISREGGLIDMGVEHGFIRKSGAWYTYEGDQLGQGKENARNFLKDNPDLANEVEKKIKEKLGVGVKPEDLTAEPGADAAGAAADAEAPAKSVPAPAAKSAKGSKAAAAKS

SEQ ID NO: 5751 - DNA, 1134 bp, Streptomyces violaceus
  CDS (1)..(1134): transl_table=11
atggcaggaaccgaccgcgagaaggcgctcgacgccgcgctcgcacagattgaacgccaattcggcaagggcgccgtgatgcgcatgggcgaccgcacccaggagccgatcgaggtgatctccaccggatcgaccgccctcgacatcgccctcggcgtcggtggcctgccgcgcggccgtgtcgtggagatctacggaccggagtcctccggtaagacgaccctgacgctgcacgccgtggccaacgcacagaaggccggcggccaggtggcgttcgtggacgccgagcacgccctcgaccccgagtacgccaagaagctcggcgtcgacatcgacaacctcatcctgtcccagccggacaacggcgagcaggccctcgagatcgtcgacatgctggtccgctccggcgccctcgacctcatcgtcatcgactccgtcgccgcgctcgtcccgcgcgcggagatcgagggcgagatgggtgactcccacgtcggtctccaggcccgactgatgagccaggcgctccggaagatcaccagcgcgctcaaccagtccaagaccaccgcgatcttcatcaaccagctccgcgagaagatcggcgtgatgttcggctcgccggagaccacgaccggtggccgcgccctcaagttctacgcctcggtgcgcctcgacatccgtcgcatcgagaccctcaaggacggcaccgacgcggtcggcaaccgcacccgcgtcaaggtcgtcaagaacaaggtcgcgcccccgttcaagcaggccgagttcgacatcctctacggccagggcatcagccgcgagggcggtctgatcgacatgggcgtggagcacggcttcgtgcgcaaggccggtgcctggtacacgtacgagggcgaccagctcggccagggcaaggagaacgcccgcaacttcctcaaggacaaccccgacctcgccgacgagatcgagcggaagatcaaggagaagctgggcgtcggcgtccggcccgacgcggccaaggccgaggcggcgacggacgcggcggccgcggacaccgccggcacggacgacgcggccaagagcgtcccggcacccgcgagcaagaccgcgaaggcgaccaaggccaccgcggtcaagagctga

SEQ ID NO: 5752 - protein, 377 aa, Streptomyces violaceus
MAGTDREKALDAALAQIERQFGKGAVMRMGDRTQEPIEVISTGSTALDIALGVGGLPRGRVVEIYGPESSGKTTLTLHAVANAQKAGGQVAFVDAEHALDPEYAKKLGVDIDNLILSQPDNGEQALEIVDMLVRSGALDLIVIDSVAALVPRAEIEGEMGDSHVGLQARLMSQALRKITSALNQSKTTAIFINQLREKIGVMFGSPETTTGGRALKFYASVRLDIRRIETLKDGTDAVGNRTRVKVVKNKVAPPFKQAEFDILYGQGISREGGLIDMGVEHGFVRKAGAWYTYEGDQLGQGKENARNFLKDNPDLADEIERKIKEKLGVGVRPDAAKAEAATDAAAADTAGTDDAAKSVPAPASKTAKATKATAVKS

SEQ ID NO: 5753 - DNA, 1032 bp, Syntrophus aciditrophicus
  CDS (1)..(1032): transl_table=11
atgggaacagatggagacagggcaaaggcggtggatctggcaataagtcagatcgaaaggcagttcggaaaggggtctatcatgcgcctgggggcgaaagagcggatcgaggacattgcggtcattccgaccggagcactcagtctggatatcgcgctgggcatcggcggcgtcccccggggacgcatcatcgaaattttcggtcctgaatccgggggaaagacgaccctggccctgcatattattgcggaagcacagaagcggaacggactggcggccttcatcgatgccgaacacgccctggatgtttcctacgcccgaaaaatcggcgtcaacaccgacgatctgctgatttcccagccggataccggggagcaggccctggagatcgcggaaaccctggttcgcagcggagccctggatatcctcgttgtggattccgtggccgccctggtccccaaggcggaaatcgaaggggaaatgggcgatgcccagatggggctgcaggccagactgatgtcccaggccctgcggaaactcaccggcagcatcagcaaatccaacacgacggttatcttcatcaaccagctgcgaatgaagatcggcgtattcttcggcaacccggaaacgacgaccggcggcaacgccctgaaattctacgcttccatgcgcctcgacatccgcaagtccggttccatcaaatcggggcaggatgtcatcggcatgcggaccaaggtgaaggtcgtgaaaaacaaggtcgcgccgcccttccgggagacggaattcgacatcctcttcggcgaggggatttccaaggccggggatattctcgatctggccgcggaaagcgggatcgtggaaaagagcggcgcctggtactcctacgggggagagcggatcggccagggccgggacaacaccaggaactttttaaaggagcatcccgatattctggtccggatcgaggaacaggtgcgaagcgaacacggtctgaagccccggttgcaggaacaggaagaacctgctaaatga

SEQ ID NO: 5754 - protein, 343 aa, Syntrophus aciditrophicus
MGTDGDRAKAVDLAISQIERQFGKGSIMRLGAKERIEDIAVIPTGALSLDIALGIGGVPRGRIIEIFGPESGGKTTLALHIIAEAQKRNGLAAFIDAEHALDVSYARKIGVNTDDLLISQPDTGEQALEIAETLVRSGALDILVVDSVAALVPKAEIEGEMGDAQMGLQARLMSQALRKLTGSISKSNTTVIFINQLRMKIGVFFGNPETTTGGNALKFYASMRLDIRKSGSIKSGQDVIGMRTKVKVVKNKVAPPFRETEFDILFGEGISKAGDILDLAAESGIVEKSGAWYSYGGERIGQGRDNTRNFLKEHPDILVRIEEQVRSEHGLKPRLQEQEEPAK

SEQ ID NO: 5755 - DNA, 1041 bp, Thiobacillus ferrooxidans
  CDS (1)..(1041): transl_table=11
atggatgaacagcgcagcaagggcctttcggcggccctgtcacagattgacaaacagtttggtaaaggcgccgtcatgcgtctcggtgatcataacgccatcaaggacatcgaggtctactccaccggctcgctgggtctggatctggcgctgggtgttggcggactgccccggggccgggtggtagagatctacgggccggaatcttccggtaaaacgactctcaccctgcatgccatagccagttgtcaggctgcaggcggcaccgccgcctttatcgatgccgagcacgcgctcgacccaggctatgcccacaagctcggcgtcgatctggaaaacctcctgatctcccagcctgataccggcgagcaggccctggaaatcgccgacatgctggtgcgctccggtgccgtggacctcatcgtcatcgactccgtggccgctctgacccccaaagcggaaatcgaaggcgagatgggcgattcccacgtcggtctgcaggcgcgtctgatgagtcaggctttgcgcaacttaaccgccaatatctcccggagcaacaccctggtcatttttatcaaccagattcgcatgaaaatcggggtgatgtatggcagtccggaaaccaccaccggtggtaatgcccttaaattctacgcttccgtgcgccttgatatccgccgcatcggcgcgatcaaaaagagcgacgaagtggtaggtaacgatacccgcgtcaaggtggtcaagaataaggtcgcaccacctttccgcgaagccgaatttgccatctattacggtgaaggcatctcccgactgtccgaactggtggacctcggtgtgaagttcgacatcgtcgaaaaaagcggcgcctggtacagttaccagggccaccgtattggtcagggcaaggacaatgcccgccagtacctcaaggtgcatccggaactggcggccaatatcgagcagcggatacgggcagcggcagcaggacaccccctggcctttgccgaagaggtggagagcccgcagcggtcggctagttga

SEQ ID NO: 5756 - protein, 346 aa, Thiobacillus ferrooxidans
MDEQRSKGLSAALSQIDKQFGKGAVMRLGDHNAIKDIEVYSTGSLGLDLALGVGGLPRGRVVEIYGPESSGKTTLTLHAIASCQAAGGTAAFIDAEHALDPGYAHKLGVDLENLLISQPDTGEQALEIADMLVRSGAVDLIVIDSVAALTPKAEIEGEMGDSHVGLQARLMSQALRNLTANISRSNTLVIFINQIRMKIGVMYGSPETTTGGNALKFYASVRLDIRRIGAIKKSDEVVGNDTRVKVVKNKVAPPFREAEFAIYYGEGISRLSELVDLGVKFDIVEKSGAWYSYQGHRIGQGKDNARQYLKVHPELAANIEQRIRAAAAGHPLAFAEEVESPQRSAS

SEQ ID NO: 5757 - DNA, 1245 bp, Treponema denticola
  CDS (1)..(1245): transl_table=11
gtggcaaaagcaaaaaacgaagtaccggcagttgcaaacccggatgataagttaaaggctctggaggctgcccgccttcaaatcgaaaaacaattcgggcaaggctctttgatgaagttagggaataattccgctatcggaaacatagaaattattccttcgggaagcatccttttggatgaagctctgggaatcggcggttatccccgcggcagaattatcgagatattcggccccgaatcttcgggtaagactacgatagctcttcatgccgtcgccgaggcacaaaagcagggaggcatagccgcctttatcgatgccgaacatgccttggatccccaatatgcaaaagccttgggagtaaatattgatgagctttgggtttcccaacccgataccggagaacaggcccttgaaatagcagaaagccttgtacgctccggagccgtggacgtaatagtaattgactcggtcgcagccctaacgcctcaggcagaaattgccggagaaatgggagactctcatatgggcttacaggcccgcttgatgagccaagccttgagaaaacttaccgccattataggcaagtccaactgtatgataatatttatcaaccaaatccgaatgaagataggcgttatgttcggaagtcctgaaacaactacgggaggaaatgcccttaaattttacgcctccgtccggctggatgtacggaaaattgaaactctcggcaaggacgatgatgaagcatggggaaataagattcgtgtaaaggttgtaaaaaacaaggtcgctcctccttttagaaaggtagaaatggaaatcctttttggaaagggcgtttgtccctatggaagtctcttggattctgctgtcaaacaagagataataggcaagagcgggtcgtggtattcttacggggacgacaaaatcggtcaaggcaggcccaatgccgttaaattcttagaagaaaacatagacatagctcaaaagattgaaaaagaattgagagaaaaactcttcccgggcaggccctttgtttcaagttttgtcgaaaaaacaaaagaacaaaaagaagcccaggaaaaggccgtagaagctcttaaaaaagaagagggttcaaaggaagatgctctgacaggcaataaagatgaaaccgatgattccgctcaaaaaaattcggccgcttcaaaggcaaaaagggctgaagttgtaggccttccggcggacgacagtcttttttaa

SEQ ID NO: 5758 - protein, 414 aa, Treponema denticola
MAKAKNEVPAVANPDDKLKALEAARLQIEKQFGQGSLMKLGNNSAIGNIEIIPSGSILLDEALGIGGYPRGRIIEIFGPESSGKTTIALHAVAEAQKQGGIAAFIDAEHALDPQYAKALGVNIDELWVSQPDTGEQALEIAESLVRSGAVDVIVIDSVAALTPQAEIAGEMGDSHMGLQARLMSQALRKLTAIIGKSNCMIIFINQIRMKIGVMFGSPETTTGGNALKFYASVRLDVRKIETLGKDDDEAWGNKIRVKVVKNKVAPPFRKVEMEILFGKGVCPYGSLLDSAVKQEIIGKSGSWYSYGDDKIGQGRPNAVKFLEENIDIAQKIEKELREKLFPGRPFVSSFVEKTKEQKEAQEKAVEALKKEEGSKEDALTGNKDETDDSAQKNSAASKAKRAEVVGLPADDSLF

SEQ ID NO: 5759 - DNA, 1047 bp, Vibrio natriegens
  CDS (1)..(1047): transl_table=11
atggacgagaacaaacagaaagcgctcgccgctgcgctaggtcaaattgaaaaacaattcggtaaaggctcaatcatgcgccttggcgataaccgcgcaatggacgtagaaaccatctcaacgggttctctttctcttgatatcgctttgggtgctggtggcttaccgatgggccgtattgttgaagtatacggtccggaatcttcgggtaaaacgacactaactctggaacttattgcagcagcacagcgtgaaggcaaaacttgtgcgtttatcgatgcggagcacgctctggatcctgtatacgcgaagaagcttggcgtagatatcgatgcacttttggtttctcagcctgatacgggtgagcaagcgctagaaatctgtgacgcattagcgcgctctggtgctatcgacgtaatggttgtcgactctgtggcagcactgactccaaaagcagaaatcgaaggcgaaatgggcgacagccacatgggtctccaagctcgtatgctttctcaagcgatgcgtaagctaacaggtaacctgaagcagtctaactgtatgtgtatcttcatcaagcaaatccgtatgaagattggtgtgatgttcggtaacccagaaacaacaactggcggtaacgcacttaaattctacgcatcggttcgtcttgatatccgtcgtactggcgcaatcaaagaaggcgacgaagttgtaggtaacgaaactcgcatcaaagtcgttaagaacaagattgcagcaccatttaaagaagcaaacacgcagatcatgtatggtcaaggctttaaccgcgaaggtgagctggtagacttaggcgtgaagcacaaactggttgaaaaagcaggtgcttggtacagctacaatggcgacaagatcggtcagggcaaagcaaatgcttgtaattacctgcgtgaacatacagaagttgctcagactatcgacaagaaacttcgtgagatgcttttgtctccagctgtagctgagggacctgaagccggtgaaatgccagagaagaaagaagaagagttttaa

SEQ ID NO: 5760 - protein, 348 aa, Vibrio natriegens
MDENKQKALAAALGQIEKQFGKGSIMRLGDNRAMDVETISTGSLSLDIALGAGGLPMGRIVEVYGPESSGKTTLTLELIAAAQREGKTCAFIDAEHALDPVYAKKLGVDIDALLVSQPDTGEQALEICDALARSGAIDVMVVDSVAALTPKAEIEGEMGDSHMGLQARMLSQAMRKLTGNLKQSNCMCIFIKQIRMKIGVMFGNPETTTGGNALKFYASVRLDIRRTGAIKEGDEVVGNETRIKVVKNKIAAPFKEANTQIMYGQGFNREGELVDLGVKHKLVEKAGAWYSYNGDKIGQGKANACNYLREHTEVAQTIDKKLREMLLSPAVAEGPEAGEMPEKKEEEF

SEQ ID NO: 5761 - DNA, 1044 bp, Vibrio parahaemolyticus
  CDS (1)..(1044): transl_table=11
atggacgagaacaaacagaaagcgctcgccgctgcgctaggtcaaattgaaaagcaattcggtaaaggctctatcatgcgccttggtgataaccgcgcaatggatgtagaaaccatttcaacgggttcgctttctcttgatatcgctttgggtgctggtggtctaccaatgggtcgtatcgtagaaatctacggtccagaatcttcaggtaaaacaacgctaactctcgagcttatcgctgctgcacaacgtgaaggtaaaacttgtgcgtttatcgatgctgagcacgcgttggatcctgtgtacgctaaaaagcttggtgttgatatcgatgcgctattggtatctcagccagacactggtgagcaagctctagagatttgtgatgcattagctcgctctggcgccatcgacgtaatggttgttgactctgttgctgctctaacacctaaagctgagatcgaaggcgaaatgggcgacagccacatgggtctccaagctcgtatgctttctcaagcaatgcgtaagcttacaggtaacctgaaacagtctaactgtatgtgtatcttcatcaaccaaatccgtatgaagattggtgtgatgttcggtaaccctgaaacgactactggcggtaacgcgcttaagttttacgcttctgttcgtttagatatccgtcgtactggcgcaatcaaagaaggcgatgaagttgtaggtaacgaaacgcgtatcaaagtggttaagaacaagattgcagcaccatttaaagaagcaaacacgcaaatcatgtatggccaaggctttaaccgtgaaggtgagttgattgacttaggcgtgaagcacaagctagtagaaaaagcgggtgcttggtacagctacaatggcgataagattggtcaaggtaaagcaaacgcttgtaactacctgcgtgagcatccagaaatcgcgaaaacaatcgataccaaactgcgtgaaatgctactttctccagctcaaccagaagcacctgctgccggtgagaagcctgagcaagaagaagagttttaa

SEQ ID NO: 5762 - protein, 347 aa, Vibrio parahaemolyticus
MDENKQKALAAALGQIEKQFGKGSIMRLGDNRAMDVETISTGSLSLDIALGAGGLPMGRIVEIYGPESSGKTTLTLELIAAAQREGKTCAFIDAEHALDPVYAKKLGVDIDALLVSQPDTGEQALEICDALARSGAIDVMVVDSVAALTPKAEIEGEMGDSHMGLQARMLSQAMRKLTGNLKQSNCMCIFINQIRMKIGVMFGNPETTTGGNALKFYASVRLDIRRTGAIKEGDEVVGNETRIKVVKNKIAAPFKEANTQIMYGQGFNREGELIDLGVKHKLVEKAGAWYSYNGDKIGQGKANACNYLREHPEIAKTIDTKLREMLLSPAQPEAPAAGEKPEQEEEF

SEQ ID NO: 5763 - DNA, 996 bp, Wigglesworthia glossinidia brevipalpis
  CDS (1)..(996): transl_table=11
atgataattgaaaacaataaaaaaaaagctttagaaaaagctttagataaaattgaaaaacaattcggaaaaggatctataatgactcttggagaaaatagatctatggatatagaaactatttctacagggtctttgtctttagatattgctttaggcacaggaggtcttccaatgggaagaattgttgaaatttacggtcctgaatcttctggaaaaacaacattaacattagaagttatttatgaagcacaaaaaaagggtaaaatatgtgcatttatagatgctgaacatgctttagatccaatatatgctaaaaatctaggagtagatattaataatttattatgctctcaacctgataatggagagcaagctttagaaatttgtgattcattaactagatcaggagcagtagatcttattatagtagattctgtggcagcgttgactccaaaagctgaaatagatggagaaataggcgatttacatttaggattagcggctagaatgatgagccaggcaatgaggaagctggcaggaaatcttaaaaatgccaatactcttttgatttttatcaaccaaattcgagttaaaataggaactatatttggtagccctgaagttactactggagggaacgctttaaaattttatgcttcagtaagattggatattagaaaaattggaactattaaagatggagatattattataggaaacgaaactagagtaaaagtagtaaaaaataaaatatctgctccttttaggcaagcagaatttcaaattttatatggaaatggaataaacactgaaggagaattaatcactttaggagttaatcataatataattgaaaaatcaggttcatggtatagttataataaaaataaaataggacaaggaaaaaataatgcatgcaattttttaaaaaacaatccaaatatttctaaagaaatttctagaaaaatcagagaaattaatttgattaaataa

SEQ ID NO: 5764 - protein, 331 aa, Wigglesworthia glossinidia brevipalpis
MIIENNKKKALEKALDKIEKQFGKGSIMTLGENRSMDIETISTGSLSLDIALGTGGLPMGRIVEIYGPESSGKTTLTLEVIYEAQKKGKICAFIDAEHALDPIYAKNLGVDINNLLCSQPDNGEQALEICDSLTRSGAVDLIIVDSVAALTPKAEIDGEIGDLHLGLAARMMSQAMRKLAGNLKNANTLLIFINQIRVKIGTIFGSPEVTTGGNALKFYASVRLDIRKIGTIKDGDIIIGNETRVKVVKNKISAPFRQAEFQILYGNGINTEGELITLGVNHNIIEKSGSWYSYNKNKIGQGKNNACNFLKNNPNISKEISRKIREINLIK

SEQ ID NO: 5765 - DNA, 1068 bp, Wolbachia pipientis wMel
  CDS (1)..(1068): transl_table=11
atggcaagtaacccagaagaaagaaatagtgataaacaaaaagcgctagataacgcaataagccagattgaaaaagcattcggtaaaggtgcaataatgaagttgaagcaaaaccctgtagaaaaaatagacacaatatccacaggatcaattgcgcttgattcggctctaggtgttggaggtctgccaaaagggcgtataattgaaatatttggccccgagagttctggtaaaaccactcttgccttgcacgtgattgctgaagcacaaaaaaaaggaggatcatgcgcatttatcgatgcagaacatgcattggatgtcttatatgctcgtaaacttggggtaagcactgatgatttagtgatttcacaaccagacactggagagcaggcgttgcatattgttgagtatttagtgtgttctggtgcggttgatgtgatagttattgactctgtcgcagcattaactccaagagctgaaattgaaggtgatatgggtgatcaacatatggggctgcaagcaaggcttctaagtcatgggctacggaaactaacctctgccgtttcaaaagcgaactgtatattgatatttattaatcaaattcgtatgaaaataggagtagtgtatggaaatcctgaaactaccacgggtggaaatgcattaaaattctatacttctgtaaggcttgatataagaaaagttggtgtaataaaagacaaagaaaatattacaggtaatgaaacaagagttaaagttgtaaaaaataaagttgctcctccatttagagaagcgaaatttgatataatgtacaatgaaggtatatcaaaactcggagaaataatagatatgggagcaaagcttggtgtgcttgaaaaagcaggcgcttactattcatataacaacacacgtcttgggcaaggaagagagaatgtaaaaacttacctaaaaacaaacaaagaagtcgcaaatgaaatagaaacgaaaatcagagatttactcagaaatcatgataattctatcataatagacgaggatagtgagcaacttttagaagaatcagttttctga

SEQ ID NO: 5766 - protein, 355 aa, Wolbachia pipientis wMel
MASNPEERNSDKQKALDNAISQIEKAFGKGAIMKLKQNPVEKIDTISTGSIALDSALGVGGLPKGRIIEIFGPESSGKTTLALHVIAEAQKKGGSCAFIDAEHALDVLYARKLGVSTDDLVISQPDTGEQALHIVEYLVCSGAVDVIVIDSVAALTPRAEIEGDMGDQHMGLQARLLSHGLRKLTSAVSKANCILIFINQIRMKIGVVYGNPETTTGGNALKFYTSVRLDIRKVGVIKDKENITGNETRVKVVKNKVAPPFREAKFDIMYNEGISKLGEIIDMGAKLGVLEKAGAYYSYNNTRLGQGRENVKTYLKTNKEVANEIETKIRDLLRNHDNSIIIDEDSEQLLEESVF

SEQ ID NO: 5767 - DNA, 1053 bp, Wolinella succinogenes
  CDS (1)..(1053): transl_table=11
atggcactagatgagaacaaacgcaaagcgatcgatctagcgatcaaacagattgacaaggcctttggcaaaggcgccctcgtgcgacttggcgaaaaacccgtggaaaagatcgattcgattagcacgggctcattagggctcgacattgccctaggaatcggaggaatcccccaaggaagaatcatcgaaatctatggacctgagagctctggaaagaccacgctcgcacttcaagtgatcgctgagtgtcaaaaaaagggcggaatctgcgcttttatcgatgccgagcacgccctagatgtctcctacgccaaacgccttggggtggatgcagagaatcttcttgtctcccagcctgattatggtgaacaggcgttagagattctagagaccctcacacgaagcggagcggtcgatctcatcgtggtcgattcggtggctgccctcacccccaaaagtgaaattgatggcgatatgggcgatcaacacgtagggctccaagcacgcctcatgagccaagccctgcgaaaagtcacgggcgtgctccacaagatgaacaccaccgtgattttcatcaaccaaatccgtatgaaaatcggaatgatgggctatggaagccctgagacgaccacaggcggaaatgcgctcaaattctatgctagcgtgagaatcgatgtaagaagaatcgcctccctcaaacagggcgaacagcacattgggaatcgcgtcaaagccaaagtggtcaaaaacaaagtcgcgcccccctttagagaagcagaatttgacattatgtttggtgagggaatcagccaagaaggcgagctcatcgactatggcgtgaaactggacattgtcgataagagcggctcatggctcagttatggtgacaaaaaattaggtcaaggcaaagagaatgccaaagcctttttgaaagaaaacaaagaaattgcaaatgaaattcaggctaaaattatcggcgccatcggctcaagtgatgaaatcactacttttggggacgatgaagacgaatcagaaaacctagaatcataa

SEQ ID NO: 5768 - protein, 350 aa, Wolinella succinogenes
MALDENKRKAIDLAIKQIDKAFGKGALVRLGEKPVEKIDSISTGSLGLDIALGIGGIPQGRIIEIYGPESSGKTTLALQVIAECQKKGGICAFIDAEHALDVSYAKRLGVDAENLLVSQPDYGEQALEILETLTRSGAVDLIVVDSVAALTPKSEIDGDMGDQHVGLQARLMSQALRKVTGVLHKMNTTVIFINQIRMKIGMMGYGSPETTTGGNALKFYASVRIDVRRIASLKQGEQHIGNRVKAKVVKNKVAPPFREAEFDIMFGEGISQEGELIDYGVKLDIVDKSGSWLSYGDKKLGQGKENAKAFLKENKEIANEIQAKIIGAIGSSDEITTFGDDEDESENLES

SEQ ID NO: 5769 - DNA, 1035 bp, Xanthomonas axonopodis pv
  CDS (1)..(1035): transl_table=11
atggacgagaacaagaagcgcgccctttccgccgcactgagccagatcgaaaagcaattcggcaagggctcggtcatgcgcatgggcgaccgcgtcattgaggcggtcgaagtcatcccgaccggctcgctgatgctggatatcgccctggggatcggcggcctgccgaagggtcgcgtggtcgaaatctacggcccggaatcctccggcaagaccaccttgaccctgcaagccatcgccgagtgccagaagaacggcggcaccgctgccttcatcgatgccgagcacgcactggacccgatttatgcggccaagctgggcgtcaatgtcgacgacctgctgctgtcgcagccggataccggtgagcaggcactggaaattgccgacatgctggtgcgttcgggttcggttgatatcgtggtggtcgactcggtcgctgcactgacgccgaaggcggaaatcgaaggcgagatgggcgaccagctgccaggtttgcaggctcgcttgatgagccaggcgctgcgcaagctcaccggcaatatcaagcgctccaacacgctggtggtcttcatcaatcagctgcgcatgaagatcggcgtcatgatgccgggccagagcccggaagtgaccaccggcggcaacgcgctgaagttctacgcctcggtgcgtctggatatccgccgtatcggtgcgatcaagaagggcgacgagatcatcggcaaccagaccaagatcaaggtggtcaagaacaagctggcgcctccgttcaagcaggtcgtgaccgaaatcctgtatggcgaaggcatcagtcgcgagggcgaattgatcgacatgggcgtggaagccaagctggtcgacaaggccggcgcctggtacagctatggcgatgagcgcatcgggcagggcaaggacaacgcgcgaacctacctgcgcgacaactcgcaggttgcgacccggctggaagcggagctgcgtgagaagttccaacctgccgaagcaccgcgtgaagccggcgacgacgaagacaaggagtaa

SEQ ID NO: 5770 - protein, 344 aa, Xanthomonas axonopodis pv
MDENKKRALSAALSQIEKQFGKGSVMRMGDRVIEAVEVIPTGSLMLDIALGIGGLPKGRVVEIYGPESSGKTTLTLQAIAECQKNGGTAAFIDAEHALDPIYAAKLGVNVDDLLLSQPDTGEQALEIADMLVRSGSVDIVVVDSVAALTPKAEIEGEMGDQLPGLQARLMSQALRKLTGNIKRSNTLVVFINQLRMKIGVMMPGQSPEVTTGGNALKFYASVRLDIRRIGAIKKGDEIIGNQTKIKVVKNKLAPPFKQVVTEILYGEGISREGELIDMGVEAKLVDKAGAWYSYGDERIGQGKDNARTYLRDNSQVATRLEAELREKFQPAEAPREAGDDEDKE

SEQ ID NO: 5771 - DNA, 1077 bp, Xenorhabdus bovienii
  CDS (1)..(1077): transl_table=11
atggctaacgatgaaaacaaacaaaaagcactagcagcggcgctgggtcaaattgaaaaacaatttggtaaaggttctatcatgcgtctgggcgaaaaccgctcaatggatgttgaaactatctctactggctcactgtcactggatatagcattaggtgcgggtggtttgccaatgggccgtattgttgaaatatacgggcctgaatcttcgggtaagacaacattgacactgcaagttattgcttctgcccagcgtgaaggcaaaacctgtgcttttattgatgccgaacatgcccttgatccggtttatgccaaaaagttgggcgtagatattgataacctgctgtgctcccagcctgatacaggtgaacaggcactggaaatctgtgatgccttgtcacgctctggggcggttgacgtcatcgttgttgactccgttgctgcattgaccccgaaagcggaaatcgaaggtgagatcggcgattcccatatgggcttggcagctcgtatgatgagtcaggccatgcgtaagttggcaggtaacctgaaaaactcgaatactctgctaatctttatcaaccagatccgtatgaaaattggtgtgatgtttggtaacccagaaaccacaacaggtggtaatgcactgaaattttatgcatctgtccgtttggacatccgccgcactggttccgtaaaaaatggcgatgaagttgttggcagcgagactcgtgtgaaagtagtcaagaacaaaattgcggcaccgttcaaacaagctgaattccagatcttgtatggtgaaggtattaacacctttggcgaattggtcgacttgggcgttaagcacaaaatggtcgaaaaagcaggtgcatggtacagctataacggagataaaattgggcagggtaaagctaatgccacgatttacctgaaagagcacccagaagtctctgctgagctggataaaaaactgcgtgaattgctgttgaataatacaggtggattcagtagtgcagtctctgattatgtagccgattatgaagataacggtgaagaagtgaaaaacgaagagttctaa

SEQ ID NO: 5772 - protein, 358 aa, Xenorhabdus bovienii
MANDENKQKALAAALGQIEKQFGKGSIMRLGENRSMDVETISTGSLSLDIALGAGGLPMGRIVEIYGPESSGKTTLTLQVIASAQREGKTCAFIDAEHALDPVYAKKLGVDIDNLLCSQPDTGEQALEICDALSRSGAVDVIVVDSVAALTPKAEIEGEIGDSHMGLAARMMSQAMRKLAGNLKNSNTLLIFINQIRMKIGVMFGNPETTTGGNALKFYASVRLDIRRTGSVKNGDEVVGSETRVKVVKNKIAAPFKQAEFQILYGEGINTFGELVDLGVKHKMVEKAGAWYSYNGDKIGQGKANATIYLKEHPEVSAELDKKLRELLLNNTGGFSSAVSDYVADYEDNGEEVKNEEF

SEQ ID NO: 5773 - DNA, 1077 bp, Xenorhabdus nematophilus
  CDS (1)..(1077): transl_table=11
atggctaacgatgaaaacaaacaaaaagcactcgcagcagcgcttggacagattgagaaacaatttggtaaaggttccatcatgcgtttgggtgaaaaccgctcaatggatgttgaaactatctctactggttccctgtcattggatatcgcactaggcgcaggtggtttgccaatgggccgtattgttgagatatatgggcctgaatcttccggtaaaacaacgttaacattgcaagtgatcgctgctgcccagcgtgaaggcagaacgtgtgcttttattgatgccgaacatgcccttgatccagtttatgctaaaaaactgggcgtagatattgataacctgttgtgttcgcagcctgataccggtgaacaggcgttggaaatctgtgatgctttatcccgttccggcgcagtggatgtcattattgttgactccgttgcggcattgacaccaaaagcggaaattgaaggtgaaatcggtgattctcatatggggctggcagcgcgtatgatgagtcaggccatgcgtaagctggcaggtaacttgaaaaattcaaataccctgttgatcttcatcaaccagatccgtatgaaaattggtgtgatgtttggtaaccctgaaacaccgccgggtggtaatgcgctgaaattctatgcgtctgtccgtttggatatccgccgtacgggttccgtgaaaaatggtgatgaagttgttggtagcgaaacgcgtgtgaaagtcgttaaaaacaaagttgcagcaccattcaaacaggctgaattccaaattctttatggggaaggtattaatactctgggagagttgatcgatctgagtgttaaacacaaaatggtagaaaaagcaggtgcatggtatagctacaatggtgacaaaatcgggcagggtaaagccaacgccacgatttacctgaaagagcatccagaaactgctgctgagttgaataagaaactgcgtgatttgttgttgcacaatactggggatttcagtagcgcagcttcagattatgtgacagattacgaagacaacactgaagaagtgaataacgaagagttctaa

SEQ ID NO: 5774 - protein, 358 aa, Xenorhabdus nematophilus
MANDENKQKALAAALGQIEKQFGKGSIMRLGENRSMDVETISTGSLSLDIALGAGGLPMGRIVEIYGPESSGKTTLTLQVIAAAQREGRTCAFIDAEHALDPVYAKKLGVDIDNLLCSQPDTGEQALEICDALSRSGAVDVIIVDSVAALTPKAEIEGEIGDSHMGLAARMMSQAMRKLAGNLKNSNTLLIFINQIRMKIGVMFGNPETPPGGNALKFYASVRLDIRRTGSVKNGDEVVGSETRVKVVKNKVAAPFKQAEFQILYGEGINTLGELIDLSVKHKMVEKAGAWYSYNGDKIGQGKANATIYLKEHPETAAELNKKLRDLLLHNTGDFSSAASDYVTDYEDNTEEVNNEEF

SEQ ID NO: 5775 - DNA, 1044 bp, Xylella fastidiosa
  CDS (1)..(1044): transl_table=11
atggatgagaacaagaaacgcgccctttctgtcgctttaagccagattgaaaaacagttcggcaaggggtccgtgatgcggatgggcgatcgcgtgatcgaagccgtagaggcgatcccgacaggttcgctcatgttggatctggccctggggataggtggtttgccaaagggacgtgtcgtggaaatctatgggccggaatcttctgggaagaccacattgactttgcaggcgatcgctcaatgccagaagaggggaggtacagcagcgttcattgatgctgagcatgccttggatccgatttatgcgggcaagttaggcgtcaatgttgatgatttgttgttgtctcagccagatactggggagcaggctctggaaatcgctgacatgctggtgcgctcggggtcgatcgatatcatggttattgattcggttgcggcactcacgccaagggcggagattgagggtgagatgggagatcagttgcccggtcttcaggcgcgattgatgagccaggcgctgcgtaaattgaccggcaatatcaagcgctctaatacgctggtgatttttatcaaccagttgcgtatgaaaattgggatcatgatgccgggtcaaagccctgaaactacgacagggggtaatgcgctgaagttctatgcttctgtgcgtttggatattcgccgtattggcgcgatcaagaaaggtgacgaaattatcgggaatcaaaccaaaatcaaggttgttaaaaacaagttggcgcctcccttcaaacaagtcgtgactgagattctctatggtgaaggcatcagtcgtgaaggggaattgattgaaatgggcgtggaggccaagttggttgagaaagccggcgcttggtatagctatggtggtgagcggatcgggcaaggaaaagataatgcgcgtggctatctacgcgaaaacccgcattttgcggccaagcttgaggctgatttgcgtgagaaatttgagccgaccgagctttctcgagaagagggcgatgaagatacgctcgaagatgcaatgtaa

SEQ ID NO: 5776 - protein, 347 aa, Xylella fastidiosa
MDENKKRALSVALSQIEKQFGKGSVMRMGDRVIEAVEAIPTGSLMLDLALGIGGLPKGRVVEIYGPESSGKTTLTLQAIAQCQKRGGTAAFIDAEHALDPIYAGKLGVNVDDLLLSQPDTGEQALEIADMLVRSGSIDIMVIDSVAALTPRAEIEGEMGDQLPGLQARLMSQALRKLTGNIKRSNTLVIFINQLRMKIGIMMPGQSPETTTGGNALKFYASVRLDIRRIGAIKKGDEIIGNQTKIKVVKNKLAPPFKQVVTEILYGEGISREGELIEMGVEAKLVEKAGAWYSYGGERIGQGKDNARGYLRENPHFAAKLEADLREKFEPTELSREEGDEDTLEDAM

SEQ ID NO: 5777 - DNA, 1020 bp, Zymomonas mobilis
  CDS (1)..(1020): transl_table=11
atggacaagcaaaaagcccttgaagcggctttagctcagattgaccgcgcttttggtaaaggttcggttatgcgcttggggtctcgtgaaaaaatcgagattgatacaatttccagcggatcacttggccttgatattgcgctgggcattggcggcttgccccgtggccgtatcgtcgaaatctatggtcctgaaagctcgggtaaaacaactttagccctccatgctatcgccgaagcacaaaaagcaggtggaacagcggcctttgtcgatgctgaacatgcgcttgatccggtctatgccaaaaaactgggtgttaatacggatgatctaatcgtctctcagcctgatacgggtgagcaggctctggaaattacagataccctgatccgttctaacgctgttgatatattggttgtcgattctgttgcggccttaacgcctcgtgctgaaatcgaaggcgaaatgggcgatagtcacgttggtttgcaagcccgtttgatgagtcaggcgcttcgcaaaattaccggctcaatcaaccgctctcaaactttggttatttttattaaccaagtccggatgaaaatcggggttatgtatggcaaccctgaaacaacaacgggcggtaatgctttgaaattctatgccagcgttcggcttgatatccgtcgtgtaggacaaattaaagatcgcgatgaaatcgttggtaatgctacccgtgtcaaagtggtaaaaaacaagctggctccgcctttcaagcaggttgaattcgatatcatgtatggagaaggtgtctccaagatgggcgaaattctcgatctgggcgtaaaagccggtattatcgacaagtcaggctcatggttcagtcatgattccgttcgcatcggtcagggacgtgaaaatgccaaaacgttcttgcgtgaacatcctgaaatgactgaaaaaattgaaaaaatgattcgtcataatacggctgaaattgccgacgaaatgctggatccatctatccctgaagattag

SEQ ID NO: 5778 - protein, 339 aa, Zymomonas mobilis
MDKQKALEAALAQIDRAFGKGSVMRLGSREKIEIDTISSGSLGLDIALGIGGLPRGRIVEIYGPESSGKTTLALHAIAEAQKAGGTAAFVDAEHALDPVYAKKLGVNTDDLIVSQPDTGEQALEITDTLIRSNAVDILVVDSVAALTPRAEIEGEMGDSHVGLQARLMSQALRKITGSINRSQTLVIFINQVRMKIGVMYGNPETTTGGNALKFYASVRLDIRRVGQIKDRDEIVGNATRVKVVKNKLAPPFKQVEFDIMYGEGVSKMGEILDLGVKAGIIDKSGSWFSHDSVRIGQGRENAKTFLREHPEMTEKIEKMIRHNTAEIADEMLDPSIPED

SEQ ID NO: 5779 - DNA, 1290 bp, Oryza sativa
  CDS (1)..(1290)
atggcgaacctcctgaggcgcgcgtcgctgcggcgcgccgtcgccgccgtcgcggcagcagccgcgccctgccccgagagctataagcaagggatctgtggctctactttccactgccggtatttctcgtctaaagccaaaaagaagacaaagtccagtggaactgactctggtgaagagaatctgtcaaagaaagacttggctctacaccaggctattgatcaaataacatctgcatttgggaagggcgcaataatgtggcttggtcgttctgaaggtcgtagagaagtacctgttgtgtcaactgggtctttctctttggatttggcattgggaactggtggacttccaaagggtcgtgttatagaggtgtatggtccagaagcttcaggcaagacaactcttgcacttcacgttattgcagaagcacaaaagcatggcggttattgtgccttcgtagatgcagagcatgccttagatccagctctggctgaatcaattggggtcaacaccagtaatttacttctctctcagccagactgtggcgagcaggcactcagtcttgtggacacactgattcgaagcggctctgttgatgttgttgttgttgatagtgtagcagctcttgtccctaagagtgagcttgacggggagatgggtgatgcacatgttgctctccaggctagattgatgagccaagctcttcgcaagctgagccactctctctcactttcccagacaattttgttattcattaaccagatcaggtctaaagtgaccacatttggaggatttggaggtccaatggaggttacttctggtggaaatgcccttaaattctatgcttccgttagaatgaacatcaagcgtattggtttggtaaagaaaggcgaagagactataggtagtcaagtgcttgtgaagattgtgaaaaacaagcatgccccaccgttcaagacagcacagtttgagctggaatttggtaaagggatatgccgcagttcagagcttattgaacttggattaaagcacaagcttgtcaaaaagttgggtggtgcattttattctttcaacgaagagtcatatcgtggtaaagatgcccttaaatcttacctcaacgaaaatgaaagtatcgcaaaagaactggagacgaatttaaggaaattgatggaaactcaagcacctaaaaagcaggaggatgaaggtgatttcctgagtgatctgcctgaagagagtctcgccactgaaacatcctccgaggaggaactggcagctgtaatagaagcttaa

SEQ ID NO: 5780 - protein, 429 aa, Oryza sativa
MANLLRRASLRRAVAAVAAAAAPCPESYKQGICGSTFHCRYFSSKAKKKTKSSGTDSGEENLSKKDLALHQAIDQITSAFGKGAIMWLGRSEGRREVPVVSTGSFSLDLALGTGGLPKGRVIEVYGPEASGKTTLALHVIAEAQKHGGYCAFVDAEHALDPALAESIGVNTSNLLLSQPDCGEQALSLVDTLIRSGSVDVVVVDSVAALVPKSELDGEMGDAHVALQARLMSQALRKLSHSLSLSQTILLFINQIRSKVTTFGGFGGPMEVTSGGNALKFYASVRMNIKRIGLVKKGEETIGSQVLVKIVKNKHAPPFKTAQFELEFGKGICRSSELIELGLKHKLVKKLGGAFYSFNEESYRGKDALKSYLNENESIAKELETNLRKLMETQAPKKQEDEGDFLSDLPEESLATETSSEEELAAVIEA

SEQ ID NO: 5781 - DNA, 1257 bp, Oryza sativa
  CDS (1)..(1257)
atggccgccgccaccgtcgcagcctcctcccgcttcggccccgcccacctgcttccccgctcccgcaggaaggggagggcccccgcgccgagcgcgcgcgccacggcctgcggagccgtcgggcgaggccgccggctgcgctgcgagttcgtggccggcggcgggaacggcgcgctctccggggaggacgacccgcgcctcatagaccgccaaaaagctcttgatgcagccatgaatgacataaacagctcctttggaaaaggcagtgttacaagattaggaagcgcgggtggtgcctttgttgagacatttccaagtggctgcttgacactagattttgccttgggtggtggccttccaaaaggaagagtagtagaggtgtatggtccagaaagcagtggaaagactactctagcgctgcatgccattgctgaagtacagaaattgggaggcaatgccatgcttgtggatgcagagcatgcttttgatccagcttattctaaagcacttggggtagatattgaaaatctgattgtatgccagccagacaatggagagatggcactagaaattgcggaccgcatgtgcagatctggagctatcgatctcatctgtattgattcagtgtcagctctcactccgcgtgcagaaattgaaggtgagatagggatgcagcagatgggtttacaagcacgtctaatgagtcaagcattgagaaagatgtcaggcaatgcctcaaaggctggttgtactcttatgttcttgaatcaaataagatacaagattggagtattttatggtaatcctgaagtcactagtggagggatagctttgaaattcttcgcatcagttcgactagagatacggcccattggcaagataaaatctgccaagggagatgaagatgtgggtgtgaaggttcgtgtcagagtgcagaagagtaaagtctccagaccctacaagcaagctgaatttgagatcatctttggggagggcgttagtaaactgggatgtgttcttgattgtgctgagctgatggaagtcgttgcaaagaaaggctcatggtatagctacaaagaaatgagattgggtcaaggcagagaaaaagcactgcagtatctccgagagagccctaccatctgtgatgagatagaaaaggctgttcgagccatgataccagaaggagcaagacatatgagcctgctcgctttcgggcggtcatcattgaccgaagaagaacaagtagacgatgagtga

SEQ ID NO: 5782 - protein, 418 aa, Oryza sativa
MAAATVAASSRFGPAHLLPRSRRKGRAPAPSARATACGAVGRGRRLRCEFVAGGGNGALSGEDDPRLIDRQKALDAAMNDINSSFGKGSVTRLGSAGGAFVETFPSGCLTLDFALGGGLPKGRVVEVYGPESSGKTTLALHAIAEVQKLGGNAMLVDAEHAFDPAYSKALGVDIENLIVCQPDNGEMALEIADRMCRSGAIDLICIDSVSALTPRAEIEGEIGMQQMGLQARLMSQALRKMSGNASKAGCTLMFLNQIRYKIGVFYGNPEVTSGGIALKFFASVRLEIRPIGKIKSAKGDEDVGVKVRVRVQKSKVSRPYKQAEFEIIFGEGVSKLGCVLDCAELMEVVAKKGSWYSYKEMRLGQGREKALQYLRESPTICDEIEKAVRAMIPEGARHMSLLAFGRSSLTEEEQVDDE

SEQ ID NO: 5783 - DNA, 1293 bp, Oryza sativa
  CDS (1)..(1293)
atggccagggccctcctcctccggcgcggccaccccttcctccgccgcctcctgcggcctcccccgcctcccacctcctctgtactggaatcctgcaatagaaatgtgtcaccaagagttcagttgtggagattctctgcagaagggaaagaccagacaaattcaagtgaagatggttacagtgaggcaaacattaagaagaaggactttgcgctacaacaagctttggaccaaattaagtctgcatttggtgaggagtcaattatgtggctaaatcactcttacggtcctaaagaagttcctgtcatatctactggatcctttgcattggacatggctttaggaattggtgggctcccgaagggaagggttgttgaaatttatggtccagaggcatcaggaaaaaccactttagcacttcatatcatagctgaagcacagaagaatggaggatattgtgcttttattgatgccgagcatgccctggatccaacattagcagaatctataggtgttaaggcagaacacctgttattatctcaaccagactgtggtgaacaggcccttggtcttgctgatatcttaatccgaagtggctctattgatgttgtggttgtggacagtgtagcagctcttgttccaaaaactgaactggatggtgagatgggagatgcccatgttgcacttcaagcaaggcttatgagtcaagcacttcgcaagttgagccattctctttctcgctccaggacaatgttggtgtttattaatcaggtaagatcgaaattaagcacatttagtggattcggagcaccagcagaagtaacctgtggagggaatgccttaaagttctatgcttctgtccgcttgaacaccaaaaggattggtcttataaaaaagtcagaagaggttgtaggcacacaaattcaggtcaagattgtcaagaacaagcatgcacccccatttaagactgtacaccttgagcttgagtttggtaagggcctgagtcgtgaattggagattattgaagtaggcttcaaacacaagttcataacaaaatcaggagtattctatcacttgaacgggcaaaatttccatggaaaggatgctcttaaatgttatctcgctgaaaacaagaatgtcctggaatctctgatgtcaatgataaaggaaagcataatgcaacaggagtcccatccagatagaaacatggaggatgccaacccagatacgagcataacagaagagttcgtttcagcaacagatgaacaagtacctgaagaggttgaggcctga

SEQ ID NO: 5784 - protein, 430 aa, Oryza sativa
MARALLLRRGHPFLRRLLRPPPPPTSSVLESCNRNVSPRVQLWRFSAEGKDQTNSSEDGYSEANIKKKDFALQQALDQIKSAFGEESIMWLNHSYGPKEVPVISTGSFALDMALGIGGLPKGRVVEIYGPEASGKTTLALHIIAEAQKNGGYCAFIDAEHALDPTLAESIGVKAEHLLLSQPDCGEQALGLADILIRSGSIDVVVVDSVAALVPKTELDGEMGDAHVALQARLMSQALRKLSHSLSRSRTMLVFINQVRSKLSTFSGFGAPAEVTCGGNALKFYASVRLNTKRIGLIKKSEEVVGTQIQVKIVKNKHAPPFKTVHLELEFGKGLSRELEIIEVGFKHKFITKSGVFYHLNGQNFHGKDALKCYLAENKNVLESLMSMIKESIMQQESHPDRNMEDANPDTSITEEFVSATDEQVPEEVEA

SEQ ID NO: 5785 - DNA, 1077 bp, Zea mays
  CDS (1)..(1077)
atgttactcaggaatctgtacaaatttccagttgatatgcagttagactatgagagtgatccccctcttgacgatacaaaagctattgagaaggagtcatcacttaatgttgctgtttctcaactcgcaattgacttcgatagagactctaatttatgtttggagcgattttcccgtgcaaggaaagcatctgtagtctctactggttctcttaagcttgacctcgctctcggcgttggaggattaccgaagggtagaatggtggagatatatgggaaagaagcatctgggaagacaacactcgcgcttcatgttattaaggaagctcaaaagaatggaggttattgtgcttatattgatgcagaaaatgccttcaacccttcatttgctgaatctattggcgtagacagtgaaaggctcttgatagcccaacctgattctgctgaaaattctctaagcattgtaaacactcttgttggtggttctgttgctgttgttgttgtggacagtgtggcagcacttattcccaaatgtgaaattgaaggtgaaatatacacaaattgtggagacatccaatcccatttgatgactcgggcccttagaaaaattcagtacactttatgtcgatctgaaacacttattatttttgtgaatcaggttagaacaaagcggacatcaagtaatcctgggatctacaaggaggtgccttgcggtggtaatgcactaggattctatgctgcagtcagaatgaggacttcaaggagagaactgcgctatagtgaagatgaggctaccggcgtaggtatatcagtgcagatcatcaagaacaaattggctccagcgaacctgaagaaggaagccggcatcgacatcacattcggtaaggggatctgccacgagtcggagatcctggagacggcttcctccgtcggagtgatcctgaaagacgggtgtgggtattggatcaacaacgagttcctggcaggcaaggtggaagcggagaagttcctgcgtgaaaacgctgcagtggcagatgagatctgcaataccgtgaggaacgagttcttgcaaaggtga

SEQ ID NO: 5786 - protein, 358 aa, Zea mays
MLLRNLYKFPVDMQLDYESDPPLDDTKAIEKESSLNVAVSQLAIDFDRDSNLCLERFSRARKASVVSTGSLKLDLALGVGGLPKGRMVEIYGKEASGKTTLALHVIKEAQKNGGYCAYIDAENAFNPSFAESIGVDSERLLIAQPDSAENSLSIVNTLVGGSVAVVVVDSVAALIPKCEIEGEIYTNCGDIQSHLMTRALRKIQYTLCRSETLIIFVNQVRTKRTSSNPGIYKEVPCGGNALGFYAAVRMRTSRRELRYSEDEATGVGISVQIIKNKLAPANLKKEAGIDITFGKGICHESEILETASSVGVILKDGCGYWINNEFLAGKVEAEKFLRENAAVADEICNTVRNEFLQR

SEQ ID NO: 5787 - DNA, 1173 bp, Brassica napus
  CDS (1)..(1173)
atgggtcgtctctcactaaccagttcgattcacagattccgcttcttctcctacttatctcagcataatgtaagaagaggtgttctcgcttgctctagctatggaagtcattatctttcgtctttagctgaagcttcagactgtgagcttgacgaatatccagaagatgataccaacataacggagaaagacactaatctccgttcagcattatcacagctctcagtgtcaggcgtcttcgatcaagactctaagctctggctgcagcgcttctccagaacaaggagagtctctgttatatccaccggctcactcaaccttgatctagctctaggcgttggaggcttgccaaagggaagaatggttgaggtttacggcaaagaagcttctggaaagacaactctagctctccacatcatcaaggaagctcagaagctcggaggctattgcgcttaccttgacgtggagaacgccatggatcctacgctagctgagtcgataggtgtgaacacggaggagcttctgatatcgagacctgattccgctgaaaacatgctgagtattgtcgatgtgttgaccaagtgtggatcggtagatgttattgtggttgatagtgttgctgctcttgtccctcaatgtgaagttggtgctcctctaggagaaagttacagagacagacaatcagtgataatgacgcaggcgcttaggaaaatacactactcggttgctaattctcggacgctcattgtttttcttaatcaggtcagatcacatgccaaagctaacatgcgtttcccacattctgaagaagtgacttgtgggggaaacgcattgcggtttcaggcagctatacgactcaaaatgataagaacagggctgattaagactgatagtgaggtaagtggtctgaatgtgtgcgtggaagtggtgaaaaacaaactgacgccagggaagaagaaatctgaattggggattcacttcggtcgtggcttctacgtggagcgtgaggtgttagaattggcttgtgagcatggagttattgcaagagaaggtaatagccatttgattgaaggcgaggttgttgatggcaaagacgcagctgaaaagtatctgacggagaataagaaggtccttgataccgtcatcaatatcctgaggaagcagctcttctag

SEQ ID NO: 5788 - protein, 390 aa, Brassica napus
MGRLSLTSSIHRFRFFSYLSQHNVRRGVLACSSYGSHYLSSLAEASDCELDEYPEDDTNITEKDTNLRSALSQLSVSGVFDQDSKLWLQRFSRTRRVSVISTGSLNLDLALGVGGLPKGRMVEVYGKEASGKTTLALHIIKEAQKLGGYCAYLDVENAMDPTLAESIGVNTEELLISRPDSAENMLSIVDVLTKCGSVDVIVVDSVAALVPQCEVGAPLGESYRDRQSVIMTQALRKIHYSVANSRTLIVFLNQVRSHAKANMRFPHSEEVTCGGNALRFQAAIRLKMIRTGLIKTDSEVSGLNVCVEVVKNKLTPGKKKSELGIHFGRGFYVEREVLELACEHGVIAREGNSHLIEGEVVDGKDAAEKYLTENKKVLDTVINILRKQLF

SEQ ID NO: 5789 - DNA, 1278 bp, Zea mays
  CDS (1)..(1278)
atgacgaccctcctcaggcgcgcgtcgctgcggcgcgtcattgccgccgccgccgcctcttctttgcaccctgagagctataagcaagggatctgtggatccacatttcattgccgagagttcgcatcaaaagcaaaaaagaagtcaagtggaacagactctggggaggagaacatgtcaaagaaagacttggctttacaccaggctattgatcagataacgtctgcatttgggaagggggcaataatgtggcttgggcgttcacaaggccatagagatgtaccagtcgtgtctactgggtctttcgctttggatatggctctaggaactggtggtcttccaaaggggcgtgtcatagaggtctatggtccagaggcttcaggcaagacaacacttgctctacatgtcattgcagaagcacaaaagaatgggggttactgtgcctttgtagatgcagaacacgctttggatccagctcttgcagagtcaattggtgttgacactaacaatttgctcgtctctcagccagactgcgctgagcaagcactcagtcttgtggacacactgattcgaagtggatctgttgatgttgttgtagtagacagtgtagctgcgcttgttccaaagactgagcttgatggtgagatgggtgatgcacatgttgctcttcaggctaggttgatgagccaagcccttcgcaagcttagccactcactttcactttcgcaaacaattttgttatttattaatcagatcagggccaaggtagccacatttggatttggaggaccaactgaggttacttctggtggcaacgccttgaagttttatgcgtctgttcgcttgaacatcaggcgtattggtttggtaaagaaaggcgaagagacaataggtagtcagattgctgtgaagattgtaaaaaacaagcatgccccacccttcaagactgcacagtttgagcttgaatttggaaaggggatatgccgcagttctgagctttttgaacttggattgaagcacaagcttatccgaaagagtggtggttcatattatagtttcaatggtaaggctttcaatggtaaaagtaaccttaaatcttaccttactgaaaacaagagcgttgcaaatgatctggagatggaactaaagagattgatgggaactgatgcgtctaaagagcaggaggcaggagacagttcgcagagtgatttgcctgaagagagtgtcacacctgaagcatcgtcagaagaggatctgggagccataattgaaggttag

SEQ ID NO: 5790 - protein, 425 aa, Zea mays
MTTLLRRASLRRVIAAAAASSLHPESYKQGICGSTFHCREFASKAKKKSSGTDSGEENMSKKDLALHQAIDQITSAFGKGAIMWLGRSQGHRDVPVVSTGSFALDMALGTGGLPKGRVIEVYGPEASGKTTLALHVIAEAQKNGGYCAFVDAEHALDPALAESIGVDTNNLLVSQPDCAEQALSLVDTLIRSGSVDVVVVDSVAALVPKTELDGEMGDAHVALQARLMSQALRKLSHSLSLSQTILLFINQIRAKVATFGFGGPTEVTSGGNALKFYASVRLNIRRIGLVKKGEETIGSQIAVKIVKNKHAPPFKTAQFELEFGKGICRSSELFELGLKHKLIRKSGGSYYSFNGKAFNGKSNLKSYLTENKSVANDLEMELKRLMGTDASKEQEAGDSSQSDLPEESVTPEASSEEDLGAIIEG

SEQ ID NO: 5791 - DNA, 1308 bp, Triticum aestivum
  CDS (1)..(1308)
atggcgaccctcctgaggcgcgcgtcgctgcggcgggccatcgcctccgccgcctcggccgccaccgcctccgcctcctgccccgagagctataggcaggtgatctgtggctctacctttcattgccgagatttcgcatctaaagccaaaaagaagtcaaagtcaagtggcaccgactccggtgaggagaatatgtcaaagaaagacttggctttacatcaggccatcgatcaaataacaacttcgtttgggaaaggagcaataatgtggcttggccgctctgaaggtcatagagaagtacctgttgtgtctaccggatctttctctttggatctggcactgggaattggtgggcttccaaagggacgtgttgtagaggtttacggcccagaggcttcaggaaagacaactcttgctcttcacgttattgcagaagcacaaaagcttagcggcggtggttattgtgcatttgtagatgcagagcatgctttggatccaactctggcagagtcgattggtgtcgacactagtaacttacttctctctcagccagactctgctgagcaggcactcagtcttgtagacacgctgattcgaagtggctctgttgatgttgttgttgttgacagtgtagcagctcttgtccccaagaccgagcttgatggagagatgggtgatgcacatgtggctctccaagccagactgatgagtcaagctcttcgcaagctgagccattctctttcactatcccagacagttttgctatttattaatcagatcaggtctaaggtacagacatttgggggaggattaggagggccacaagaggtcacttccggtggaaatgcccttaaattttatgcctcggtccgcctgaacatcaggcgaattggtatggtaaagaaaggtgaagagattataggaagtcaggttactgtgaagattgtgaaaaacaagcatgccccaccgttcaggactgcacagtttgagctggaatttggaaaaggaatatgccgcagctcagagcttttcgatcttggggtaaagcacaagcttgttaagaagaccgggggcgcgtactactctttcaacgaacagcagttccatggtaaagatgccgttaaagctttccttacaaaaaatgagagtgttgcgaaagaactggagatggagctaaggagattgatccaaactgaaccgcctagaaagccggaggctgaggacgatctgctggacgattcgcctgaagagattgtcagacctgaaacgtcatcggaagaggatatggccgctataatcagggcttaa

SEQ ID NO: 5792 - protein, 435 aa, Triticum aestivum
MATLLRRASLRRAIASAASAATASASCPESYRQVICGSTFHCRDFASKAKKKSKSSGTDSGEENMSKKDLALHQAIDQITTSFGKGAIMWLGRSEGHREVPVVSTGSFSLDLALGIGGLPKGRVVEVYGPEASGKTTLALHVIAEAQKLSGGGYCAFVDAEHALDPTLAESIGVDTSNLLLSQPDSAEQALSLVDTLIRSGSVDVVVVDSVAALVPKTELDGEMGDAHVALQARLMSQALRKLSHSLSLSQTVLLFINQIRSKVQTFGGGLGGPQEVTSGGNALKFYASVRLNIRRIGMVKKGEEIIGSQVTVKIVKNKHAPPFRTAQFELEFGKGICRSSELFDLGVKHKLVKKTGGAYYSFNEQQFHGKDAVKAFLTKNESVAKELEMELRRLIQTEPPRKPEAEDDLLDDSPEEIVRPETSSEEDMAAIIRA

SEQ ID NO: 5793 - DNA, 1293 bp, Zea mays
  CDS (1)..(1293)
atggcgatcctccttaggcgcgcgtcgctgcggcgcgtcatcgccttcgccgccgcctcctcctcctcctcttctttgcactctgagatttataagcaaggggtttgtggatccatgtttcattgccgagagttcgcatcaaaagccaaaaaaaagaagtcaagtggaacagactccgatgaggagagtatgtcaaagaaagacttggctttacaccaggctatccatcaaataacgtctgcatttgggaagggggcaataatgtggcttgggcgttcgcaaggccttagagatgtacctgttgtgtctactgggtctttcgctttggatatggctctaggaactggtggtcttccaaaggggcgtgtcatagaggtctatggtccagaggcttcaggcaagacaacacttgctctacatgtcattgcagaagcacaaaagaatgggggttactgtgcctttgtagatgcagaacacgctttggatccagctctcgcagagtcaattggtgttgacactaacaatttactcctctctcagccagactgcgctgagcaagcactcagtcttgtggacacactgattcgaagtggatctgttgatgttgttgtagtagacagtgtagctgcgcttgttccaaagactgagcttgatggtgagatgggtgatgcacatattgctcttcaggctaggttgatgagccaagcccttcgcaagcttagccactcactttcactttcacaaacaattttgttatttattaatcagatcagggccaaggtagccacatttggatttggaggaccaactgaggtcacttctggtggtaacgccttgaagttttatgcttctgttcgcttgaacatcaggcgtattggttttttaaaggaaggtgaagagacaataggtagtcaggttgctgtgaagattgtaaaaaataagcatgccccacccttcaagactgcacagtttgagcttgaatttggaaaggggatatgccgcagttctgagctttttgaacttgggttgaagcacaagcttatccaaaagactggcggtgcatattatagattcaatgatatgagtttcaaaggtaaaaataaccttaaatcttaccttactgaaaacaagagtgttgcaaatgatctggagacgaaactaaggagattgatgggaaccgaagcacctaaagagcaggaggcagaagacagttcgccgagtgatttgcctgaagaggttgtcacacctgaagcatcctcagaagaggatatgggagtcgtaatcgaggcttga

SEQ ID NO: 5794 - protein, 430 aa, Zea mays
MAILLRRASLRRVIAFAAASSSSSSLHSEIYKQGVCGSMFHCREFASKAKKKKSSGTDSDEESMSKKDLALHQAIHQITSAFGKGAIMWLGRSQGLRDVPVVSTGSFALDMALGTGGLPKGRVIEVYGPEASGKTTLALHVIAEAQKNGGYCAFVDAEHALDPALAESIGVDTNNLLLSQPDCAEQALSLVDTLIRSGSVDVVVVDSVAALVPKTELDGEMGDAHIALQARLMSQALRKLSHSLSLSQTILLFINQIRAKVATFGFGGPTEVTSGGNALKFYASVRLNIRRIGFLKEGEETIGSQVAVKIVKNKHAPPFKTAQFELEFGKGICRSSELFELGLKHKLIQKTGGAYYRFNDMSFKGKNNLKSYLTENKSVANDLETKLRRLMGTEAPKEQEAEDSSPSDLPEEVVTPEASSEEDMGVVIEA

SEQ ID NO: 5795 - DNA, 1278 bp, Zea mays
  CDS (1)..(1278)
atgacgaccctcctcaggcgcgcgtcgctgcggcgcgtcattgccgccgccgccgcctcttcttttcaccctgagagctataagcaagggatctgtggctccacatttcattgccgagagttcgcatcaaaagcaaaaaagaagtcaagtggaacagactctggggaggagaacatgtcaaagaaagacttggctttacaccaggctattgatcagataacgtctgcatttgggaagggggcaataatgtggcttgggcgttcacaaggccatagagatgtaccagtcgtgtctactgggtctttggatttggatatggctctaggaactggtggtcttccaaaggggcgtgttgtagaggtatatggtccagaggcttcaggcaagacaacgcttgctctacatgtcattgcagaagcacaaaagaatggaggttactgtgcctttgtagatgcagagcacgctttggatccagctctcgccgagtcaattggtgttgacactaacaatttactcctttctcagcccgattgtgctgagcaggcactcagtcttgtggacacactgattcgaagtggatctgttgatgttgttgtagtagacagtgttgctgcgcttgttccaaagactgagcttgatggtgagatgggtgatgcacatattgctcttcaggctaggttgatgagtcaagcccttcgcaagcttagccactccctttcactttcacaaacaattttgttatttattaatcagatcagggccaaggtagccacatttggatttggaggaccaactgaggttacttctggtggcaacgccttgaagttttatgcatctgttcgcttgaacatcaggcgtattggtttggtaaagaaaggcgaagagacaataggtagtcagattgctgtgaagattgtaaaaaacaagcatgccccacccttcaagactgcacagtttgagcttgaatttggaaaggggatatgccgcagttctgagctttttgaacttggattgaagcacaagcttatccgaaagagtggtggttcgtattatagtttcaatggtaaggctttcaatggtaaaagtaaccttaaatcttaccttactgaaaacaagagtgttgccaatgatctggagatggaactaaagagattgatgggaactgatgcgtctaaagagcaggaggcaggagacagttcgcagagtgattttcctgaagagagtgtcacacctgaagcatcgtcagaagaggatctgggagccataattgaaggttag

SEQ ID NO: 5796 - protein, 425 aa, Zea mays
MTTLLRRASLRRVIAAAAASSFHPESYKQGICGSTFHCREFASKAKKKSSGTDSGEENMSKKDLALHQAIDQITSAFGKGAIMWLGRSQGHRDVPVVSTGSLDLDMALGTGGLPKGRVVEVYGPEASGKTTLALHVIAEAQKNGGYCAFVDAEHALDPALAESIGVDTNNLLLSQPDCAEQALSLVDTLIRSGSVDVVVVDSVAALVPKTELDGEMGDAHIALQARLMSQALRKLSHSLSLSQTILLFINQIRAKVATFGFGGPTEVTSGGNALKFYASVRLNIRRIGLVKKGEETIGSQIAVKIVKNKHAPPFKTAQFELEFGKGICRSSELFELGLKHKLIRKSGGSYYSFNGKAFNGKSNLKSYLTENKSVANDLEMELKRLMGTDASKEQEAGDSSQSDFPEESVTPEASSEEDLGAIIEG

SEQ ID NO: 5797 - DNA, 1230 bp, Zea mays
  CDS (1)..(1230)
atgcgagggatcctctcctcttcctccgctctcctccggcgagccggcgcccagctctcgcgcacggactgcagtagcccctcagcgtccgcgacctctcctctccgccgctcccctcttcagaatgggaaaagagacacattttgttcgctttggttcaaaggtcgttcggtatcaaccacagttgatatgcagttagactatgagagtgatccccctcttgacgatacaaaagctattgagaaggagtcatcacttaatgttgctgtttctcaactcgcaattgacttcgatagagactctaatttatgtttggagcgattttcccgtgcaaggaaagcatctgtagtctctactggttctcttaagcttgacctcgctctcggcgttggaggattaccgaagggtagaatggtggagatatatgggaaagaagcatctgggaagacaacactcgcgcttcatgttattaaggaagctcaaaagaatggaggttattgtgcttatattgatgcagaaaatgccttcaacccttcatttgctgaatctattggcgtagacagtgaaaggctcttgatagcccaacctgattctgctgaaaattctctaagcattgtaaacactcttgttggtggttctgttgctgttgttgttgtggacagtgtggcagcacttattcccaaatgtgaaattgaaggtgaaatatacacaaattgtggagacatccaatcccatttgatgactcgggcccttagaaaaattcagtacactttatgtcgatctgaaacacttattatttttgtgaatcaggttagaacaaagcggacatcaagtaatcctgggatctacaaggaggtgccttgcggtggtaatgcactaggattctatgctgcagtcagaatgaggacttcaaggagagaactgcgctatagtgaagatgaggctaccggcgtaggtatatcagtgcagatcatcaagaacaaattggctccagcgaacctgaagaaggaagccggcatcgacatcacattcggtaaggggatctgccacgagtcggagatcctggagacggcttcctccgtcggagtgatcctgaaagacgggtgtgggtattggatcaacaacgagttcctggcaggcaaggtggaagcggagaagttcctgcgtgaaaacgctgcagtggcagatgagatctgcaataccgtgaggaacgagttcttgcaaaggtga

SEQ ID NO: 5798 - protein, 409 aa, Zea mays
MRGILSSSSALLRRAGAQLSRTDCSSPSASATSPLRRSPLQNGKRDTFCSLWFKGRSVSTTVDMQLDYESDPPLDDTKAIEKESSLNVAVSQLAIDFDRDSNLCLERFSRARKASVVSTGSLKLDLALGVGGLPKGRMVEIYGKEASGKTTLALHVIKEAQKNGGYCAYIDAENAFNPSFAESIGVDSERLLIAQPDSAENSLSIVNTLVGGSVAVVVVDSVAALIPKCEIEGEIYTNCGDIQSHLMTRALRKIQYTLCRSETLIIFVNQVRTKRTSSNPGIYKEVPCGGNALGFYAAVRMRTSRRELRYSEDEATGVGISVQIIKNKLAPANLKKEAGIDITFGKGICHESEILETASSVGVILKDGCGYWINNEFLAGKVEAEKFLRENAAVADEICNTVRNEFLQR

SEQ ID NO: 5799 - DNA, 20 bp, Artificial sequence
  primer
atgtcgaaaaaggagattgc

SEQ ID NO: 5800 - DNA, 21 bp, Artificial sequence
  primer
tcatgctgcctcaacaaccac

SEQ ID NO: 5801 - protein, 316 aa, Artificial sequence
  consensus sequence
  Variant (3)..(4): Xaa in position 3 to 4 is any amino acid
  Variant (6)..(7): Xaa in position 6 to 7 is any amino acid
  Variant (10)..(12): Xaa in position 10 to 12 is any amino acid
  Variant (13)..(14): Xaa in position 13 to 14 is any or no amino acid
  Variant (19)..(20): Xaa in position 19 to 20 is any amino acid
  Variant (22)..(22): Xaa in position 22 is any amino acid
  Variant (25)..(34): Xaa in position 25 to 34 is any amino acid
  Variant (35)..(37): Xaa in position 35 to 37 is any or no amino acid
  Variant (41)..(42): Xaa in position 41 to 42 is any amino acid
  Variant (45)..(45): Xaa in position 45 is any amino acid
  Variant (49)..(49): Xaa in position 49 is any amino acid
  Variant (52)..(52): Xaa in position 52 is any amino acid
  Variant (54)..(54): Xaa in position 54 is any amino acid
  Variant (57)..(58): Xaa in position 57 to 58 is any amino acid
  Variant (71)..(72): Xaa in position 71 to 72 is any amino acid
  Variant (74)..(76): Xaa in position 74 to 76 is any amino acid
  Variant (78)..(79): Xaa in position 78 to 79 is any amino acid
  Variant (81)..(82): Xaa in position 81 to 82 is any amino acid
  Variant (83)..(83): Xaa in position 83 is any or no amino acid
  Variant (86)..(87): Xaa in position 86 to 87 is any amino acid
  Variant (88)..(88): Xaa in position 88 is any or no amino acid
  Variant (91)..(91): Xaa in position 91 is any amino acid
  Variant (100)..(100): Xaa in position 100 is any amino acid
  Variant (103)..(103): Xaa in position 103 is any amino acid
  Variant (104)..(104): Xaa in position 104 is any or no amino acid
  Variant (108)..(110): Xaa in position 108 to 110 is any amino acid
  Variant (111)..(111): Xaa in position 111 is any or no amino acid
  Variant (113)..(114): Xaa in position 113 to 114 is any amino acid
  Variant (119)..(119): Xaa in position 119 is any amino acid
  Variant (127)..(129): Xaa in position 127 to 129 is any amino acid
  Variant (131)..(131): Xaa in position 131 is any amino acid
  Variant (135)..(136): Xaa in position 135 to 136 is any amino acid
  Variant (138)..(139): Xaa in position 138 to 139 is any amino acid
  Variant (141)..(141): Xaa in position 141 is any amino acid
  Variant (148)..(148): Xaa in position 148 is any amino acid
  Variant (150)..(150): Xaa in position 150 is any amino acid
  Variant (156)..(156): Xaa in position 156 is any amino acid
  Variant (160)..(162): Xaa in position 160 to 162 is any amino acid
  Variant (176)..(187): Xaa in position 176 to 187 is any amino acid
  Variant (193)..(193): Xaa in position 193 is any amino acid
  Variant (195)..(195): Xaa in position 195 is any amino acid
  Variant (200)..(200): Xaa in position 200 is any amino acid
  Variant (201)..(201): Xaa in position 201 is any or no amino acid
  Variant (203)..(203): Xaa in position 203 is any amino acid
  Variant (204)..(207): Xaa in position 204 to 207 is any or no amino acid
  Variant (212)..(212): Xaa in position 212 is any amino acid
  Variant (215)..(215): Xaa in position 215 is any amino acid
  Variant (221)..(221): Xaa in position 221 is any amino acid
  Variant (227)..(227): Xaa in position 227 is any amino acid
  Variant (230)..(233): Xaa in position 230 to 233 is any amino acid
  Variant (234)..(236): Xaa in position 234 to 236 is any or no amino acid
  Variant (238)..(242): Xaa in position 238 to 242 is any amino acid
  Variant (243)..(243): Xaa in position 243 is any or no amino acid
  Variant (245)..(248): Xaa in position 245 to 248 is any amino acid
  Variant (256)..(256): Xaa in position 256 is any amino acid
  Variant (260)..(261): Xaa in position 260 to 261 is any amino acid
  Variant (263)..(266): Xaa in position 263 to 266 is any amino acid
  Variant (268)..(268): Xaa in position 268 is any amino acid
  Variant (270)..(270): Xaa in position 270 is any amino acid
  Variant (273)..(273): Xaa in position 273 is any amino acid
  Variant (276)..(278): Xaa in position 276 to 278 is any amino acid
  Variant (280)..(282): Xaa in position 280 to 282 is any amino acid
  Variant (284)..(292): Xaa in position 284 to 292 is any amino acid
  Variant (294)..(294): Xaa in position 294 is any amino acid
  Variant (296)..(296): Xaa in position 296 is any amino acid
  Variant (298)..(299): Xaa in position 298 to 299 is any amino acid
  Variant (301)..(304): Xaa in position 301 to 304 is any amino acid
  Variant (305)..(305): Xaa in position 305 is any or no amino acid
  Variant (309)..(310): Xaa in position 309 to 310 is any amino acid
  Variant (312)..(315): Xaa in position 312 to 315 is any amino acid
ALXXAXXQIXXXXXFGKGXXMXLGXXXXXXXXXXXXXTGSXXLDXALGXGGXPXGRXXEIYGPESSGKTTXXLXXXAXXQXXXGGXXXAFXDAEHALDPXYAXXLGVXXXXLXXSQPDXGEQALEIXXXLXRSGXXDXXVXDSVAALXPXAEIEGXMGDXXXGLQARLMSQALRKXXXXXXXXXXXXIFINQXRXKIGVXXGXXXXXPETTXGGXALKFYXSVRLDXRRXXXXXXXKXXXXXXGXXXXVKVVKNKXAPPXXFXXXXFXIXYGXGIXXXGXXXDXXXXXXXXXKXGXWXXYXXXXXGQGXXNXXXXL

SEQ ID NO: 5802 - protein, 21 aa, Artificial sequence
  protein pattern
  Variant (2)..(2): Xaa in position 2 is any amino acid
  Variant (3)..(3): Xaa in position 3 is Ile, Leu, Met or Val
  Variant (4)..(5): Xaa in position 4 to 5 is Ile or Val
  Variant (12)..(12): Xaa in position 12 is Thr or Val
  Variant (14)..(15): Xaa in position 14 to 15 is any amino acid
  Variant (17)..(17): Xaa in position 17 is Ile or Leu
  Variant (20)..(20): Xaa in position 20 is Asp, Glu or Asn
  Variant (21)..(21): Xaa in position 21 is Ile or Met
DXXXXDSVAALXPXXEXEGXX

SEQ ID NO: 5803 - protein, 20 aa, Artificial sequence
  protein pattern
  Variant (2)..(2): Xaa in position 2 is Ile or Val
  Variant (3)..(3): Xaa in position 3 is Ala, Ile or Val
  Variant (7)..(7): Xaa in position 7 is any amino acid
  Variant (8)..(8): Xaa in position 8 is Ala or Ser
  Variant (12)..(12): Xaa in position 12 is Lys or Arg
  Variant (13)..(13): Xaa in position 13 is any amino acid
  Variant (14)..(14): Xaa in position 14 is Ala, Thr or Val
  Variant (15)..(17): Xaa in position 15 to 17 is any amino acid
  Variant (18)..(18): Xaa in position 18 is Ile, Leu, Met or Val
  Variant (19)..(19): Xaa in position 19 is any amino acid
  Variant (20)..(20): Xaa in position 20 is Phe or Tyr
KXXKNKXXPPFXXXXXXXXX

SEQ ID NO: 5804 - protein, 14 aa, Artificial sequence
  protein pattern
  Variant (5)..(5): Xaa in position 5 is Glu or Ser
  Variant (6)..(6): Xaa in position 6 is Ile or Leu
  Variant (7)..(7): Xaa in position 7 is Ala, Cys, Thr or Val
  Variant (8)..(8): Xaa in position 8 is Asp or Glu
  Variant (9)..(9): Xaa in position 9 is any amino acid
  Variant (11)..(11): Xaa in position 11 is any amino acid
  Variant (14)..(14): Xaa in position 14 is Gly, Asn or Ser
EQALXXXXXLXRSX

SEQ ID NO: 5805 - protein, 13 aa, Artificial sequence
  protein pattern
  Variant (2)..(2): Xaa in position 2 is Asp, Glu or Thr
  Variant (3)..(4): Xaa in position 3 to 4 is any amino acid
  Variant (5)..(5): Xaa in position 5 is Phe, His or Tyr
  Variant (9)..(9): Xaa in position 9 is Ala or Ser
  Variant (10)..(10): Xaa in position 10 is Ala, Ile or Val
  Variant (12)..(12): Xaa in position 12 is any amino acid
  Variant (13)..(13): Xaa in position 13 is Phe, Leu or Met
IXXXXGKGXXMXX

SEQ ID NO: 5806 - protein, 17 aa, Artificial sequence
  protein pattern
  Variant (2)..(4): Xaa in position 2 to 4 is any or no amino acid
  Variant (7)..(7): Xaa in position 7 is Phe, Ile, Leu, Met or Val
  Variant (8)..(8): Xaa in position 8 is any amino acid
  Variant (11)..(11): Xaa in position 11 is any amino acid
  Variant (15)..(15): Xaa in position 15 is any amino acid
TXXXGSXXLDXALGXGG

SEQ ID NO: 5807 - DNA, 1338 bp, Azotobacter vinelandii
  CDS (1)..(1338): transl_table=11
atgagcaaaaaatatttcggcaccgacggcatccgtgggcgagtaggcgagtatcccatcacgccggatttcatgctcaagctgggatgggctgccggaaaggcctttcgtcgccagggcatatgccgtgtgctggttggcaaggatacccgcatatccggctacatgttcgagtcggtgttggaggcggggctctccgccgctggtgccgatgtgttgctgctcgggcccatgccgacaccggccatcgcctatctgacgcggacctttcatgccgaggccggcattgtcatcagtgcttcgcacaatccgcattacgacaatggcatcaaattcttttccgggcagggaaccaagctgcccgacgaactggagctggtcatcgaggaactgctcgacaatccgatgacggtggtcgactcggcccaactgggcaaggtttcccgtatcaacgatgcggcaggccgttatatcgagttctgcaagagcagcgtgccgaccggtaccagcttcgccggtctcaagatggtcgtggactgcgctcatggtgccacctacaaggttgcccccaatgtgttccgcgagttgggggccgaggtggcggttctggcggcccagcccaacgggctgaacatcaatgaccgttgcggctccaccgatatcgtcgcgctgcaggccgaggtactcatgcagcgtgccgatctgggtgtcgccttcgacggcgatggcgaccgtgtgctgatggtcgatcacaccggagcggtggtagacggtgatgagttgctctttctcattgcgcgcgacatgcacgaacacggcaagttgcagggaggcgtcgtcggtaccctgatgagcaatctgggattggagctggctctgcaggatatggggattccattcgtgcgggccaaggtcggcgaccgctatgtcatggctgaactgctggcccgcaactggcaactgggcggcgaaggttccggacatatcgtctgctgccatcactcgacgacgggcgacggcatcatcgctgcgctgcaggtgctgagggccctgaagcaccgtggacaaaggcttgcggaggcgcgccagggaatgcgcaaatttccccaggtgctggtcaacgtgcgctatgcgggcgacaaggaccccgtcgggcatccggtcgtgcaggaggcttgcgagcgagtgaccgagcagatggccgggcgggggcgggtgttgctgcgcaaatcgggcaccgagcccttggttcgggtgatggtcgagggtgacgacgagagccaggtacggcttcatgctgataacttggcaaagattgtttcggatgtatgtgcttga

SEQ ID NO: 5808 - protein, 445 aa, Azotobacter vinelandii
MSKKYFGTDGIRGRVGEYPITPDFMLKLGWAAGKAFRRQGICRVLVGKDTRISGYMFESVLEAGLSAAGADVLLLGPMPTPAIAYLTRTFHAEAGIVISASHNPHYDNGIKFFSGQGTKLPDELELVIEELLDNPMTVVDSAQLGKVSRINDAAGRYIEFCKSSVPTGTSFAGLKMVVDCAHGATYKVAPNVFRELGAEVAVLAAQPNGLNINDRCGSTDIVALQAEVLMQRADLGVAFDGDGDRVLMVDHTGAVVDGDELLFLIARDMHEHGKLQGGVVGTLMSNLGLELALQDMGIPFVRAKVGDRYVMAELLARNWQLGGEGSGHIVCCHHSTTGDGIIAALQVLRALKHRGQRLAEARQGMRKFPQVLVNVRYAGDKDPVGHPVVQEACERVTEQMAGRGRVLLRKSGTEPLVRVMVEGDDESQVRLHADNLAKIVSDVCA

SEQ ID NO: 5809 - DNA, 1344 bp, Cupriavidus taiwanensis
  CDS (1)..(1344): transl_table=11
atgacacgcaagtatttcgggacagatggcgtgcggggcaaggtcggcgatgcgccgatcacgccggacttcgtgatgcggctgggccatgccgcgggcaaggtgctggcgcatggcgccaggaccgggcagggcaagcccaccgtgctgatcggcaaggacacgcgcatttccggctacatgctggaagccgcgctggaagccggttttacctcggctggcgtgcacgtgctgctgaccggcccgctgccgacccccggcatcgcttacctgacgcgggcgttgcggctgtcggccggcgtggtgatttcggccagccataatccgtactacgacaacggcatcaagttcttctcggccagcggcgacaagctgccggatgcggtcgaggcggcgatcgaagcggccctcgacgagcccatggtgtgcgccccgtccgacgacctgggacgcgcccgccgcatcgacgatgcggccggccgctatatcgaattctgcaagagcaccttcccgtacgagcaggacctgcatggcctgaagctggtggtcgactgcgcccatggcgcggcctatcacattgcgccgccggtgttccatgaactgggcgccgacgtggtcgccatcggcaaccagccaaatggccgcaatatcaacgccggctacggcgccaccgcgccggaaaagctgatcgaggcggtcaaggccaacggcgcggacctgggcctggccttcgacggcgacgcggaccggctgcaggtggtggacgcggatggccgcctctacaacggcgacgaactgctgtatctgatcgtgcgcgaccgccaggccgcaggccaggcggtgcccggtgccgtcggcacgctgatgaccaatatggcggtggaactggcgctcaagcgcgagggcgtcgacttcgtgcgcgccaaggtgggcgaccgctatgtgcttgaggagctgaacaagcgcaaatggaccctgggcggcgagggctcgggccatctgttgtgcctggatcgccacagcaccggcgacggcatcgtctccgcattgcaggtgctgggcgcactgcgccgcagtggcaagacgctggcgcagctgctcgacggcgtgaagctgttcccgcagacgctgatcaatgtgcgcgtgcagaagggtttcgactggcagacccatgccggcctgcaggcggcacgcgcggcggtggaacccgaactcgaaggccgcggtcgggtgctgatccgtgcctccggcaccgagcccgtggtgcgcgtgatggtcgaggcggagcaggccgagatggcagagcgcgcggccaggaagctggcggacgcgctgggtgcgtga

SEQ ID NO: 5810 - protein, 447 aa, Cupriavidus taiwanensis
MTRKYFGTDGVRGKVGDAPITPDFVMRLGHAAGKVLAHGARTGQGKPTVLIGKDTRISGYMLEAALEAGFTSAGVHVLLTGPLPTPGIAYLTRALRLSAGVVISASHNPYYDNGIKFFSASGDKLPDAVEAAIEAALDEPMVCAPSDDLGRARRIDDAAGRYIEFCKSTFPYEQDLHGLKLVVDCAHGAAYHIAPPVFHELGADVVAIGNQPNGRNINAGYGATAPEKLIEAVKANGADLGLAFDGDADRLQVVDADGRLYNGDELLYLIVRDRQAAGQAVPGAVGTLMTNMAVELALKREGVDFVRAKVGDRYVLEELNKRKWTLGGEGSGHLLCLDRHSTGDGIVSALQVLGALRRSGKTLAQLLDGVKLFPQTLINVRVQKGFDWQTHAGLQAARAAVEPELEGRGRVLIRASGTEPVVRVMVEAEQAEMAERAARKLADALGA

SEQ ID NO: 5811 - DNA, 1383 bp, Halobacterium sp. NRC-1
  CDS (1)..(1383): transl_table=11
atggacgacaccgacgacggtcgtgtcgagctgttcgggacggcaggaatcaggggggacgcggtcgagacggtcacgccacagctggccctggctgtcggcaccgccgccgcaaccaccgcgcccggcgacacgccggagttcgtcgtctcccgggacggccgcgaaaccggcccggcactgatcgccgcggtcactgcggggctggccgccggcggtgcgcgcgtgatccgcggcggcgtgttaccgaccccggcgctggcgtacgcgagccgggggcgacgcggcatccaggtgaccgccagccacaacccgccgtcggacaacggcatcaagctgtttgcggacggccgggagtacgacagcgacgccgagcgcgccatcgaaacgcgggtggcggctgacacggagtacgccgcgtgggcggagtggggcagcgcggagtcggcgacggtgcgccccgattaccgggcggccgtcgaggcgttcgcgcgcgaccacggcgcgcccctcgacgggaccacggtcgcggtggactgtggcaacggcgtcgctgcggtcgccaccccccacgtcctgcgggcgctcggcgcgcacgtcgtcacgctgaacgccaacgtcgacgggcatttccccgggcggccgagcaaaccaacgcccgagacggtcaccgaccttcgggagttcgtcgccaccggtgacgcggcgttcgggatcgcccacgacggcgacgccgaccgcatcgtcatcgtcgacggcgacggtgacatcgtccacgaggacaccatcgtcgcgatcctcgccgaccactacacgcggaccagcgacgccgccgatccggtcgtggtgaccacgccgaacgccagcggccgcatcgacgaccgggtcacggcggccggcggacgcgtcgagcgcgtccagttgggggcgctccacgagggcatcgccgcggcccgcgacgacggcggcgacgtcgtgttcgcggccgaaccctggaagcacatccacaccgcgttcggcggttggatcgacggcgtcgcgtccgccgcagtgctgtcgcggctggtcgccgacgccggcggtctcgcgccgctccgcgatccggtgacagagcgcccctaccggaaggtcagcgtcgactgcccggacgagaagaaagccgccgtgatggacgccgtcgcggaccggctgcccgacgcccacccggacgccgacgtggaaaccgagtacggcgtccggctcgcgttcgccgacggatcctgggcgctggtgcgccccagcgggaccgaaccgtacgtccgcgtgtacgccgagagcagcgacgtcgacgagctcgtcgacgccgttaccgacgtcgtggcgtcgaccgtcagcgacgtctga

SEQ ID NO: 5812 - protein, 460 aa, Halobacterium sp. NRC-1
MDDTDDGRVELFGTAGIRGDAVETVTPQLALAVGTAAATTAPGDTPEFVVSRDGRETGPALIAAVTAGLAAGGARVIRGGVLPTPALAYASRGRRGIQVTASHNPPSDNGIKLFADGREYDSDAERAIETRVAADTEYAAWAEWGSAESATVRPDYRAAVEAFARDHGAPLDGTTVAVDCGNGVAAVATPHVLRALGAHVVTLNANVDGHFPGRPSKPTPETVTDLREFVATGDAAFGIAHDGDADRIVIVDGDGDIVHEDTIVAILADHYTRTSDAADPVVVTTPNASGRIDDRVTAAGGRVERVQLGALHEGIAAARDDGGDVVFAAEPWKHIHTAFGGWIDGVASAAVLSRLVADAGGLAPLRDPVTERPYRKVSVDCPDEKKAAVMDAVADRLPDAHPDADVETEYGVRLAFADGSWALVRPSGTEPYVRVYAESSDVDELVDAVTDVVASTVSDV

SEQ ID NO: 5813 - DNA, 1485 bp, Nostoc sp. PCC 7120
  CDS (1)..(1485): transl_table=11
gtgtttaaaaatatggtttcatctataactcggattcagaactacgtaatagatggtgcagctacatccaatggattagaaacagtccttgagagcaactttgcacccagtttaatatccctaccagcaacacctctgtttggtacagatggtattcgtggcaaagtaggggaattactgagtgcgcctttagcgttgcaaattggtttttgggcaggcgtagttttacgtaatcatgctgatcaattagggccagtaatcttaggacaggattcccgtaactctagtgatatgttggcgatggctttgagtgcagggttaaccgcagccgggctagaagtttggtatttaggtttatgtcctactccttgcgtggcttatttaactagtatgagtgaagccattggcggcgtgatgatttctgctagtcataaccctcccgaagataacgggattaaaatttttggtgctaatggtggtaagttatcccaggctttacaggcagaaattgaaaaaggtctgcggggaaatctgccaattacaagtaatgtcagtaattgtggacggcattactcacgttgggaattggtgaagaattacggcgaagctttaaaacgaccctggcaaaataaagtgaatcttcagggaatgaaggttgtgctggatttagcttggggtgcagccgtgggattagcaccatcagtatttgcagagatgggggcagaagttatttccctgcataatgccgcagatggcgatcgcatcaacgttaactgcggctccacccacctagaaatgttgcaagcggctgtgcaagaacacaacgccgatttaggttttgcctttgatggcgatgccgatcgcgttttggctgtagatcccacaggtcgtcctgtaaatggcgactatatcctgtacctgtggggattgtacctcaaacaacaaaaccaactcccagacaacttgattgtttccacagtcatggcaaacctgggctttgagaaagcttggcagcaacagggtggtaaattaattcgcaccgccgttggcgatcaatatgtgcaagcagaaatgatcaaaactggggcaatgttgggaggtgaacaatcaggacacatcctgtgtagccattatggaatgactggggatggcttgttaacagccttacacttggcaagtttggtcaaacaatctggtgtttccttagccgaattgatagaccaaagcttccagacctatccccaattattgcggaacgtgcgagttgtagaccgcgatcgccgcctgagttggcaaaactgcacaccagtacaacaagcgatcgctcttgccgagaaagcaatgggtgatactggtagaattttagttcgggcatccggtacggaacccgtcatcagagtcatggtagaagccgccaacgccgaactagctaactattggacaaatgaactagtagcccaagtacaacaacacctagcgccataa

SEQ ID NO: 5814 - protein, 494 aa, Nostoc sp. PCC 7120
MFKNMVSSITRIQNYVIDGAATSNGLETVLESNFAPSLISLPATPLFGTDGIRGKVGELLSAPLALQIGFWAGVVLRNHADQLGPVILGQDSRNSSDMLAMALSAGLTAAGLEVWYLGLCPTPCVAYLTSMSEAIGGVMISASHNPPEDNGIKIFGANGGKLSQALQAEIEKGLRGNLPITSNVSNCGRHYSRWELVKNYGEALKRPWQNKVNLQGMKVVLDLAWGAAVGLAPSVFAEMGAEVISLHNAADGDRINVNCGSTHLEMLQAAVQEHNADLGFAFDGDADRVLAVDPTGRPVNGDYILYLWGLYLKQQNQLPDNLIVSTVMANLGFEKAWQQQGGKLIRTAVGDQYVQAEMIKTGAMLGGEQSGHILCSHYGMTGDGLLTALHLASLVKQSGVSLAELIDQSFQTYPQLLRNVRVVDRDRRLSWQNCTPVQQAIALAEKAMGDTGRILVRASGTEPVIRVMVEAANAELANYWTNELVAQVQQHLAP

SEQ ID NO: 5815 - DNA, 1428 bp, Brucella melitensis 16M
  CDS (1)..(1428): transl_table=11
gtgcgcctttgttccggcgcatattttgggaattacagagagcggttgatggctcaacgcaaggcgaaacagatgacacggaaattttttggaaccgatggcattcgcggacaggcaaacagctttccgatgacaccggaaatcgccatgaaagtgggtatggccgttggctatatcttccgtcgcaaaggtcaggcctctcgcgcggtgatcggcaaggatacacgccgctccggctatatgctggaaaatgcgctggtggccggttttaccgctgccggcatggacgtgttcctgctgggcccgatcccgacccctgccgtcgccatgctctgccgctcgctgcgcgctgatatcggggtgatgatttccgcgtcgcataatcccttctacgataacggcatcaagcttttcggccccgatggcttcaagctttcggaccagatcgagcttcagatcgaggcgatgatcgaaggcgatatgacgccttttcttgcgagccatggcgatgttggccgcgccaagcgcgtggacggcgatatttatcgctatatcgaatttgccaagcgcacattgccgcgcaacatctcgctcaatgggctgcgcgttgtggtcgattgcgcgaatggcgcgggttacaaggttgcgccggctgcgctgtgggaactgggcgcggaagtcattaccatcaacaacgagccgaatggcatcaatatcaacgaggattgcggctcgacgcatcccatcggccttatgaagaaagtgcatggggtgcgcgccgatgtgggtatcgcgctcgatggcgatgcggatcgtgtgcttctggtcgatgaaaacggcaccgtcatcgatggcgaccagctcatggctgtcatcgccgaaagctgggctgcgagcaatcgcctggaaggcggcggcattgtcgccactgtcatgtccaatctcggcctggagcgtttcttggccgaccgtaatctgacgcttgcccgtaccaaggttggcgaccgctatgtggtcgagcacatgcgcgagcatggtttcaatgtgggtggcgagcagtcgggccatatcgttctgtcggattttgcgacgactggcgacggtcttatctccgcgctccagatacttgccgtggcgcaggaacagaacaagccgatcagcgatgtatgccgcaaattccagccggtgccgcaattgttgaagaatgtccgcaccacaggcggcaaaccacttgaaaacaaacgcgtgaaatcagcgatcgatgaggccaaggaacgccttggcggtcaggggcgactggttatccgcccgtcgggcacggagccgctcatccgcgtcatggcggaaggtgacgaccgtggcctggtcgaaaaagtggtgaacgacatcattgatgtaatctcttcggaaagcagtgctgcggcctga

SEQ ID NO: 5816 - protein, 475 aa, Brucella melitensis 16M
MRLCSGAYFGNYRERLMAQRKAKQMTRKFFGTDGIRGQANSFPMTPEIAMKVGMAVGYIFRRKGQASRAVIGKDTRRSGYMLENALVAGFTAAGMDVFLLGPIPTPAVAMLCRSLRADIGVMISASHNPFYDNGIKLFGPDGFKLSDQIELQIEAMIEGDMTPFLASHGDVGRAKRVDGDIYRYIEFAKRTLPRNISLNGLRVVVDCANGAGYKVAPAALWELGAEVITINNEPNGININEDCGSTHPIGLMKKVHGVRADVGIALDGDADRVLLVDENGTVIDGDQLMAVIAESWAASNRLEGGGIVATVMSNLGLERFLADRNLTLARTKVGDRYVVEHMREHGFNVGGEQSGHIVLSDFATTGDGLISALQILAVAQEQNKPISDVCRKFQPVPQLLKNVRTTGGKPLENKRVKSAIDEAKERLGGQGRLVIRPSGTEPLIRVMAEGDDRGLVEKVVNDIIDVISSESSAAA

SEQ ID NO: 5817 - DNA, 1389 bp, Corynebacterium efficiens YS-314
  CDS (1)..(1389): transl_table=11
ttgtggtgtcgggcgggcgggcggtggacgtgcataatgttaggcatgactcgactttttggaaccgacggtgttcgtggtctggcgaacaagaccctcaccgcgcccctcgcactgaagctcggtgcagcagcagctcacgtcctcacagcaggtacccgcccccatggtcgccgcccggtggccatcgtcggccgtgacccccgtgtgtccggtgagatgctcgcggctgccctggccgccggcatggccagccgcggcgtggatgtgctgcgtgtcggtgtcatcccgaccccgggtgttgccttcctcaccgatgactacggcgccgacatgggtgtcatgatctccgcctcccacaaccccatgcccgacaatggcatcaagttcttctccgccggtggccacaaactccccgatgaggtcgaggatgagatcgagcgcgtgatggatgatctcccggaggagggccccaccgggcacggcatcggtcgtgtcatcgaggaggctccggatgcccggggccgctacctccagcacctggctgacgctgtccccacggatctctcgggtatcaccgtggtggtcgatgccgccaacggtgccgccagcgtgatcgcaccgcaggcctatgaggctgccggtgcgaaggtgattgccatccacaacacgccgaatgcctacaacatcaacgagaagtgtgggtccacccacatggaccagatccaggcggctgttctggaacacggtgcggatctcggcctggcccacgacggtgacgccgaccgctgcctcgcggtggacagcgacggcaatatcgtcgacggtgatcagatcatggcgatcctcgcgatcgcgatgaaggagaactccgagttgcgcaagaacaccctcgtggccacggtcatgtcgaacctgggtctgaaactggccatggaaaaggccgatatccagctgcgcaccaccaaggtcggtgaccgttatgtcctcgaggagctcaacgccggtggctttgcgctcggtggcgaacagtcgggtcatatcgtcctgccggatcacggcaccaccggtgacggcaccctcaccggcctgtcactcatggcgcgtatggcggccaccggcaagcccctgtccgagctggcggcggcgatgaccgtgctgccgcaggttctcatcaacgtgccggttgccgacaagtccagcatcatgaaaagcgccaacgtccaggccgccgtggccgctgccgaggaggaactcggtgggaccggtcgtgtgctgctgcgtccctccggcaccgaggagctcttccgcgtcatggtcgaggccgcggagcaggagcaggcccgtcgcgtcgccgggcgtctcgccgcggtggtcgccgaagcctag

SEQ ID NO: 5818 - protein, 462 aa, Corynebacterium efficiens YS-314
MWCRAGGRWTCIMLGMTRLFGTDGVRGLANKTLTAPLALKLGAAAAHVLTAGTRPHGRRPVAIVGRDPRVSGEMLAAALAAGMASRGVDVLRVGVIPTPGVAFLTDDYGADMGVMISASHNPMPDNGIKFFSAGGHKLPDEVEDEIERVMDDLPEEGPTGHGIGRVIEEAPDARGRYLQHLADAVPTDLSGITVVVDAANGAASVIAPQAYEAAGAKVIAIHNTPNAYNINEKCGSTHMDQIQAAVLEHGADLGLAHDGDADRCLAVDSDGNIVDGDQIMAILAIAMKENSELRKNTLVATVMSNLGLKLAMEKADIQLRTTKVGDRYVLEELNAGGFALGGEQSGHIVLPDHGTTGDGTLTGLSLMARMAATGKPLSELAAAMTVLPQVLINVPVADKSSIMKSANVQAAVAAAEEELGGTGRVLLRPSGTEELFRVMVEAAEQEQARRVAGRLAAVVAEA

SEQ ID NO: 5819 - DNA, 1356 bp, Bradyrhizobium japonicum USDA 110
  CDS (1)..(1356): transl_table=11
gtgggggacgatatgagccgcaaatatttcgggacggacgggattaggggccgcgccaacggactgatcacgccggagctcgcgctcaaggtcggccaggccgcgggccttgcgtttcagcgcggtgaccaccgccatcgggtcgtgatcggcaaggacacccgcctgtccggctacatgatcgaatatgcgatggtcgccggcttcacctcggtcggcatggacgtgctgctggtcggcccgatgccgacgccggcggttgcgatgctgaccaagtcgatgcgcgccgatctcggcgtgatgatctcggcctcgcacaatttgttcgaggacaacggcatcaagctgttcggtccgcagggcttcaagctctccgacgacgtcgagaagcagatcgagcagctgctcgacgagcccatcgacaagcggctggcgcagagcgcgagcctcggccgcgcccgccgtatcgacggcgtgcatgaccgctacatcgaattcgccaagcgcacgctgccgcgcgatctgtcactcgacgggctgcgcgtcgtcgtcgattgcgccaacggcgccgcctacaaggtggtgccggaagcgctgtgggagctgggcgccgacgtggtgccgatcggcgtcgagcccgatggcttcaacatcaacaaggattgcggctcgacttcgccggaagcgctgtcgaagaaggtgcgcgagatgcgcgccgacatcggcattgcgctggacggtgacgccgatcgcgtcatcctggtcgacgagcgcggccatgtcgtcgacggcgaccagctgctcgcggtgatcgcgcagagctggaaggaagacggccggctgtcgcggccgggcatcgtcgccaccgtgatgtccaatctcgggctcgagcgcttcctgaaagggcaggggctcgatctcgtgcgcacgccggtcggcgaccgctacgtgctcgagcagatgctgagcggcggctacaatctcggtggcgagcagtccggccatatcatcctgtccgactacgccaccaccggcgacggcttcgttgccgccttgcaggtgctggccgtggtgcagaagtcgcgccggccggtgtcggaagtctgccaccgcttcgatccgctgccgcagatcctcaagaacgtccggcacaaaggcggcaagccgctcgacgattccgacgtcaaatcggcgatctccgacggcgagaagcgcctcaacggccatggccgcctgctgatccgctcctccggcaccgaacccgtgatccgcgtcatgggcgaaggcgaggaccgcatcctggtcgaggacgtcgtcgacaccatcgtctcggcgctcggacaggcggcggcctga

SEQ ID NO: 5820 - protein, 451 aa, Bradyrhizobium japonicum USDA 110
MGDDMSRKYFGTDGIRGRANGLITPELALKVGQAAGLAFQRGDHRHRVVIGKDTRLSGYMIEYAMVAGFTSVGMDVLLVGPMPTPAVAMLTKSMRADLGVMISASHNLFEDNGIKLFGPQGFKLSDDVEKQIEQLLDEPIDKRLAQSASLGRARRIDGVHDRYIEFAKRTLPRDLSLDGLRVVVDCANGAAYKVVPEALWELGADVVPIGVEPDGFNINKDCGSTSPEALSKKVREMRADIGIALDGDADRVILVDERGHVVDGDQLLAVIAQSWKEDGRLSRPGIVATVMSNLGLERFLKGQGLDLVRTPVGDRYVLEQMLSGGYNLGGEQSGHIILSDYATTGDGFVAALQVLAVVQKSRRPVSEVCHRFDPLPQILKNVRHKGGKPLDDSDVKSAISDGEKRLNGHGRLLIRSSGTEPVIRVMGEGEDRILVEDVVDTIVSALGQAAA

SEQ ID NO: 5821 - DNA, 1368 bp, Lactobacillus johnsonii NCC 533
  CDS (1)..(1368): transl_table=11
ttgttaaaaattatgcttaaatattttggaacagatggtgtacggggggttgctaatgctggcttaactccagagatggcttttaaattaggtcgtgatggaggatacgttcttactaaggataaaaaggatggagaaagagctaaggtattagtttctcgtgatacacgtatttctggacaaatgttagagtatgcattgatttctggtttgctttccgtcggaattgaagttttagaagttggtgtaattactactcctggtctttcttacttagtacgtgcacaaggtgcagatgctggtgttcaaatttcagcttcacataatccagttgaagataatggaattaaattcttcggcagtgatggcttgaagctatctgatgctaaggaagaagaaattgaaaaattaattgatgcgcctgaagataaacttccacgtccttctgcagaaggtttaggaactgtaacaaattaccatgaaggtgcttctaagtacttacaatttattgaaaatactttaccagaagaattaagtggaattaaagttgttgtggatggcgctaatggtgctgctagtgctttgatttcaagattatttgctgatatgggggttgactttactaccattgcaactcatccagacggtttaaacattaatgatcatgtgggcgcaactcatactaagaaattacaagaagaagttgtaaaacaaggtgctcaattaggtttagcatttgatggggatgctgatcgttgtattgctgtcgatgaaaatgggaacgaagttgacggtgatcacattatgtacgttattggctcatatcttgctgatcatggtcgcttaaagaaagatacaattgttacaactgtaatgagtaaccttggttttacaaaggctttggaaagacgtggtcttaaaaatataagaacacaagttggtgaccgttatgtttcagaagaaatgagagctaatggttataatcttggtggagaacaatcaggtcacgttattattagcgactaccacaacacaggtgatgggatgcttacgggattacatttattatatgtaatgaaggataccggtaaatccctcagtgaattattgagtgactttaaagaatacccacaacgtttaattaatgttcctgttgaaaataaaaaagactggaaagaacataaacgcattactgaagccattgaaaaggttgaaaaagaattaagtgatgaaggacgtatttttgttcgtccatctggaactcaaagtttgcttcgtgtaatgactgaagctccaacacaagaattagctgacaagtactgtgaagaagttgctaaggttgttgaagaagaaatgggttcaaactaa

SEQ ID NO: 5822 - protein, 455 aa, Lactobacillus johnsonii NCC 533
MLKIMLKYFGTDGVRGVANAGLTPEMAFKLGRDGGYVLTKDKKDGERAKVLVSRDTRISGQMLEYALISGLLSVGIEVLEVGVITTPGLSYLVRAQGADAGVQISASHNPVEDNGIKFFGSDGLKLSDAKEEEIEKLIDAPEDKLPRPSAEGLGTVTNYHEGASKYLQFIENTLPEELSGIKVVVDGANGAASALISRLFADMGVDFTTIATHPDGLNINDHVGATHTKKLQEEVVKQGAQLGLAFDGDADRCIAVDENGNEVDGDHIMYVIGSYLADHGRLKKDTIVTTVMSNLGFTKALERRGLKNIRTQVGDRYVSEEMRANGYNLGGEQSGHVIISDYHNTGDGMLTGLHLLYVMKDTGKSLSELLSDFKEYPQRLINVPVENKKDWKEHKRITEAIEKVEKELSDEGRIFVRPSGTQSLLRVMTEAPTQELADKYCEEVAKVVEEEMGSN

SEQ ID NO: 5823 - DNA, 1407 bp, Clostridium difficile 630
  CDS (1)..(1407): transl_table=11
atgaactataaaaatataatacaaattacaagcttttcaattatgaaaggagaatctttagtgagaaagtattttggaacagatggagttagaggagtagcaaatacagaactaacatgtgatttagcatataaacttggtagagctggtggatttgtcttagctcaaggagaccacagagtaaaagtagtagtaggtaaggatactagaatatcaggtgatatgttggaagcatctttaatagcaggacttatgtctgttggatgtgatgttattactgttggaataataccaacacctgcagtggcatatttaactagaaaatatggtgctgattgtggtgtggttatatctgcatctcacaatcctgttgaatataatggaatcaaattctttaataagaatggatataaattagatgatgaaattgaattgaaaatagaagaatatatagacgatatagacaaaattgattgtcttccaattggtgaaaatgtaggaagaaaattacatgaacattgtgcacaaagagactatgtagactacctaaaatcaataataagcactgactttaagggattaaaagtagttttggactgtgctaatggtgcgtcatataaagtggcaccaatagtgtttgatgaactaggagcaagtgtaatttcaataaatagttcaccagatggaaataatataaactataaatgtggctctacacatccagaacaacttcaaagggctgttttggaacataatgctgacttaggtcttgcatatgatggagatgctgatagattaattgcagtaaatgaaaagggtcaaattgttgatggagaccatataatgatattgagtgccttaaatttaaagaaaaataataaattggcacaagatactttggtagttacagttatgagtaatatagggttgacaatagctgctaaggaaaatggaataaatttatctactacagcagttggagacagatatgttttagaagatatggttaaaaatggatataatcttggtggagagcaatctggacatatgatatttttagattacaacactactggagatggagtgcttagttctctaatacttgcaaatataatcttgcaagaaaagaaacctttatcagaaattgcatcaataatgagccaatacccacaagtattagtaaatgcaacaataaaaaatgaaaataagaacaaatatatggaatatccagaaataaaaactgagatagaaagaatagaatctattttagacggaaatggtagagttttgataagaccatcaggaactgagccattagttagagttatgttagagggtaaagaggaaggtcaaataaaagaattagcaacaaacttagctaatcttatacaagaaaaattatcgtaa

SEQ ID NO: 5824 - protein, 468 aa, Clostridium difficile 630
MNYKNIIQITSFSIMKGESLVRKYFGTDGVRGVANTELTCDLAYKLGRAGGFVLAQGDHRVKVVVGKDTRISGDMLEASLIAGLMSVGCDVITVGIIPTPAVAYLTRKYGADCGVVISASHNPVEYNGIKFFNKNGYKLDDEIELKIEEYIDDIDKIDCLPIGENVGRKLHEHCAQRDYVDYLKSIISTDFKGLKVVLDCANGASYKVAPIVFDELGASVISINSSPDGNNINYKCGSTHPEQLQRAVLEHNADLGLAYDGDADRLIAVNEKGQIVDGDHIMILSALNLKKNNKLAQDTLVVTVMSNIGLTIAAKENGINLSTTAVGDRYVLEDMVKNGYNLGGEQSGHMIFLDYNTTGDGVLSSLILANIILQEKKPLSEIASIMSQYPQVLVNATIKNENKNKYMEYPEIKTEIERIESILDGNGRVLIRPSGTEPLVRVMLEGKEEGQIKELATNLANLIQEKLS

SEQ ID NO: 5825 - DNA, 1293 bp, Dehalococcoides sp. BAV1
  CDS (1)..(1293): transl_table=11
atgggattattcggaacttccggcatccgccgcgtggtggatgaccgtttgatggaaatagctcttaaggtggggttttctgtagggaaacgctaccgtagagtagttttggcgggtgacagccgtacttctacaccggctatcaagcgtatactgagcggggctttggttgccgccggggcagatgtgattgacatcggattggtgccgacacctactttggcctttattgccagagattttgatacagggctgatggtgactgcttcgcacaatccggctgaatacaacggtattaagtttctcaatcctgacggctcggcttttagttatctgcagcagcaggaaataaccaaagatgtggaatcaagccgttctccctccctcaaatgggacagtttcggccagataaatgcttttccgtgtacagttgaaaaacatatggaacatatacttaactacctgccggacaaatgccgccttaaagtggtggtggattgcggcggcggggcagcatccgtgataaccccatggctgcttcagcgtatgggcagccgggtgatttccctgaatgatactacccatgggtttttccctcacccgcctgagccattggctgaaaaccttaccgggcttatccagacagttagggaaagtgatgccgatttgggtattgcccatgacggtgatgctgaccggatggtggcggtggataaacacggcaactttatctccggtgacaaaatgctggtggtttttgccagagcggccaaggcggataaagtggttaccactcttgacgcttccatgtcagtagaggagatgggttttaaagttatacgaacagctataggtgacaactacgtctcagaagagcttaagaggcagggtaatttcgggggtgaaccctgcggtgcatgggtcttccctgaaagctctctttgccctgacggtatttatgccgccgccagattgttaaatctggtttcacgccagcccttggcggaactgatttcagatataccggaatactccatgaagcgggggagtgtggccggtggtggtttgaatttgtctctggtagaggaatcacttcagtgcctgaatccgctttcatccagcttgctggacgggattaaactcaatcttaaagatggctggctgcttatccgcccttcgggtacagagcctaaaatccgcctgacggcagaagccaaaactcctgaacagtgcgaaactatttatcaaacaggtcttaagtgcctgaagagctgtctttcccgggagaaataa

SEQ ID NO: 5826 - protein, 430 aa, Dehalococcoides sp. BAV1
MGLFGTSGIRRVVDDRLMEIALKVGFSVGKRYRRVVLAGDSRTSTPAIKRILSGALVAAGADVIDIGLVPTPTLAFIARDFDTGLMVTASHNPAEYNGIKFLNPDGSAFSYLQQQEITKDVESSRSPSLKWDSFGQINAFPCTVEKHMEHILNYLPDKCRLKVVVDCGGGAASVITPWLLQRMGSRVISLNDTTHGFFPHPPEPLAENLTGLIQTVRESDADLGIAHDGDADRMVAVDKHGNFISGDKMLVVFARAAKADKVVTTLDASMSVEEMGFKVIRTAIGDNYVSEELKRQGNFGGEPCGAWVFPESSLCPDGIYAAARLLNLVSRQPLAELISDIPEYSMKRGSVAGGGLNLSLVEESLQCLNPLSSSLLDGIKLNLKDGWLLIRPSGTEPKIRLTAEAKTPEQCETIYQTGLKCLKSCLSREK

SEQ ID NO: 5827 - DNA, 1401 bp, Xanthobacter autotrophicus Py2
  CDS (1)..(1401): transl_table=11
atggcaggtaaacccctgtggaatcagtgctcgcgccagcgtggagcaagagggaacatgtcgcgcagatatttcggaacggacggtgtgcgcgggcgcgccaacgcaacgctgacggccgatctggcgcttcgggtcggcatggcggcggggctgatcttccagcggggcgaatatcgccaccgcgtggtcatcggcaaggacacccgcctgtccggctacatgatcgagaatgccctggtggccggcttcacttcggtgggcatggacgtgctgctgctcggcccggtgccgaccccggcggtgggcatgctcacccgctccatgcgcgccgacctcggcgtgatgatctccgcctcgcataatccgttcgacgacaacggcatcaagctgttcggccccgacggcttcaagctctccgacgaggtggagcgggagatcgaggagctgatcgacgaggacatagccaagcgcctcgccaagcccgccgagattggccgggccaagcggctggaaggcgtgcacgcccgctatatcgaatatgccaagcgcaccctgccccgcgaccagaccttcgacggtatccgcgtggtggtggattgcgccaatggcgccggctacaaggtcgccccggaagccctgtgggagctgggggcggacgtggtctccatcggcgtcgagcccgatggcatgaacatcaaccgcgacgtgggctccacctcgcccgccgccctctccgccaaggtgcgggaagtgcgcgccgacatcggcatcgccctcgacggcgacgccgaccgggtgatcatcgtggacgagaagggccacgtggtggacggcgaccagctgatggcggtggtggccgagagcttcaaggaagacggccgcctcgcccgcagcggtctggtggccaccgtcatgtccaatctgggcctggagcggcatctggcgggggagggcatctcgctcgcccgcaccgccgtgggcgaccgctatgtgctcgagcgcatgcgcgcggacggctacaatgtaggcggcgagcagtccggccacatcatcctgtcggactattccaccaccggggacggcctcgtggccgcgctgcaggttctcgccgtggtggcgcgccggggcaagccggtgtccgaggtgtgccatcgcttcgatccgctgccgcagatcctcaagaacgtgcgctatgccagcggccggccgctggaggacgagaaggtgaagatcgtgatcgccgatgcggagcgccgcctcgccaatcacggccgcctgctcatccgcccctcgggcaccgagccggtgatccgcgtgatgggcgaaggtgacgaccgcgacctggtggagaacgtggtcgatgatgtcatcgacgtgctccagaaggtggccgcctga

SEQ ID NO: 5828 - protein, 466 aa, Xanthobacter autotrophicus Py2
MAGKPLWNQCSRQRGARGNMSRRYFGTDGVRGRANATLTADLALRVGMAAGLIFQRGEYRHRVVIGKDTRLSGYMIENALVAGFTSVGMDVLLLGPVPTPAVGMLTRSMRADLGVMISASHNPFDDNGIKLFGPDGFKLSDEVEREIEELIDEDIAKRLAKPAEIGRAKRLEGVHARYIEYAKRTLPRDQTFDGIRVVVDCANGAGYKVAPEALWELGADVVSIGVEPDGMNINRDVGSTSPAALSAKVREVRADIGIALDGDADRVIIVDEKGHVVDGDQLMAVVAESFKEDGRLARSGLVATVMSNLGLERHLAGEGISLARTAVGDRYVLERMRADGYNVGGEQSGHIILSDYSTTGDGLVAALQVLAVVARRGKPVSEVCHRFDPLPQILKNVRYASGRPLEDEKVKIVIADAERRLANHGRLLIRPSGTEPVIRVMGEGDDRDLVENVVDDVIDVLQKVAA

SEQ ID NO: 5829 - DNA, 1329 bp, Desulfococcus oleovorans Hxd3
  CDS (1)..(1329): transl_table=11
gtgacggcgcggctttttggcaccgacggcattcgaggcgctgccaactcctggcccatgacaccggaaacagccatggccgtgggcagggccgtggcccggttcatgacggcagacggtcaatcccccccccggattctggtgggtaaagacacccggctttccggcgacatgctggaaagcgccctgtgcgctggtatctgcgcttcaggcgtggacgcaatccgcgtggatgtgcttcccaccccggcggtggcctaccttaccgccatgctgaaagccggcgccggcatcatggtgtcggcctctcacaacccctggaccgacaacggcatcaagattttttcccacaaagggcataagctttccccggttcaggaggccgagctggaggcgttgattctctccccggagccgatggcggccgccaatccaccggtgcccggccgggtctttcatctcatggatgccgaagaaccttatgtcgaatgcctgagcaacatcaccgcggtcggctccctctccctggtattagactgcgccaatggcgccgctgctcgtgtggccccccgtctttttcccgatgcccgcctgttgtctgctgatcccgacgggcggaacattaacgaaaactgcggttccgagcacacagaagcgcttcgggccgaggtggtgaaataccgtgccgatgccggatttgcctttgacggtgacgccgaccggctgatcgccgtggatgaaaccggggcgccggtcaccggggaccggattatcgccatctgcgccggtttcatgaaatccgagaacctgctgaaaaacaataccgtggtcagcaccgtcatgagcaacatcggcctgaaccgcgcgcttcgggatatggggatttatcacgtggtcaccgatgtgggggaccgccatgtgacggcggccatgctggaaaagggcgcctccctgggtggcgaggactcgggccacatcgttttttctgattaccagacaacaggtgacggcctgctcacggccctgatgctctgccggatcatgaaccataccggcaagcccctgtcggagctggccgcgtgcatggatgtttttccccaggtgctgatcaacgtgaaagtggcccgtaaaccggacctcgcctcggtgcctgaggtatggcaggtcgtcagggatgttgaggcccgtcttggccgggaggggcgggtactggtccgttattccggcacccagcccatgtgccgggtcatggtggaaggcccttcggaagacgaaacccggcaatgcgccgggcagattgccaaagcagttgtgcaggccctgggataa

SEQ ID NO: 5830 - protein, 442 aa, Desulfococcus oleovorans Hxd3
MTARLFGTDGIRGAANSWPMTPETAMAVGRAVARFMTADGQSPPRILVGKDTRLSGDMLESALCAGICASGVDAIRVDVLPTPAVAYLTAMLKAGAGIMVSASHNPWTDNGIKIFSHKGHKLSPVQEAELEALILSPEPMAAANPPVPGRVFHLMDAEEPYVECLSNITAVGSLSLVLDCANGAAARVAPRLFPDARLLSADPDGRNINENCGSEHTEALRAEVVKYRADAGFAFDGDADRLIAVDETGAPVTGDRIIAICAGFMKSENLLKNNTVVSTVMSNIGLNRALRDMGIYHVVTDVGDRHVTAAMLEKGASLGGEDSGHIVFSDYQTTGDGLLTALMLCRIMNHTGKPLSELAACMDVFPQVLINVKVARKPDLASVPEVWQVVRDVEARLGREGRVLVRYSGTQPMCRVMVEGPSEDETRQCAGQIAKAVVQALG

SEQ ID NO: 5831 - DNA, 1317 bp, Mycobacterium abscessus
  CDS (1)..(1317): transl_table=11
atgggtttgtttggcactgacggcgtacggggtgtcgcgaatgccgatctgacggcagagctcgcgatggccctcggcgccgccgccgcccggtccctcgggcgcgcgcacgccgtggccgtggtgggccgcgatccgcgtgccagcggcgagatgctcgaggccgctgttgtcgcgggtatcgcggccgaaggtgtcgacgtgcttcgggtcggtgtgctgcccaccccggcagtggcctatctgacgggcgcatacggcgcggccttcggtgtcatgatctcggcctcgcataaccccatgccggacaatgggatcaagatttttggcgtcggcggccacaaactcgatgacgatgccgaggcggccatcgaggcgcagctcgaggcactttcgatccgtccgacaggcgggggaatcggccgggtgcgcgacgctgtggacgccctcgatcggtacctgcatcatgtcgagaatgccggcactcacccgctgagcggggtgaccgtcgtggtcgattgcgcacacggtgcggcctccgatgccgcaccgctggcctaccgggcggcgggcgcccacgtggtcgatatcaacgccgaccccgacgggctcaacatcaacgacggctgtgggtcaacccatctcggtccactgcaggaggcggtccgcgcccacggtgcgcatctggggctcgcccacgacggtgatgcggatcgatgcctggccgtggacgctgacgggaacgtcatcgacggtgacgccatcatggtcgtgctggccgcggcgatggccgaggccggcgagctgaccgcgaacacgctggtcaccacggtgatgagcaatcagggcttgcacatcgccatgcgcgcagcgggtatcgacgtgaaggtgaccggagtcggcgaccggtatgtgctggaggagctgcgtgcgggccaattcgccctgggcggcgaacaatccggtcacatcgtgctgccctccctggccaccaccggcgacggcatcgtcactggcctgcgtctcatgtcgcgcatggcgcagacgggcaagtcgttggccgagctggcctctgccatgcgcagcctgccgcagacgctcatcaatgtgcccgtgtcgaacaagcacaccgtggcgcaggcgcccgaggtgctggccgctgtcgccgcggtggagtcagagttggccggtaatggccgaatcttgttgcggccctccggaaccgaacagcttgttcgtgtcatggtcgaagctgatgagcaatcaaccgcccagcgcctcgccgagcgggtggcccaagtggtgggtgcggtctaa

SEQ ID NO: 5832 - protein, 438 aa, Mycobacterium abscessus
MGLFGTDGVRGVANADLTAELAMALGAAAARSLGRAHAVAVVGRDPRASGEMLEAAVVAGIAAEGVDVLRVGVLPTPAVAYLTGAYGAAFGVMISASHNPMPDNGIKIFGVGGHKLDDDAEAAIEAQLEALSIRPTGGGIGRVRDAVDALDRYLHHVENAGTHPLSGVTVVVDCAHGAASDAAPLAYRAAGAHVVDINADPDGLNINDGCGSTHLGPLQEAVRAHGAHLGLAHDGDADRCLAVDADGNVIDGDAIMVVLAAAMAEAGELTANTLVTTVMSNQGLHIAMRAAGIDVKVTGVGDRYVLEELRAGQFALGGEQSGHIVLPSLATTGDGIVTGLRLMSRMAQTGKSLAELASAMRSLPQTLINVPVSNKHTVAQAPEVLAAVAAVESELAGNGRILLRPSGTEQLVRVMVEADEQSTAQRLAERVAQVVGAV

SEQ ID NO: 5833 - DNA, 1446 bp, Synechococcus sp. PCC 7002
  CDS (1)..(1446): transl_table=11
atgatgatcatgccagaggaaggacatcccctgagtcgtatgttggcgagctatccgccccaagccctacggtgtgatttacccgcaggttcattatttgggactgacgggattcggggtaaagcaggtgatctactcacggctccctttgcgctccaagttggctactgggctggacaagtgctccaggaaacagcggcacgacgcgcccccgtgatcattgggcaagattctcgcaactccagtgatatgttagcgatggcgatcgccgctggtttgaccgcctctggattagaagtgtggcatgtgggcctttgtccaacgccctgtgtttcctatctggcccgcaccacggacgccatcggcggcatcatgatttccgccagccacaacccccccgaagataatggcattaagttttttagtgacgctgggacgaaactcctcaaggatctcagtgccaagattgaagcgggtctgcgcggcgatcgcctagaaaatattctgtcgcaaaccaataactgtggttcctaccaacaccaaaaggaactgacccagcaataccggaatgcagtttttgcgacacttccccaaggtttatccctcgacggcctcaaaattgtgctcgatttggcctggggcgcttctgtgcatttggctcccgaacttttccaagccctcggtgcagaagtgattgccctgcaccaccaaccagacggcaacaaaattaacgtcaactgcggctctacccacatcgaccaactccaaggggcggtgcagttccacaacgcggatctcggctttgcctttgatggggacgccgaccgggtgattgctgtggataacacaggccggatcgttgatggggattacatcctctacctttgggggaaacaactccaggcagcgggccaactgccgaacaatttaattgtcggtaccgtaatggcaaatctgggctttgagcgggcctgggaaaaactgggaggacaacttcatcggactgccgttggcgatcagtatgtccaagcggccatgtggcagacgggggcgatgctcggtggcgaacaatcgggtcatattctttgccatcaccacagcgtttctggggacgggatccaaacggcattgcatttagcagccctcgtccgggaggcaggggttcccctcaatgagttaattgatcaaagtttccaaacctatccccagttcctgaaaaatgtgcgggtcgaagatcgcgatcgccgtttaaattggcagaactgcgacgtgcttcaaacagaaattgctaaagccgaagcagccatgggtgataaaggacgggtgctggtgcgagcttcggggacggaacctgtcattcgggtgatggtcgaggccgaggaacaatacctcgcggaatattggacgcaacacttggtcaatgtggtgcaaagccatttgggctag

SEQ ID NO: 5834 - protein, 481 aa, Synechococcus sp. PCC 7002
MMIMPEEGHPLSRMLASYPPQALRCDLPAGSLFGTDGIRGKAGDLLTAPFALQVGYWAGQVLQETAARRAPVIIGQDSRNSSDMLAMAIAAGLTASGLEVWHVGLCPTPCVSYLARTTDAIGGIMISASHNPPEDNGIKFFSDAGTKLLKDLSAKIEAGLRGDRLENILSQTNNCGSYQHQKELTQQYRNAVFATLPQGLSLDGLKIVLDLAWGASVHLAPELFQALGAEVIALHHQPDGNKINVNCGSTHIDQLQGAVQFHNADLGFAFDGDADRVIAVDNTGRIVDGDYILYLWGKQLQAAGQLPNNLIVGTVMANLGFERAWEKLGGQLHRTAVGDQYVQAAMWQTGAMLGGEQSGHILCHHHSVSGDGIQTALHLAALVREAGVPLNELIDQSFQTYPQFLKNVRVEDRDRRLNWQNCDVLQTEIAKAEAAMGDKGRVLVRASGTEPVIRVMVEAEEQYLAEYWTQHLVNVVQSHLG

SEQ ID NO: 5835 - DNA, 1284 bp, Thermotoga sp. RQ2
  CDS (1)..(1284): transl_table=11
gtgaaatacttcggaaccgacggaataaggggaatctttggtgaaacactcacagatgagctggccttcaaggtgggcaaagcgctgggagagattgtcggagaaggaagagtcattgtgggaaaggacacgagagtttcgggggattcgctcgaggcggctatttccgctggcctcacgtctatgggggtggacgtccttctgtgcggcatcattccaacaccagcggtggctctcctcacgaggatcaccaggtcgttcggtgttgtcatttcggcttctcacaatcctccagaatacaacggtataaaggtgttgaagggtggatacaagataccggacgagatggaagcggagatagaggagagactggaaaacgggagtttcccgccccgcttggttgtcggcaggacaaaatcgttcagagaaggaagagacatgtacatcggagcggttcttgaaatattcagggatctcgatctcacgggtgagatggtatcccttgaccttgcgaacggtgccaccacgacaacggccaaagaggtttttgaattccttggagcgaaggtagaggtgttcaatgactcccaggacggacttctcataaatcaagggtgtggcgccactcatcccaggtttttggctgaagagatgaagaacgggaaggtaggattcaccttcgatggtgatggagaccgtgtgatagctgtagacgaagaaagaaacgttgtgaacggagataggatcataggaatcctcgcagttgggttgaaagaagaggggcgtctaaacagcgataccgtggtgggtaccgttatgacgaatggaggcctcgaagattttctcaaagaaaaaggaataaagcttcttcgaacgaaagttggggacaaatacgtccttgaaaagatgctcgaaagtggagcgaatctgggaggagagagatccggtcacataataatcctcgacagaagcactacgggagatggtttgataaccgctttggagctgatgagagttctcaggcgatcaggaagaaatctttctgattttgcgaaggagataccagattatccgcagatcacaaagaacgtaaggagaacggagcgaatgtctctcgaaaatgagaatctgagaaagatcgttgaagagagcacttccaggggctaccgtgtggtgataagaccgtccggtacagagcccgttataagaatcacggttgaagggaaagacagagaggagatagaaaagatcgtggaggagatttcaagggttctcgagagttga

SEQ ID NO: 5836 - protein, 427 aa, Thermotoga sp. RQ2
MKYFGTDGIRGIFGETLTDELAFKVGKALGEIVGEGRVIVGKDTRVSGDSLEAAISAGLTSMGVDVLLCGIIPTPAVALLTRITRSFGVVISASHNPPEYNGIKVLKGGYKIPDEMEAEIEERLENGSFPPRLVVGRTKSFREGRDMYIGAVLEIFRDLDLTGEMVSLDLANGATTTTAKEVFEFLGAKVEVFNDSQDGLLINQGCGATHPRFLAEEMKNGKVGFTFDGDGDRVIAVDEERNVVNGDRIIGILAVGLKEEGRLNSDTVVGTVMTNGGLEDFLKEKGIKLLRTKVGDKYVLEKMLESGANLGGERSGHIIILDRSTTGDGLITALELMRVLRRSGRNLSDFAKEIPDYPQITKNVRRTERMSLENENLRKIVEESTSRGYRVVIRPSGTEPVIRITVEGKDREEIEKIVEEISRVLES

SEQ ID NO: 5837 - DNA, 1458 bp, Cyanothece sp. ATCC 51142
  CDS (1)..(1458): transl_table=11
atggttatctccctatcccccaatggcagtggtcgtttaaatcatcagacgactaacctgagtaatagtttattgacgacgttgccctatttgcccaacagtcccttatttggtaccgatggcattagaggcaaagcaggagagttattaactgccccttttgctttacaattgggattttgggcaggacaagtcttaaaatcaaaaacaacaacccccggcccagttatgattggtcaagattctcgtaattcgagtgatatgttagccatggccatggccgcaggactcacctcagccgggttggaagtttggcaattaggtttatgtcctaccccctgtgtcgcttatttgactcgtcacagtgaagcgatcgcagggatcatgatctctgctagtcataaccccccagaggacaacggcattaaattttttaacaccgatggcactaagttatcttcaagcttaggacaagaaattgaagacggtttacggggtaacttgttgttatcggtagatgaaatagctgcttggggcaaaattttatatgaaccaaccctagttaatacttattgtcagtttttacaagacagtttacccccttctttgagttgtcaagggatgaaaatcgttttagatttagcgtggggtgcatcggtgaatgtagcaccagctatgtttaaagcgttaggagcagaagtgatttgtctccatgagacggctaacggcgatcgcattaatgttaattgtgggtcaacccatctccatgtactacaagcagcgatccaagaacatcaagcagacatgggatttgctttcgatggggatgcggatcgggtaatggctgtagatagtaccggaaaggtagtagatggagattatatcctctacctctggggaaaatccctcttagagcgtggtaacttgcccaataacctcttgatcggcaccgttatggcgaatttagggtttgaacgggcttggcagggcttagggggtcaattggtgcggacttcggtgggcgatcgctatgttcagtcccaaatgtgggaaaccggggcgatgcttgggggcgaacagtcaggacatattatctgtcatcattacggggtgtcaggggacggtgtgcaaacggcgttacacttagctgctttggttcatgagtctggggtatccttagctgagttggttaaaaatagttttgatacttaccctcagattttgcggaatgtgcgtttagaggatcgggaaaaactccgttattggcaagaatgtcaacccctgcaacaagcgatcgcccaagcagaggtcgggatgggagagactgggcgtgtcttagttcgtgcttcggggacagagcctcttattcgggtaatggtagaatcagaatgtcctgatgctgctaattattgggttaactatttagtaggaattgtagaaacccatcttgctgtctag

SEQ ID NO: 5838 - protein, 485 aa, Cyanothece sp. ATCC 51142
MVISLSPNGSGRLNHQTTNLSNSLLTTLPYLPNSPLFGTDGIRGKAGELLTAPFALQLGFWAGQVLKSKTTTPGPVMIGQDSRNSSDMLAMAMAAGLTSAGLEVWQLGLCPTPCVAYLTRHSEAIAGIMISASHNPPEDNGIKFFNTDGTKLSSSLGQEIEDGLRGNLLLSVDEIAAWGKILYEPTLVNTYCQFLQDSLPPSLSCQGMKIVLDLAWGASVNVAPAMFKALGAEVICLHETANGDRINVNCGSTHLHVLQAAIQEHQADMGFAFDGDADRVMAVDSTGKVVDGDYILYLWGKSLLERGNLPNNLLIGTVMANLGFERAWQGLGGQLVRTSVGDRYVQSQMWETGAMLGGEQSGHIICHHYGVSGDGVQTALHLAALVHESGVSLAELVKNSFDTYPQILRNVRLEDREKLRYWQECQPLQQAIAQAEVGMGETGRVLVRASGTEPLIRVMVESECPDAANYWVNYLVGIVETHLAV

SEQ ID NO: 5839 - DNA, 1356 bp, Exiguobacterium sibiricum 255-15
  CDS (1)..(1356): transl_table=11
atgggtaagtattttggaactgacggcgtccgcggcgtcgcaaacgtagaattgacacctgaactggcatatcgtctcggtcggacaggcgggtatgtcttaacgaaacacgaaagcacacgtccgaaagtcttgatcggccgcgatacacgtgtctctggacaaatgcttgaaaatgccttgattgccggactcctgtcaatcggagcggaagtcatgcgtcttggtgtcatctcgacaccgggtgtcgcatacttgacgaagacgatggatgcgacagcaggcgtcatgatttcggcgtcacataatccggtcgaagacaacggaatcaaattcttcggatcagacggcttcaagctcgatgatgcaacagaacttgaaatcgaaggtttgcttgacgaagccgaagatacgttgccacgtccgtccggtaaagagcttggattcgtccacgattactatgaaggcgcacaaaagtaccttcacatgttacgtcagacatcagatgaagatttctctggtatccatgtcgccatcgacggcgcgcacggtgcaacatcaagcctcgcaccacgtctgttcggtgatctcgaagcggaagtctcgacaatcggaacgacaccaaacggtttgaacatcaacgaaggtgtcggctcgacgcaccctgaacatttagctgacttcgtccttgaaaaaggcgcagacgtcggtctgtcatttgacggcgacggcgaccgtttgattgcaatcgatgagaacggtaaaatcgtcgacggcgataaaatcatgttcatctgcggaaaatacctcaatgaaatcggccgcttaaaagacaatacgatcgttgcaacagtcatgagtaacctcggcttccacaagacggtcgcagaacacggcatgacagcattacagacagcagtcggtgaccgctatgtcgttgaagaaatgcgtaaaaacaactatacactcggcggggaacagtcgggtcatatcatcttcatggattactccacaacaggagacggaatgctgtcaggcgttcaacttctgcaaatcatgaaggcgacaggcaaaaagttgtcggaacttgcagccgaaatgccggtcttcccacaacgtctcgtcaatatccgcgtgtcggataaaaacggcgcgatgaacggtccggccgttcaagccatcattgccgaagtggaagcggaaatggccggcaacggtcggatcctcgtccgcgcgtcagggacagaaccacttgtccgtgtcatggcagaagcaccgacgcaagaagcatgtgacatgtatgtcgagcggattgcaaacgtcgtccgtgaaaactacgcgttacaagaaaattga

SEQ ID NO: 5840 - protein, 451 aa, Exiguobacterium sibiricum 255-15
MGKYFGTDGVRGVANVELTPELAYRLGRTGGYVLTKHESTRPKVLIGRDTRVSGQMLENALIAGLLSIGAEVMRLGVISTPGVAYLTKTMDATAGVMISASHNPVEDNGIKFFGSDGFKLDDATELEIEGLLDEAEDTLPRPSGKELGFVHDYYEGAQKYLHMLRQTSDEDFSGIHVAIDGAHGATSSLAPRLFGDLEAEVSTIGTTPNGLNINEGVGSTHPEHLADFVLEKGADVGLSFDGDGDRLIAIDENGKIVDGDKIMFICGKYLNEIGRLKDNTIVATVMSNLGFHKTVAEHGMTALQTAVGDRYVVEEMRKNNYTLGGEQSGHIIFMDYSTTGDGMLSGVQLLQIMKATGKKLSELAAEMPVFPQRLVNIRVSDKNGAMNGPAVQAIIAEVEAEMAGNGRILVRASGTEPLVRVMAEAPTQEACDMYVERIANVVRENYALQEN

SEQ ID NO: 5841 - DNA, 1338 bp, Mycobacterium marinum M
  CDS (1)..(1338): transl_table=11
atgggtcgactattcggcaccgacggagtgcgcggggtcgcgaatcgcgaattgaccgccgagttggccctggcccttggcgccgctaccgcgcagcacctggccagttcgaccggaccgggcaggcgagtagccgtggttggccgcgatccgcgagccagtggcgaaatgctcgaggccgccgtcatcgcgggcttgaccagtcaaggtgtcgacgccctgcgcgtcggggtgcttcccactcccgccgtggcctacctgaccggtgcctatgacgccgatttcggggtgatgatctcggcgtcgcacaacccgatgcccgacaacggcatcaagatcttcggtccgggcggacacaaactcgacgacgctaccgaggaccggatcgaaagtctggttgcggccggacccgggttgcgaccggttggctcggagatcggccgcgtgatcgacgccgaggacgccgccgaccgctatctgcggcatgtgagcaaggcctgcaccacgcgactcgatgggttgaccgtcgtggtcgattgcgcccacggcgccgcctcggaagtggggccgcgcgcctatcgggccgccggagcccgggtcatcgagatcaacgccgaccccaacgggttgaacatcaacgacgactgcggatcgacccacctggaggcgattcgcgcggcggtgcttgcccacggcgccgacctgggtgtggcccacgacggagatgccgaccgctgcctggccgtcgacgccaacggtgacctcgttgacggggacgccatcatggtggtcctcgctttggcgatgcaggaggcgggcgaattggcctccgacacgttggtgaccacggtgatgagcaacctcggtctgcacctggccatgcgcgaggccggcgtgaacgtgcgcaccaccggcgtcggggaccgctatgtgctcgaggaattgcgcgccggggactacagcctcggtggtgagcagtccggccacatcgtgatgccgggactcggttcgaccggtgacggcatcgtcaccggattgcgtttgatgacgcgcatggtggcgaccggcgcctcgctggccgctctggcatcgcggatgcaaacgttgccgcaggtgctgatcaacgtccaggtcaccgacaaggcggccgcggccgcggcaccttcggttcaggcggcggtagaccgggccgaaaccgagctgggtgacaccggccgcatcttgcttcggccctctggaaccgagccgctgatccgggtgatggtcgaggcggccgacgaggaagccgcgcatcggttggccaccagcgtcgccgacgcggtcagtgccgcgggctag

SEQ ID NO: 5842 - protein, 445 aa, Mycobacterium marinum M
MGRLFGTDGVRGVANRELTAELALALGAATAQHLASSTGPGRRVAVVGRDPRASGEMLEAAVIAGLTSQGVDALRVGVLPTPAVAYLTGAYDADFGVMISASHNPMPDNGIKIFGPGGHKLDDATEDRIESLVAAGPGLRPVGSEIGRVIDAEDAADRYLRHVSKACTTRLDGLTVVVDCAHGAASEVGPRAYRAAGARVIEINADPNGLNINDDCGSTHLEAIRAAVLAHGADLGVAHDGDADRCLAVDANGDLVDGDAIMVVLALAMQEAGELASDTLVTTVMSNLGLHLAMREAGVNVRTTGVGDRYVLEELRAGDYSLGGEQSGHIVMPGLGSTGDGIVTGLRLMTRMVATGASLAALASRMQTLPQVLINVQVTDKAAAAAAPSVQAAVDRAETELGDTGRILLRPSGTEPLIRVMVEAADEEAAHRLATSVADAVSAAG

SEQ ID NO: 5843 - DNA, 1473 bp, Nostoc punctiforme PCC 73102
  CDS (1)..(1473): transl_table=11
atggtttcatctataactcggataccaggcattcctggagattctccttccgaagctgaaggattgggtaaagggatcgaaagcagttttggactgaatttaatcccactaccggcaaatcctttatttggtaccgatgggattcgcgggcgagtcggagaattgctgagtgcgcccttagcattacaagttggtttttggacggggattgttttacgtaaccatgctactcaaataggaccagtcattctcggacaggactctagaaactccagcgatatgctagcaatggctttgagtgcagggttaacagcagcaggattagaagtttggtatttgggattatgtcccactccttgcattgcctatctcaccagcatcagtgatgcgatcggtggagtgatgatttctgccagccacaatcctccagaggataatggaattaaggtttttggtgcaaatggtggaaagctaccgcaaatattacaggcagaaatagaagcgggactgcgtgggaaaatatcacctattgctaaagttagcaattgcggacggcattactcacgttttgagttagtggggcattatggcgacgcgttaaaaaaacccttaaacagtaccctcaatcttcagggaatgaagattgttttagacttggcgtggggtgcagcagtcggattagcaccgtcagtatttacagaaatgggggcagaggtaatctgcttgcataacgaagcagatggtgatcgcattaatgttaactgcggttccactcatttagatattcttgccgctacagtccaagaacacaacgccgacatcggctttgccttcgatggcgatgccgatcgcgtcttagcagtagacaatactggcaggcaagtgaacggcgattacattctctacctgtggggacggcatttacaaaaaaaccaacaactaccagacaacctgattgtatctacagtcatggccaacttgggctttgaaaaagcttggcaacaaattggtggtaaattaattcgtaccgccgtcggcgatcaatacgtacaagccgaaatgcagcgaactgggggaatgttaggcggcgaacaatcaggtcatattctttgccgtcattatgctgtaactggagatggcttattaacagccttgcatatggcagctttggtgaaagaagcgggtgtttctctagcagaattagtagatcaaagcttccagacatatccgcaaatattgcggaacgtgcgagttacagaccgcgatcgccgtttggggtggcaagattgcgaaccggtgcaacaagcgatcgcccttgctgaagcggcaatgggtgattctggtagaatcttggttcgcgcctctggtacagaaccagtaatcagagttatggtagaagccgccaatgccgaacttaccaactactggacaaatgaattagtttcaaaagtccagcaacacctgatggactaa

SEQ ID NO: 5844 - protein, 490 aa, Nostoc punctiforme PCC 73102
MVSSITRIPGIPGDSPSEAEGLGKGIESSFGLNLIPLPANPLFGTDGIRGRVGELLSAPLALQVGFWTGIVLRNHATQIGPVILGQDSRNSSDMLAMALSAGLTAAGLEVWYLGLCPTPCIAYLTSISDAIGGVMISASHNPPEDNGIKVFGANGGKLPQILQAEIEAGLRGKISPIAKVSNCGRHYSRFELVGHYGDALKKPLNSTLNLQGMKIVLDLAWGAAVGLAPSVFTEMGAEVICLHNEADGDRINVNCGSTHLDILAATVQEHNADIGFAFDGDADRVLAVDNTGRQVNGDYILYLWGRHLQKNQQLPDNLIVSTVMANLGFEKAWQQIGGKLIRTAVGDQYVQAEMQRTGGMLGGEQSGHILCRHYAVTGDGLLTALHMAALVKEAGVSLAELVDQSFQTYPQILRNVRVTDRDRRLGWQDCEPVQQAIALAEAAMGDSGRILVRASGTEPVIRVMVEAANAELTNYWTNELVSKVQQHLMD

SEQ ID NO: 5845 - DNA, 1464 bp, Candidatus Protochlamydia amoebophila UWE25
  CDS (1)..(1464): transl_table=11
ttgcttatacataaaaaaaaaggtatttttactgaggattttatagataaatttattaatagaataataatttttagattaggtggaagagtggagttaaaaagaccattcaaaatatttggtacggatggaattagagggcgagcaaataaaagtcccatggttccagaaattgccctagcattaggtcgagcagcgggacaattattaagtcgtttaggtaaatctcgggtagttattggtaaagatacgcgtctgtcctgttatgtttttgaaaatgccttgattgctgggctttgttcgatgggggtagatactttaatggttggtcctttacctacaccaggcgtggcttttattacacgtgcttatcgtgccgacgcaggaattgtaatttctgcttctcataatccttattacgacaatgggattaaattatttgattcacaaggatttaagttgcctgattcgtgggaagctgaaatggaagcaatgatagcaaaaaatcatttcgatgaagaactccctgctgatgatgatattggcaaaaacacaaaaattattgatgcggatggacgttatatcgagtttgtgaaggcaacattcccaagaaaaatttcactgaaaaatttaaaaatcgttttggattgtgcgaacggagccggatataaagtagcacctctggtatttaaagaattagatgctacagtatttacttgtggagtgactccaaatggcttgaatatcaatagccagtgtggatctatgcatcctgaaaccgctcaaaaggctgtgattgataatcgagctgatgtaggaattgctttggatggtgatgcagatcgagttgtgatgattgatgaaaatgctcaaattgttgatggagataccatgttagcgatttgtgcccgcgatatgtttaagcaaaagctgctaaaaaataatcgtgtcgtcggaacagtcatgagtaatctgggttttattaaagctatggaatgtttgggtgttgaagtaatcaaatctcaggtgggagatcgctacgtcattcaagatatgctcaaatacgatgctaacttaggtggagaacaaagtggtcatgtcatttttttagatcacaatacaactggcgatgggcttgtttgcgctcttcaagtattgcgtattatgatcgaaacagattctaagttatctgatttggcgtcatttgtgcaacgctacccacaaacatgtttaaatattaaggtgtcttctaaaccctctttagattccatcgaacgattgaaggaagtgatagcacaagtggaagaaattcttggaaattcaggcagagttttagttcgttattcgggaacagaaaatacttgtcgagtgatggttgaaggaccaaaatataaacaagtcattcaattggcaaatcaaattgctgacattgtgcaagaagaaattggattgtcagtttcataa

SEQ ID NO: 5846 - protein, 487 aa, Candidatus Protochlamydia amoebophila UWE25
MLIHKKKGIFTEDFIDKFINRIIIFRLGGRVELKRPFKIFGTDGIRGRANKSPMVPEIALALGRAAGQLLSRLGKSRVVIGKDTRLSCYVFENALIAGLCSMGVDTLMVGPLPTPGVAFITRAYRADAGIVISASHNPYYDNGIKLFDSQGFKLPDSWEAEMEAMIAKNHFDEELPADDDIGKNTKIIDADGRYIEFVKATFPRKISLKNLKIVLDCANGAGYKVAPLVFKELDATVFTCGVTPNGLNINSQCGSMHPETAQKAVIDNRADVGIALDGDADRVVMIDENAQIVDGDTMLAICARDMFKQKLLKNNRVVGTVMSNLGFIKAMECLGVEVIKSQVGDRYVIQDMLKYDANLGGEQSGHVIFLDHNTTGDGLVCALQVLRIMIETDSKLSDLASFVQRYPQTCLNIKVSSKPSLDSIERLKEVIAQVEEILGNSGRVLVRYSGTENTCRVMVEGPKYKQVIQLANQIADIVQEEIGLSVS

SEQ ID NO: 5847 - DNA, 1371 bp, Bacillus licheniformis ATCC 14580
  CDS (1)..(1371): transl_table=11
atgaatcaaaaaggagcgatattaatgggcaagtattttggtacagacggtgtaagaggcgtggcaaacagtgaacttacacctgagctggcctttaaagtcggacgctttggcggatatgtcctaacaaaagataaggagcgtcccaaggttctgatcggccgtgacacgcgcatttcagggcatatgctggaaggggcccttgtagcaggccttctttcgataggagcagaagtcatgcgtctcggcgtgatttcgacgcccggagtcgcatatttgacgaaggctatggacgcggaggcgggtgtgatgatttccgcttcccacaaccctgtccaggacaacggaattaagtttttcggcggcgacggctttaagctttccgatgaacaggagcttgaaatcgagcgtctgatggatcagccggaagatcacctgccaaggcctgtaggcgctgatctgggcatggtgaacgactactttgaaggcggacagaaatatttgcagtttcttaagcagtctgctgatgaagacttcacaggcattcatgtcgcgcttgactgtgcgcacggggcgacatcttcgctggcgacccacctgtttgccgatcttgacgcagatgtatcgacgatggggacttctccgaacggattaaacatcaatgacggagtcggatcaacccaccctgaagccctggcagaatttgtgaaggaaaagggagctgacgtcggcatggcgtttgacggggatggcgaccgcttaatcgctgtcgacgaaaaagggaatatcgtagacggcgatcaaatcatgtacatatgcgcgaagtacttgaagagcgaggggcgcctgacggacaataccgttgtctccacggtgatgagcaacctcggtttctacaaagcgcttgaagcggaaggcattaaaagcgttcagacagcggtcggcgaccgctatgtagtggaggcgatgaaaaagggcggatttaccctcggcggagaacagtcgggacacctgattttccttgattacaatacgacaggcgacggactgctttctgcgatcatgctgatgaacacgattaaaatgacaggcaagccgctgtctgagcttgcggcagagatgcagaagtttccgcagctcctcttgaatgtgaaagtaaccgataaacataaagtaacggaaaacgaaaaggtaaaagcggtcatcgaagaagttgagaaggaaatgaacggtgacggccgcatccttgtgcgcccatccggcaccgagccgcttgtccgtgtcatggctgaagcgaaaacgaaggagctttgcgagaagtacgtaggccgcattgcagatgtcgtgaaagctgaaatgggagcagagtaa

SEQ ID NO: 5848 - protein, 456 aa, Bacillus licheniformis ATCC 14580
MNQKGAILMGKYFGTDGVRGVANSELTPELAFKVGRFGGYVLTKDKERPKVLIGRDTRISGHMLEGALVAGLLSIGAEVMRLGVISTPGVAYLTKAMDAEAGVMISASHNPVQDNGIKFFGGDGFKLSDEQELEIERLMDQPEDHLPRPVGADLGMVNDYFEGGQKYLQFLKQSADEDFTGIHVALDCAHGATSSLATHLFADLDADVSTMGTSPNGLNINDGVGSTHPEALAEFVKEKGADVGMAFDGDGDRLIAVDEKGNIVDGDQIMYICAKYLKSEGRLTDNTVVSTVMSNLGFYKALEAEGIKSVQTAVGDRYVVEAMKKGGFTLGGEQSGHLIFLDYNTTGDGLLSAIMLMNTIKMTGKPLSELAAEMQKFPQLLLNVKVTDKHKVTENEKVKAVIEEVEKEMNGDGRILVRPSGTEPLVRVMAEAKTKELCEKYVGRIADVVKAEMGAE

SEQ ID NO: 5849 - DNA, 1347 bp, Methanococcoides burtonii DSM 6242
  CDS (1)..(1347): transl_table=11
atgggtttttttggaactaatggagtaagagggatcgctaacgaatatatcacaccacagctcgcgatagatgtcgcaaagagccttgggacatatatgggttcaaagggtacagtcgtcatcggaagagatacccgcaaatcaggagacatgctaaaatcggctgctatcgccggtgcattgtccacaggagttactgtaattgatatcggaatagcaccgataccggccatccagtattatgtaaaagaacatgccgatgcaggtattggcgtcactgcatcacacaatccaagagagtacaacggaattaaactggttgccggagacggaagcgagttctcaagggaaggagagaaagaggtcgaaaagatatacatgtcaaaggatttcgcagcagccagctgggaaaggacgggcgacctcttcaaagatacaaacgcaaatgaacaatatatcaatgccatcatcaattccgtggatgcggaaagcatacgtgaaaagcgcttcaaggtagtggtggataccggttgcggtgccggctctttgacgttgcctttcctgctccagaaacttggatgtaaggtaatggcactcaacgcccagatagacggaacgttcccatggcgcaatccggaacctaccgaagatgttctgaccgagctttctgatattgtgaaaagcaggggtgcggacatgggtgttgcccaggatggagatgcagacagggcagtgttctttgacgagaacgggaatttcatcgatgaagatgtccttctggcaatgatggcaaagtgcatcctcgaagacaagaaaggagacttggtcacgcctgtcagctcatcacagcgtatgctggatgtggcagaggaagcaggagttaaacttcactggacggctgtcggttccatcaatgtcgcaagaaagatgatggaaataggtgcagtgttcggaggagagggtaacggaggacttattttcccggaacaccaatattgccgcgatggagccatggcatgtgcaaaacttcttgagataatggcatctggcaggaagctttcacaccttgcagagaacgtaccgacctatttcaattcaaagacaaaggttcattgcagtgacctggaacccacgatggagaatataaaagaaagtgttgtaggaggagaactggaggtagatactaccgatggtgtaaagatatggcacaacgacggctgggtgcttatacgcccatcaggaactgaacctatcataaggatatttgcagaagcaaagacactggacagagctgagacccttatggaagaaggtgtaaagctggcagacaattgcatgcagaaataa

SEQ ID NO: 5850 - protein, 448 aa, Methanococcoides burtonii DSM 6242
MGFFGTNGVRGIANEYITPQLAIDVAKSLGTYMGSKGTVVIGRDTRKSGDMLKSAAIAGALSTGVTVIDIGIAPIPAIQYYVKEHADAGIGVTASHNPREYNGIKLVAGDGSEFSREGEKEVEKIYMSKDFAAASWERTGDLFKDTNANEQYINAIINSVDAESIREKRFKVVVDTGCGAGSLTLPFLLQKLGCKVMALNAQIDGTFPWRNPEPTEDVLTELSDIVKSRGADMGVAQDGDADRAVFFDENGNFIDEDVLLAMMAKCILEDKKGDLVTPVSSSQRMLDVAEEAGVKLHWTAVGSINVARKMMEIGAVFGGEGNGGLIFPEHQYCRDGAMACAKLLEIMASGRKLSHLAENVPTYFNSKTKVHCSDLEPTMENIKESVVGGELEVDTTDGVKIWHNDGWVLIRPSGTEPIIRIFAEAKTLDRAETLMEEGVKLADNCMQK

SEQ ID NO: 5851 - DNA, 1398 bp, Mesorhizobium sp. BNC1
  CDS (1)..(1398): transl_table=11
ttgcgagcaaatcctagatcggtacggatgaagaaaagcaatatgtcgaaacagtatttcgggacggatgggatccggggacgggcgaatcgttttcccatgaccgcggaggtggcaatgcgcgttggcatggctgccgggctgtcctttcagaatggcagccaccggcaccgcgtcgtgctgggcaaggacacgcgcctttcgggctacatgatcgaaaatgccatggtcgcgggtttttgcgcggcgggcatggacgtgttccttcttggtcctatccccactcccgccgttgccatgctggtgcgctcgctgcgcgccgatatcggggtgatgatctccgcctcgcacaacccctatcacgacaacggcatcaagctcttcgggccggacggctacaagctctcggatgaaatcgagaaccgcatcgaggcgatgctggaccgggatgtggaactggcgctggcggattcggaaagccttggccgtgccaagcgcgtcgacggggttcacgaccgctatatcgaatttgccaagcgcacgctgccgcgcgacatgtcgctctcgggcctgcgtgtggttatcgactgtgccaatggtgcggcctacaaagtggcaccggctgccctatgggagcttggagccgaggtggtgccgatttacgtcgaccccaatggcttcaacgtcaacgaggaatgcggttcgacccacccgatgagccttgcgaagaaggtgcacgaggtgcgcgccgatatcggcattgcgcttgacggcgatgcggaccgcgttgtcatcgtggatgaaaatggcacgatcatcgatggcgatcagatcatggcgctcatcgcggaatcctggcacgagaacgaaaagctcataggcggtggaatcgtggccacggtcatgtccaacctgggtcttgagcgcttccttcgcggccgggggctcgagctccatcgcaccaaggtcggcgaccgttatgtggttgaacatatgcgtgagcatggcctcaatatcggcggcgaacagtcgggccatgtcgtcctctcggatttttccacctccggtgacgggcttgtcacggctctgcaggtgctcgcccacataaagcggctgaacaagccagcgagcgaggtctgccggaaattcgagccggtgccgcaggtcttgaagaatgtgcgcatcagcggcggcaagccgcttgaagccgcctccgtcaaggccgcgatcgcggatgcgcaggcgcaactcggcgataccggacggctcgtgattcggccctcgggtaccgagccgctgattcgcgtcatggccgagggtgacgatccggaactggtcaggaagatggtggacagcatcgtcgatgccatcgccgacgccaggacggcggcggcgtaa

SEQ ID NO: 5852 - protein, 465 aa, Mesorhizobium sp. BNC1
MRANPRSVRMKKSNMSKQYFGTDGIRGRANRFPMTAEVAMRVGMAAGLSFQNGSHRHRVVLGKDTRLSGYMIENAMVAGFCAAGMDVFLLGPIPTPAVAMLVRSLRADIGVMISASHNPYHDNGIKLFGPDGYKLSDEIENRIEAMLDRDVELALADSESLGRAKRVDGVHDRYIEFAKRTLPRDMSLSGLRVVIDCANGAAYKVAPAALWELGAEVVPIYVDPNGFNVNEECGSTHPMSLAKKVHEVRADIGIALDGDADRVVIVDENGTIIDGDQIMALIAESWHENEKLIGGGIVATVMSNLGLERFLRGRGLELHRTKVGDRYVVEHMREHGLNIGGEQSGHVVLSDFSTSGDGLVTALQVLAHIKRLNKPASEVCRKFEPVPQVLKNVRISGGKPLEAASVKAAIADAQAQLGDTGRLVIRPSGTEPLIRVMAEGDDPELVRKMVDSIVDAIADARTAAA

SEQ ID NO: 5853 - DNA, 1401 bp, Mycobacterium sp. KMS
  CDS (1)..(1401): transl_table=11
atgcgggcggtgtgctgtccggcagttggctccgcgggcgccatgtgtgagaagtttgtcggcatggctcgactgttcggcaccgacggcgtgcgcggggtcgccaaccgcgacctgaccgctgagctcgccttggcgctcggctcggcggccgcgcgccggctgagcaccgccggacatgcccggcgccgagtcgccgtcgtgggtcgcgatccccgcgccagcggcgagatgctggaggcggcggtgatcgccgggctgaccagcgaaggcgtcgacgccctgcgcgtcggtgtgctccccaccccggcagtggcctatctgaccagcgcctacgacgccgacttcggcgtgatgatctcggcgtcgcacaacccgatgcccgacaacggcatcaagatcttcggccccggcgggcacaaactcgacgacgccaccgaggaccgcatcgccgaactcgtgcagcaggggccgggggagcgcccggtcggcgcgggaatcggccgcgtggtggacgcccccgacgccctcgaccgctatctgcggcatgtcggcaaggccgtgacgacccgcctcgacgcgctgaccgtcgtggtcgactgcgcccacggcgccgcgtcggcggccgcaccgctggcctaccgtgccgccggtgccaacgtgctgaccatcaacgccgatcccaacgggctcaacatcaacgacggctgcgggtcgacccacatggagaccctgcaggccgccgtggtgtcctacggcgccgatctgggtctggcccacgacggtgacgccgaccggtgcctggccgtcgacgccaacggacgcgtgatcgacggtgacgcgatcatggtggtgctcgcgctggccatgcgcgagtccggggagttggcctccgacaccctggtcgcgacggtgatgagcaatctcggtctgcatctggcgatgcgggacgcgggcatcgaggtgcgcaccaccagcgtcggcgaccggtacgtgctcgaggagttgcgggccgggtcgtactcactgggcggcgaacagtccggtcacatcgtcatgccctcgatgggcaccaccggtgacggcatcctcaccggtctgcggttgatgtcgcggatggcccagacgcgtaaatccctggcggcgctggccgaaccgatgcacacgttgccgcaggtgctgatcaacgtccaggtcgccgacaagacgactgtcgcacaagcgccatcggtgcagagcgcggtcgccgaggccgaggcggcgctcggggacaccgggcgaatcctgttgcggccctcgggcaccgagcaggtggtccgggtgatggtcgaggcggccgacgaggacacggcccgccagctggcggtccgggtcgcggaatcggtgagcgaacagcgctga

SEQ ID NO: 5854 - protein, 466 aa, Mycobacterium sp. KMS
MRAVCCPAVGSAGAMCEKFVGMARLFGTDGVRGVANRDLTAELALALGSAAARRLSTAGHARRRVAVVGRDPRASGEMLEAAVIAGLTSEGVDALRVGVLPTPAVAYLTSAYDADFGVMISASHNPMPDNGIKIFGPGGHKLDDATEDRIAELVQQGPGERPVGAGIGRVVDAPDALDRYLRHVGKAVTTRLDALTVVVDCAHGAASAAAPLAYRAAGANVLTINADPNGLNINDGCGSTHMETLQAAVVSYGADLGLAHDGDADRCLAVDANGRVIDGDAIMVVLALAMRESGELASDTLVATVMSNLGLHLAMRDAGIEVRTTSVGDRYVLEELRAGSYSLGGEQSGHIVMPSMGTTGDGILTGLRLMSRMAQTRKSLAALAEPMHTLPQVLINVQVADKTTVAQAPSVQSAVAEAEAALGDTGRILLRPSGTEQVVRVMVEAADEDTARQLAVRVAESVSEQR

SEQ ID NO: 5855 - DNA, 1356 bp, Magnetospirillum magnetotacticum MS-1
  CDS (1)..(1356): transl_table=11
atgacgcgcaagctgttcggcaccgacgggatcagaggcaccgccaataccgaccccatgacggccgagatggccatgaaactgggcatggcggcgggcaggcactttacccgcggcgagcatcgtcatgtggtggtgatcggcaaggatacccgtctgtcgggctatctgatcgaaccggccctgacggcgggtttcatctcggtgggcatggatgtggtgctgctgggcccgctgcccacccctgcggtggccatgctgacccggtccatgcgcgccgatctgggcgtgatgatctcggcgtcgcacaatccctatcaggacaacggcatcaagctgttcggccccgacgggttcaagctctccgacgaagatgagctgaccatcgaggcggccatgttcaacgggttggagtcctgccgggtgggctcggaccatctgggccgcgccaagcgcctggacgatgcggcgggccgctatatcgaatacgccaagttcacctttccgcgcggtttgcgcctggacgggttgaagatcgtggtcgattgcgccaacggcgccgcctacaaggtcgcccccaccgttctgtgggaattgggcgccgaggtgatccccgtggcggtcaatcccgacggtttcaacatcaacaagaattgcggctcgctgcataccgagaccatgcgcgagcaggtggtgacccacggtgcccatctgggcatcgcgctcgatggcgatgccgaccgggtggtgctgtgcgacgagcaggggcatctgatcgatggtgatcagctgatggcgctgatcggtgatctatggcaccgctccggccagttgaagggcggcggcatcgtcgccaccgtgatgtccaatctcgggctggaacgtttcctggggcaacggggcttaaagaccatccgcaccaatgtgggtgaccgctatgtcctcgagcatatgcgccgagagggcttcaatgtgggcggcgagcagtcgggccatatcatcttgtccgaccattccaccaccggcgacggcctggtggcggggttgcaggtcctggcggcgctggttcagtcgggcaagccagccagcgagatgctgcgcctgttcacgccgctgccccaggtgctgaagaatgtgcgggtgtccaagggctctgtggccgaggttctggcggcccccgccgtcgaggcggccatcaaggacgccgaggctcggctggtgggccaaggccgcctgctgatccgcaaatcggggaccgaaccgctgatccgggtgatggccgaaggcgaggatcagaccctggtcgaggccaccgtcgacggcatcgtggaacacatccgccaagtggcgggctga

SEQ ID NO: 5856 - protein, 451 aa, Magnetospirillum magnetotacticum MS-1
MTRKLFGTDGIRGTANTDPMTAEMAMKLGMAAGRHFTRGEHRHVVVIGKDTRLSGYLIEPALTAGFISVGMDVVLLGPLPTPAVAMLTRSMRADLGVMISASHNPYQDNGIKLFGPDGFKLSDEDELTIEAAMFNGLESCRVGSDHLGRAKRLDDAAGRYIEYAKFTFPRGLRLDGLKIVVDCANGAAYKVAPTVLWELGAEVIPVAVNPDGFNINKNCGSLHTETMREQVVTHGAHLGIALDGDADRVVLCDEQGHLIDGDQLMALIGDLWHRSGQLKGGGIVATVMSNLGLERFLGQRGLKTIRTNVGDRYVLEHMRREGFNVGGEQSGHIILSDHSTTGDGLVAGLQVLAALVQSGKPASEMLRLFTPLPQVLKNVRVSKGSVAEVLAAPAVEAAIKDAEARLVGQGRLLIRKSGTEPLIRVMAEGEDQTLVEATVDGIVEHIRQVAG

SEQ ID NO: 5857 - DNA, 1368 bp, Fusobacterium nucleatum subsp. vincentii ATCC 49256
  CDS (1)..(1368): transl_table=11
gtgattttaatgggcagatactttgggacagatggcattaggggggaggccaatagagaattaactgttgataaagcattaagacttggctatgctcttggctattatttaaaaaacaaacataaagatgaagaaaaaataaaggttattatgggaagtgatactagaatatctggttatatgcttagatctgcattaacagctggacttacttcaatgggaatttatattgattttgttggagttattcctacacctggtgttgcttatataacaaaacaaaaaaaagctaaggcaggaattatgatttcagcttcacacaatcctgctaaggataatggaataaaaatatttaattcagaaggatataaactttctgatgaaattgaaaaccaaattgaagattatatggataatttaaataaaatcttagctaatcccttatctggggataaagtaggaaagtttaagtatgcagaagatgaatattttcaatataaaaattatcttacacaatgtgtagaaggtaactttaaaaatatgaaaattgttcttgatacagccaatggtgctgcatatagagcagcaaaagatgtatttttagatttaagagctgaacttgttgttataaatgatgctcctaatggaagaaatatcaatgtaaaatgtgggtcaacacatccagaaattctagcaaaagtcgttgtaggctacgaagcagatttaggtttagcctatgatggagatgctgatagacttatagcagttgataagtttggaaatattatagatggagataaaattataggaatattagctcttggtatgaaaaataaaggaactttaaaaaataataaagttgttactactgttatgagcaatataggttttgaaaaatatttaaaagaaaacgagatagaacttttaagagctaatgttggagatagatatgttcttgaaaaaatgttagcagaagatgttgttattggtggtgaacaatcaggacatattattttaaaagattatgcaacaacaggagatggtgtgttatcatctttaaaacttgttgaagttattagagataccaaaaaagatttacatgaattagtttctgctataaaagatgctcctcagactttaattaatgtaaaagttgataatgctaagaagaatacttgggataaaaataaaaatataatgtcttatattgatgagtcaaacaaaaaatataaagatgaagttagaattttagttagaaaatctggaacagaacctttaataagggtaatgacagagggagatgacagacaacttgttcataaacttgcagaggatattgctaagttaattgaaaaagaattaaattaa

SEQ ID NO: 5858 - protein, 455 aa, Fusobacterium nucleatum subsp. vincentii ATCC 49256
MILMGRYFGTDGIRGEANRELTVDKALRLGYALGYYLKNKHKDEEKIKVIMGSDTRISGYMLRSALTAGLTSMGIYIDFVGVIPTPGVAYITKQKKAKAGIMISASHNPAKDNGIKIFNSEGYKLSDEIENQIEDYMDNLNKILANPLSGDKVGKFKYAEDEYFQYKNYLTQCVEGNFKNMKIVLDTANGAAYRAAKDVFLDLRAELVVINDAPNGRNINVKCGSTHPEILAKVVVGYEADLGLAYDGDADRLIAVDKFGNIIDGDKIIGILALGMKNKGTLKNNKVVTTVMSNIGFEKYLKENEIELLRANVGDRYVLEKMLAEDVVIGGEQSGHIILKDYATTGDGVLSSLKLVEVIRDTKKDLHELVSAIKDAPQTLINVKVDNAKKNTWDKNKNIMSYIDESNKKYKDEVRILVRKSGTEPLIRVMTEGDDRQLVHKLAEDIAKLIEKELN

SEQ ID NO: 5859 - DNA, 1338 bp, Haemophilus influenzae R2846
  CDS (1)..(1338): transl_table=11
atggcaaatcgtaaatattttggaacagatggtgttcgtggaaaagtaggtagttatccaattacaccagatttcgcattaaaattaggctgggctgcgggaaaagtattagcttctcaaggttctaaaatggttttaattggtaaagatactcgcatttctggatatatgttggaatcagcccttgaagcaggtttagccgctgcggggttatctgctgcctttacaggcccaatgcctacacctgctattgcttatttaaccagaactttccgcgctgaagcgggtattgtgatctcggcctctcataatccttattatgataatgggattaaattcttttcagcaaaaggcactaaattacctgatgaaattgaagaagccattgaagcgatgttagaacaaccgatggattgtgtggaatctgccgaattaggtaaagccagccgtattaatgatgcagcaggacgctacattgagttttgtaaaggtacattccccgctcatttaggcttggaaggttataagatcgtggtcgattgtgcaaatggtgcaacttaccatattgcgcctaacgtgtttagagagctaggtgcggaagtcattgaaattggtacggatccaaatggtttgaatattaatgaaaaatgtggtgcaactgatgtaactgcattgcaagctaaagttgttgaaacgaaagctgatgttggcttagcttatgatggcgatggtgaccgcattatgatggtcgatcatttaggaaataaagtcgatggcgaccaaattctctttattattgcacgtgaagcattgcgctcaggtcaattaaaaggcggtgtcgttggcactttaatgagtaatatgagcttagagattgcgttgaaaatgcttggtgttcccttcttacgtgcaaacgtgggagaccgttatgtattggaaaaaatggttgaaaatgattggacgcttgggggggagaattctggacatattatcattgcggataagaatactactggcgatggcattgttgcgtcattggctgtattggcggcgatggcacagcataaattatcattaaatgaattagcaagtgcggttaaattattccctcaagtgttaatcaatgtacgttttgcgggtggggaaaatccacttgaaagtgatgctgtaaaatctgttgccgcagaggttgaaaaacgtttagaaggtaaaggtcgtattttattgcgtaaatcgggtacggaaccacttattcgtgttatggtggaatgccaagatgctgaacttgcacaacaatgtgcagaagaaattgcagaagccgtgaaaaaaattaattaa

SEQ ID NO: 5860 - protein, 445 aa, Haemophilus influenzae R2846
MANRKYFGTDGVRGKVGSYPITPDFALKLGWAAGKVLASQGSKMVLIGKDTRISGYMLESALEAGLAAAGLSAAFTGPMPTPAIAYLTRTFRAEAGIVISASHNPYYDNGIKFFSAKGTKLPDEIEEAIEAMLEQPMDCVESAELGKASRINDAAGRYIEFCKGTFPAHLGLEGYKIVVDCANGATYHIAPNVFRELGAEVIEIGTDPNGLNINEKCGATDVTALQAKVVETKADVGLAYDGDGDRIMMVDHLGNKVDGDQILFIIAREALRSGQLKGGVVGTLMSNMSLEIALKMLGVPFLRANVGDRYVLEKMVENDWTLGGENSGHIIIADKNTTGDGIVASLAVLAAMAQHKLSLNELASAVKLFPQVLINVRFAGGENPLESDAVKSVAAEVEKRLEGKGRILLRKSGTEPLIRVMVECQDAELAQQCAEEIAEAVKKIN

SEQ ID NO: 5861 - DNA, 1338 bp, Haemophilus influenzae R2866
  CDS (1)..(1338): transl_table=11
atggtaaatcgtaaatattttggaacagatggtgtacgtggaaaagtaggtgcttacccaattacaccagatttcgcattaaaattaggctgggctgcaggaaaagtattggcttctcaaggttctaaaatggttttaatcggtaaagatacccgaatttctggatacatgttggaatcagccctcgaagcaggtttagccgctgcggggttatctgctgcatttactggccctatgccgacacctgcaattgcttatttaaccagaactttccgagctgaagcaggtatcgtgatctcagcctctcataatccttattatgataatggcattaaattcttttcagcaaaaggcactaaattacctgatgaaattgaagaagccattgaagcaatgttagaacaacctatggattgtgtggaatctgccgaattaggtaaagcaagccgtattaatgatgcagcaggacgctatattgagttttgtaaaggcacattcccagcacacttaggcttggagggttataaaatcgtggtagattgtgcaaatggtgcaacttaccatattgcgcctaacgtgtttagagagctaggtgcggaagtcattgaaattggtacggatccaaatggtttgaatattaatgaaaaatgtggtgcaactgatgtaactgcattgcaagctaaagttgttgaaacgaaagctgatgttggcttagcttatgatggcgatggcgaccgcattatgatggtggatcatttaggaaataaagtcgatggcgaccaaattctctttattattgcgcgtgaagcattgcgctcaggtcaattaaaaggcggtgtcgttggcaccttaatgagtaatatgagcctagagattgcgttgaaaatgcttggtgttcccttcttacgtgcaaacgtgggagaccgttatgtattggaaaaaatggttgaaaatgattggacgcttgggggggagaattctggacatattatcattgcggataagaatacaacgggagatggcattgttgcgtcattggctgtattggcggcgatggcacagcataaattatcattaaatgaattagcaagtgcggttaaattattcccacaagtgttaatcaatgtacgttttgcaggtggggaaaatccacttgaaaatgatgctgtaaaatctgttgccgcagaggttgaaaaacgtttagaaggcaagggacgcattttattgcgtaaatcgggtacggaaccacttattcgcgttatggtggaatgccaagatgctgaacttgcacaacaatgtgcagaagaaattgcagaagccgtgaaaaaaattaattaa

SEQ ID NO: 5862 - protein, 445 aa, Haemophilus influenzae R2866
MVNRKYFGTDGVRGKVGAYPITPDFALKLGWAAGKVLASQGSKMVLIGKDTRISGYMLESALEAGLAAAGLSAAFTGPMPTPAIAYLTRTFRAEAGIVISASHNPYYDNGIKFFSAKGTKLPDEIEEAIEAMLEQPMDCVESAELGKASRINDAAGRYIEFCKGTFPAHLGLEGYKIVVDCANGATYHIAPNVFRELGAEVIEIGTDPNGLNINEKCGATDVTALQAKVVETKADVGLAYDGDGDRIMMVDHLGNKVDGDQILFIIAREALRSGQLKGGVVGTLMSNMSLEIALKMLGVPFLRANVGDRYVLEKMVENDWTLGGENSGHIIIADKNTTGDGIVASLAVLAAMAQHKLSLNELASAVKLFPQVLINVRFAGGENPLENDAVKSVAAEVEKRLEGKGRILLRKSGTEPLIRVMVECQDAELAQQCAEEIAEAVKKIN

SEQ ID NO: 5863 - DNA, 1353 bp, Listeria monocytogenes str. 4b H7858
  CDS (1)..(1353): transl_table=11
atgggtaaatattttggtacggatggagttagaggtgttgcaaactctgaattaacaccagaacttgcattcagattaggtagaatgggtgggtatgttttaacccgtcacgtaggggaacatccacgtgttcttgtagctcgtgatacacgtatatctggagaaatgcttgaatccgctttaatcgcaggacttgtttctgtagggattgaagtaatgcgtctaggagttatctccacaccaggtgtagcttatttaacaaaagcacaaggcgcttctgctagtgtaatgatctccgccagccataatccagtggatgataacggtattaaattctttggttctgacggctttaaattgtcagatgatcaggaagaagaaattgaacagcttcttgatacagcagaagatacgctacctcgaccaagtggagaaggtcttgggacagtgagcgattattttgaaggcaaacaaaaatatattcaatacttgaaacaaacaatcgaaaatgactttaatggatatcacattgcacttgattgtgcgaatggcgcaacttcaggtcttgcaacgcatttatttgcagatttagatgcggatattagttcgatgggagcgtctccaaacggtttaaatatcaatgatggcgtcggatctacacatccagaagcattagctacctttgttttagataaaaaagcagatgttggtttagcttttgatggcgatggcgaccgtgttattgcaatagacgaaattggtcaaattgtcgatggagataaaattatgtttatctgcgcgaaatatttacgtgaacaaggcttattaaataacaacacaattgtatcaacagttatgagtaatctaggcttctataaaggtttgaaagagcttgagattgaagatgtacaaactgcagtgggtgaccgttatgtagtagaagctatgcgtgaaggtaattataatcttggcggagaacaatctggtcatattattttcttagatcataatacaactggtgatggacttctttcaggaatccaattaatcaacgtgatgaaagcaactgggaaaaaattatctgagcttgcggctgaaatgaaaacattcccgcaaaaactagaaaacatccgtgtaagtgataaaaaccatgtaacagataatccgaaagtaagtaaagtaatcggtgaagtagaagctgaaatggctggtaatggtcgagttcttgttcgcccatccggtacagaaccattagtaagagtgatggtagaagctgctacgaaagaagaaacagacgaatattgtgaacgtatttcagcggttgttcgttcagaaatggcacttaacgattaa

SEQ ID NO: 5864 - protein, 450 aa, Listeria monocytogenes str. 4b H7858
MGKYFGTDGVRGVANSELTPELAFRLGRMGGYVLTRHVGEHPRVLVARDTRISGEMLESALIAGLVSVGIEVMRLGVISTPGVAYLTKAQGASASVMISASHNPVDDNGIKFFGSDGFKLSDDQEEEIEQLLDTAEDTLPRPSGEGLGTVSDYFEGKQKYIQYLKQTIENDFNGYHIALDCANGATSGLATHLFADLDADISSMGASPNGLNINDGVGSTHPEALATFVLDKKADVGLAFDGDGDRVIAIDEIGQIVDGDKIMFICAKYLREQGLLNNNTIVSTVMSNLGFYKGLKELEIEDVQTAVGDRYVVEAMREGNYNLGGEQSGHIIFLDHNTTGDGLLSGIQLINVMKATGKKLSELAAEMKTFPQKLENIRVSDKNHVTDNPKVSKVIGEVEAEMAGNGRVLVRPSGTEPLVRVMVEAATKEETDEYCERISAVVRSEMALND

SEQ ID NO: 5865 - DNA, 1458 bp, Crocosphaera watsonii WH 8501
  CDS (1)..(1458): transl_table=11
atggttatctccctatatcctaatggcagcggtcgttcaaataatcagaccaggaacttcaatcatcgctttttgaatccactcccccatctacccaatagtgctttgtttgggactgatggcatcagaggtaaggcaggagagttattaacggctccgtttgccctacaattagcattttatgccggacaagttttaaaatcaaaaacagccacacccggtcccattatcatcggtcaagactctcgtaactccagcgatatgttagctatggctatggccgcaggactaacttcagtcggcttggaagtctggcagttaggattatgtcctactccctgtgttgcttatttaacccgtcacagcgaagcaatggcagggatcatgatttctgctagtcataaccctccagaagataacggaattaaattttttaacgcagatggtacgaagttgtcctcaaccctagcccaagaaatagaagaggggttacgaggtaatcttgttgtgtccatggatgatatggctgtttggggtaaaactttatatcaatccagtttagttaatgattattgtcagtttttacaggacagtttacccacttccttcagttgtcaagggatgaaaatcgttttagatttggcttggggtgcttcggtaaatgtggccccggctatgtttaatgcgttgggtgcagaagttatttgtttacacgatacagctaacggcgatcgcattaatgtcaattgtggttccactaatcttaatttattgcaagctgcgatctcagaacatcaggcggacatggggtttgcttttgatggagatgctgatcgggtgatggcggtagatggtacaggaaaggtggtggatggagattatattctttacctctggggaaaatacctcttagagcggggtaaactgcccgataacctcttgatcggcactgttatggcaaatttggggtttgaacgtgcttggcaaggtctagggggtcaattggttcgtacctctgtaggcgatcgccatgttcaagcgcaaatgtggcaaactggggctatgcttgggggtgaacagtcgggacacattatctgtcatcattacggggtgtcaggggatggtgtccaaacggcgttacagttggctgctttggtgcatgagtctggggtatctttggctgagttggtgcaaaatagttttgaaacctatccccagattttacgcaatgttcgtttagaagatcgggaaaaattacgctcttggcaacagtgtgaacctctgcaacaggccatcgcccaagcaggggaagatatgggtaatacaggccgggttttagttcgtgcgtcgggaacagaaactttaattagggtgatggttgaatcagaatgtcctaatgctgctagtcattgggttaattatttagtgggagttgtggaaacccatcttgctgcttaa

SEQ ID NO: 5866 - protein, 485 aa, Crocosphaera watsonii WH 8501
MVISLYPNGSGRSNNQTRNFNHRFLNPLPHLPNSALFGTDGIRGKAGELLTAPFALQLAFYAGQVLKSKTATPGPIIIGQDSRNSSDMLAMAMAAGLTSVGLEVWQLGLCPTPCVAYLTRHSEAMAGIMISASHNPPEDNGIKFFNADGTKLSSTLAQEIEEGLRGNLVVSMDDMAVWGKTLYQSSLVNDYCQFLQDSLPTSFSCQGMKIVLDLAWGASVNVAPAMFNALGAEVICLHDTANGDRINVNCGSTNLNLLQAAISEHQADMGFAFDGDADRVMAVDGTGKVVDGDYILYLWGKYLLERGKLPDNLLIGTVMANLGFERAWQGLGGQLVRTSVGDRHVQAQMWQTGAMLGGEQSGHIICHHYGVSGDGVQTALQLAALVHESGVSLAELVQNSFETYPQILRNVRLEDREKLRSWQQCEPLQQAIAQAGEDMGNTGRVLVRASGTETLIRVMVESECPNAASHWVNYLVGVVETHLAA

SEQ ID NO: 5867 - DNA, 1347 bp, Xylella fastidiosa Ann-1
  CDS (1)..(1347): transl_table=11
atgagggtgtccaggtattttggtaccgatggcatccgtggccgcgttggccaggggttgatttctgctgattttgtattgcgcctgggtaacgcgcttggccgagtgcttgctcagggccgtgatacccgtccgatggtgttaattggtaaggacacgcgtatctccggttatatgtttgagtctgctcttgaggcgggtttggtggccgctggcgctgatgtgcagttgatcggcccgatgccaacacctgcgattgctttcctgaccaatacgttgcgggctgatgctggtgtggtgatcagcgcatcccacaatcctcatgatgacaatggcatcaagtttttttccgcgatgggtgaaaagctcgacgatgcgacagaagcggccattgaagcggcgattgaggcgccattcctgacggttgactctgaatatttggggaaggtcaagcgtacacgtgatgcaattggccgctatatcgaattcagtaaggcaagtgtgtcgcgtggttttacgctgcgcgggttgaagttggtattggattgtgcgcatggcgccacgtatcacatcgcaccgatgctgtttcgcgaattaggtgcggagttagtggcgattggtgtcgatccggatggtttgaatatcaatgccggtgttggctctactcacttggagactctcgctgccacagtgcgtgagagcggtgctgatttgggcattgctttcgatggtgacggtgacagggtgctgatgacggatgcccaaggccggactgtggatggagacgacctgttgtatgtgctggcgcgtgcttggcgggctagtggtcgtttaaagggcacggtggttgggacgttgatgagtaactatggtttagagcaggcgttggggacccttgggatcccctttatacgtgcgaaggtgggtgaccgttatgtgcatcaggcattggttgagagtggaggggtgctaggcggtgaggcatccggtcacttgttatgtttggatcgcgcaaccacgggtgatggtatcgtcagtgcattacaggtgttggaagtgttgcgtcatgaggggctgacgttgagtcaggcactgctgggtttacataaggtgccgcagaagacggtcaatgtgtgttggtctggtccagccagggctgcagtcgagatgccggaagtacgtcaagcattggttgaagcgcaagcggcggtgcagggtcggggacgggtgtttttgcgcccttccggcaccgagccggtggtgcgtatcactgtcgaagccgatgacgtcgtactcatgcagcagacgcttgataggcttgccgatgtggtccgtgacgcggcgtga

SEQ ID NO: 5868 - protein, 448 aa, Xylella fastidiosa Ann-1
MRVSRYFGTDGIRGRVGQGLISADFVLRLGNALGRVLAQGRDTRPMVLIGKDTRISGYMFESALEAGLVAAGADVQLIGPMPTPAIAFLTNTLRADAGVVISASHNPHDDNGIKFFSAMGEKLDDATEAAIEAAIEAPFLTVDSEYLGKVKRTRDAIGRYIEFSKASVSRGFTLRGLKLVLDCAHGATYHIAPMLFRELGAELVAIGVDPDGLNINAGVGSTHLETLAATVRESGADLGIAFDGDGDRVLMTDAQGRTVDGDDLLYVLARAWRASGRLKGTVVGTLMSNYGLEQALGTLGIPFIRAKVGDRYVHQALVESGGVLGGEASGHLLCLDRATTGDGIVSALQVLEVLRHEGLTLSQALLGLHKVPQKTVNVCWSGPARAAVEMPEVRQALVEAQAAVQGRGRVFLRPSGTEPVVRITVEADDVVLMQQTLDRLADVVRDAA

SEQ ID NO: 5869 - DNA, 1350 bp, Streptococcus suis 89/1591
  CDS (1)..(1350): transl_table=11
atgggtaaatattttgggacagatggtgtccgtggagaagcaaacgtagaattaacgccagaattagcattcaaattgggtcgttttggtggttatgtccttagccagcatgagacggatgttcctcgtgtctttgtggcgcgtgacacacgtatctcaggtcaaatgttagaggctgccttgattgcaggacttctatcagtagggattcatgtgtataaattgggagttttggcgacaccgggtgttgcccacctagtcaaaactgaaaaagcaagtgcaggtgtcatgatttctgcaagtcataacccagcacaagataacggtatcaaattctttgctggtgatggtttcaaattggatgatgcattggaagcggaaattgaggctcttcttgacgctgaggaagacacattgccacgcccatctgctcaaggtttaggagatgtggtagaatatccagaaggtctacgtaagtaccagcaattcttggtgtcaactggtacagatttggacggtatgaaagttgccctcgatacagccaatggtgccgcagcaacatctgcacgtcaaatttttgtagatttgggagcagatttgacagtaatggctgaaaagccagacggtttaaatatcaatgagggtgttggttcaactcatcctgaaaaattgcaagaactggtcaaggaaacaggaagtcaaattggacttgcctttgatggtgacagtgaccgcttgattgccgtcgatgaaaatggtgatttagtagacggtgaccgtatcatgtacatcgttggtaaataccttgctgatcgaggtctattggccaaaaatacaattgtgaccacagttatgtctaaccttggtttccataaggctttggatcgtgaaggtattgaaaaagctgtgaccgcagttggtgaccgctatgtggttgaagaaatgcgcaaggaaggctacaatgtcggtggtgagcagtcaggacacgtgattctgatggattataataccacaggcgacggccagttgaccgctgtgcaattgaccaaaatcatgaaagaaactggtaagaagttgtcagaattggcagcagaagtgaccatttacccacaaaaattggtcaatatccgtgtggaaaacagcatgaaagacaaggcaatggaagtgcctgctattgcagctatcattgaaaaaatggaagcagaaatggctggcaacggtcgtatcttggtacgcccaagtggtactgagcccctcttgcgtgtcatggcagaagcgccaacggatgctgaagtcgattactacgtggacaccattgccgatgtggtccgtgcggaaattggaatttaa

SEQ ID NO: 5870 - protein, 449 aa, Streptococcus suis 89/1591
MGKYFGTDGVRGEANVELTPELAFKLGRFGGYVLSQHETDVPRVFVARDTRISGQMLEAALIAGLLSVGIHVYKLGVLATPGVAHLVKTEKASAGVMISASHNPAQDNGIKFFAGDGFKLDDALEAEIEALLDAEEDTLPRPSAQGLGDVVEYPEGLRKYQQFLVSTGTDLDGMKVALDTANGAAATSARQIFVDLGADLTVMAEKPDGLNINEGVGSTHPEKLQELVKETGSQIGLAFDGDSDRLIAVDENGDLVDGDRIMYIVGKYLADRGLLAKNTIVTTVMSNLGFHKALDREGIEKAVTAVGDRYVVEEMRKEGYNVGGEQSGHVILMDYNTTGDGQLTAVQLTKIMKETGKKLSELAAEVTIYPQKLVNIRVENSMKDKAMEVPAIAAIIEKMEAEMAGNGRILVRPSGTEPLLRVMAEAPTDAEVDYYVDTIADVVRAEIGI

SEQ ID NO: 5871 - DNA, 1356 bp, Roseovarius nubinhibens ISM
  CDS (1)..(1356): transl_table=11
atggcgcgtaaatatttcggaaccgacggtattcggggcacagccaaccagtttccgatgaccgccgacaatgcgctgcgcatcggcgccgccgccggtcggcattttcgcaaggacgggctgaacggccaccgggtcgtgatcggcaaggacacccgccgctcgggctatatgctggaaaacgcgctgaccgctggtctcacatcgacggggatgaacgtgctgctgctgggtccgatcccgacgcccgcggtcggctttctcactcgctcgatgcgcgccgatctcggcatcatgatctcggcgagccacaatcctcaccatgacaatggcatcaaattcttcggccccgacgggttcaagctctcggatacggatgaggcggcgatcgaggccattctcgaaggcgatgtcaccccggcccagcccggcaatatcggtcgcgccaaacggatcgagagcggccgcggccgctacgtcgaatatgccaagaccaccttcccgcgcgatcagcggctgagcgggctcaagatcgtggtcgattgtgccaatggcgcggcctatcacgtcgcccccgaggtgctctgggaactcggcgccgaggtgatcccggtgggcgtgacgccggacgggttcaacatcaatgccgattgtggctcgaccgcgccgcagaccgccgcccgcgaagtgctcaaacacggggccgatctcggcatctgtctcgatggcgacgccgaccgcatcatcttgatcgacgaaaaaggtcaggtcgccgatggcgatcagatcatggcccttttcgcaagccgctgggccgcacagaacgcgctcgcccatggcacgctggtggcgacggtgatgtcgaacctcgggctcgagaatttcatcaagggcaaggggctgacgctcgagcgcacggcggtgggtgaccggcatgtggtggaacggatgcgcgccggcgggttcaatctcggcggcgaacaatcgggccatatcgtgatgaccgatttcgccaccaccggcgacgggctcatcgccgggctgcaattcctgtcggccatggtcgaaagcggccaacgcgccagcgagctggtgcagaatttcgccccggtgccgcagatcctcgaaaacgtgcgctttgacgcgggcagcgatccgctcggggccgagcgcgtccaatccgcgattgccgcgcaggaaaaacgcatcgccgatcgcggccgcatcctgatccgcaaatcgggcaccgagccgctgatccgggtgatggcggaatgcgaggatgaaacgcttctgcgcgaggtggtgggcgagattgccggtgccgtgcgcgaggccgggaaaaccgccgcctag

SEQ ID NO: 5872 - protein, 451 aa, Roseovarius nubinhibens ISM
MARKYFGTDGIRGTANQFPMTADNALRIGAAAGRHFRKDGLNGHRVVIGKDTRRSGYMLENALTAGLTSTGMNVLLLGPIPTPAVGFLTRSMRADLGIMISASHNPHHDNGIKFFGPDGFKLSDTDEAAIEAILEGDVTPAQPGNIGRAKRIESGRGRYVEYAKTTFPRDQRLSGLKIVVDCANGAAYHVAPEVLWELGAEVIPVGVTPDGFNINADCGSTAPQTAAREVLKHGADLGICLDGDADRIILIDEKGQVADGDQIMALFASRWAAQNALAHGTLVATVMSNLGLENFIKGKGLTLERTAVGDRHVVERMRAGGFNLGGEQSGHIVMTDFATTGDGLIAGLQFLSAMVESGQRASELVQNFAPVPQILENVRFDAGSDPLGAERVQSAIAAQEKRIADRGRILIRKSGTEPLIRVMAECEDETLLREVVGEIAGAVREAGKTAA

SEQ ID NO: 5873 - DNA, 1329 bp, Oceanicola batsensis HTCC2597
  CDS (1)..(1329): transl_table=11
ttgttcggcacggatggggttcgcggccgcaccaacacgcacccgatgacggccgaactggcgatgagactggccgcagccgcgggccgcttcttccgccgcgaccagcaggagcaccgggtcgtcatcggcaaggatacgcgcctctcgggctacatgctcgaaaacgcgctcaccgccggcttcacctcgaccgggatgaacgtcttcctgctcgggccggtgccgacgccggccgtgggctttctcacgcgctccatgcgcgccgatgtcggcgtgatgatctcggccagccacaacccggccgaggacaacggcatcaagttcttcggccccgacggcttcaagctcagcgacgatgccgagaccgagatcgagcgcctgatggaggccggcgtctcgctcgcccatccgcagcgcatcggtcgcgccaagcggatcgacgactcgggctcgcgctatgtcgaatacgtcaagacgacctttccgcgacagttccggctggacggtctgcgtatcgtcgtcgattgcgcgaacggagccgcgcatcgcgtcggcccttcgatcctgtgggagttgggcgccgacgtcatccccgtgggaaccagccccaacggtctgaacatcaacgacaagtgcggatcgacccatcccgatctggcggcggccaaggtgctggaaacccgcgccgacgtggggctctgcctcgatggggacgccgaccggctgatcctgatcgaccagaacggccagcgggtggacggcgaccagatcatgggcctcatcgcctcgcgctggaaggaggacggtcgccttgccggcgacacgctggtgaccacggtgatgtccaacctcgggctcgagcggttcctcgagagtcgcgggatcgccatcgaacgcaccaaggtcggcgaccgctatgtggtcgagcggatgcgccagggcggcttcaacctcggcggagagcagtcgggccatatcgtcatgaccgatcacgccaccacgggcgacggcctcgtggccgcgcttcaggtccttgccgcgatggtcgagaccggcgcccgggccagcgatctgctccgtgtcttcactccgatcccgcaggtcctgcacaacgtgcgctacgccagcgggaccgagccgctggaccgcgacagcgtccggcaggccattgccgatggcgagaagaagctgggcacatcgggccgtctcctgatccgcaagtccggcaccgagccgctgatccgcgtgatgggcgaggccgaggatcaggacacgctccactccgtgctcgacacgatctgcagggccgtggaacacacgaattga

SEQ ID NO: 5874 - protein, 442 aa, Oceanicola batsensis HTCC2597
MFGTDGVRGRTNTHPMTAELAMRLAAAAGRFFRRDQQEHRVVIGKDTRLSGYMLENALTAGFTSTGMNVFLLGPVPTPAVGFLTRSMRADVGVMISASHNPAEDNGIKFFGPDGFKLSDDAETEIERLMEAGVSLAHPQRIGRAKRIDDSGSRYVEYVKTTFPRQFRLDGLRIVVDCANGAAHRVGPSILWELGADVIPVGTSPNGLNINDKCGSTHPDLAAAKVLETRADVGLCLDGDADRLILIDQNGQRVDGDQIMGLIASRWKEDGRLAGDTLVTTVMSNLGLERFLESRGIAIERTKVGDRYVVERMRQGGFNLGGEQSGHIVMTDHATTGDGLVAALQVLAAMVETGARASDLLRVFTPIPQVLHNVRYASGTEPLDRDSVRQAIADGEKKLGTSGRLLIRKSGTEPLIRVMGEAEDQDTLHSVLDTICRAVEHTN

SEQ ID NO: 5875 - DNA, 1338 bp, Erythrobacter sp. NAP1
  CDS (1)..(1338): transl_table=11
atggcgcgcaagttcttcggtactgacgggatcaggggtcgcaccaatgcaggcgtgatgacagcggcgaccgccatgaaggttggccaggcagccgggcattacttcgtgcgcggcggccaccggcaccgggtcgtgatcggcaaggatacgcgcctgtcgggctatatgatggagagcgctctggtcgcgggcttcaccagcgtcggcatggatgtgatcatgaccggccccctgcccactccggccatcgcgatgctgacccgcgaaatgcgcgctgatctgggcgtgatgatctcggcgagccacaatctgtttcccgacaacgggatcaagctgttcggccccgacgggttcaagctttccgacgaagccgaatctgagatcgaggcgcttctcgatcaggagccgcaactggtcgaagcggaaaagatcgggcgcgcgcgccggatcgaggatgcgcgtgggcgctatctcaatgcgatcaagcaatcggtcggcagcgatatccggttcgatggcctcaaggtcgtcgtcgattgcgcgcacggagcggcgtatcaggttgctcccagcgcgatctgggagcttggcgcagaggtcgtgacgcttggtgtcgaacccaatgggattaacatcaatgacggcgtcggctcgacggcaattgaagcggtgcaggccaaggtggtcgaagaaggcgcggatatcggcatcgcgctcgatggcgatgctgaccggctgatcgtggtcgatgagaaaggccgcaaggtcgacggcgaccagatcatggccgcgatcgccacacgcatgcacgagaagggtgcgcttaccggtggcggcgtggtggcgacagtcatgtcgaacctcgggcttgagcgctatctcggcgggctcggcctcacgctcgaacgcaccaaggtcggcgaccgttacgtgctcgagcgcatgaaggaaggcggcttcaacgtgggcggcgagcagtcggggcacatgatcctgctcgaccatgccaccacgggagacggcacggttgccgcgctgcgcgtcattgcgagcctcgtgcgctcgggcaaacctgcaagcgagatcctgcataaattcgaacctgtgccgcagcttctgaagaatgtccgctatgacgcaggcgctccgctcgaaaacaagaccgtgaaggcggtgatcgccgaagtcgaaggcgagcttgaaggaaagggccgcctcgtcatccgtccctcgggcaccgagccggtgatccgcgtcatggccgagggtgacgattccagtcaggtcgaaaacgtcgtcgaccgcgtgtgcgacgcggtgcgcgcagcggcttga

SEQ ID NO: 5876 - protein, 445 aa, Erythrobacter sp. NAP1
MARKFFGTDGIRGRTNAGVMTAATAMKVGQAAGHYFVRGGHRHRVVIGKDTRLSGYMMESALVAGFTSVGMDVIMTGPLPTPAIAMLTREMRADLGVMISASHNLFPDNGIKLFGPDGFKLSDEAESEIEALLDQEPQLVEAEKIGRARRIEDARGRYLNAIKQSVGSDIRFDGLKVVVDCAHGAAYQVAPSAIWELGAEVVTLGVEPNGININDGVGSTAIEAVQAKVVEEGADIGIALDGDADRLIVVDEKGRKVDGDQIMAAIATRMHEKGALTGGGVVATVMSNLGLERYLGGLGLTLERTKVGDRYVLERMKEGGFNVGGEQSGHMILLDHATTGDGTVAALRVIASLVRSGKPASEILHKFEPVPQLLKNVRYDAGAPLENKTVKAVIAEVEGELEGKGRLVIRPSGTEPVIRVMAEGDDSSQVENVVDRVCDAVRAAA

SEQ ID NO: 5877 - DNA, 1461 bp, Synechococcus sp. WH 5701
  CDS (1)..(1461): transl_table=11
ttggtcttggctgccgatcggcttagcctgattcccttccttttccccctgatgctggagctggcttcttcccccatcggtgcccccctcggggagggttgcaccggtttcggcaccgatggcatccgggggcaggtaggcagcctgatcacaccgctgctggccctgcagatgggctattggtgcggtcgggtgctgccgccggagcgccccgtgctgatcggcatggactcccgcaacagcggcccgatgctggccgccgctctcaccgccgggctgaccgccgccgggcgggaggtgtggaaccttgggctttgccccactcccgccgtgcccggcacgatccgccgggtcggtgctgccggtggcctgatggtctccgccagccacaacccccccggcgacaacggcatcaaggtgttcgggccggccggcgacaagatcgatcgaaccctgcagtcggcgatcgaagcggggttgcgtggggaggaggccgtgacgatccaggccacgggtctgagcgggccccgcggctgtgggccggcccatcagcgggaggatctgctcgagggttaccgcgaggcgttgatcgccagcgttgctgggcggcgccttgacggttgccgcatcgtgctggatctgtgctggggctcagccaccgcctgcggggccgcggtgttcaggtccctgggggcggatctgaccgtgctgcatggggaacccgacggacagcgcatcaatgtgtcgtgcgggagcacccacctggaggccctgcgccaggcggtgctgcaatcgggcgcccacatgggctttgccttcgatggcgatgccgatcggatgatggcggtggacggcaagggccgggtggttgatggcgaccaggtgctctatctctggggtggcgccctgctggagaccgacgcccttcccggcaggctgctggtggccaccgtcatgtcgaacctgggcttcgagcgggcctggcaggccaggggcggtttgctgcagcgcaccgatgtgggcgatcagcacgtgcacgccgccatggaagcgagtggggccggcctgggtggggagcagtcgggccacatcctctcggcccagcacggcatgagcggcgatgggctgctcaccgccctgcaggtggccacgctgatccacaacggcgcggggtcgctggccgactggatggaggccagtttcgagccctacccccaggccctggtcaacgtcattgttcccgaccggagcagccgccagcagtggcagcgctgcgaccccctgcgccaggccgtcgagcaggccgagacggccatggccggcaacgggcgggtgctggtgcgcgccagcggcaccgaaccgttgctgcgggtgatggtggaggcggccgagcaggaggcggtcgatcattggtcgtcgcacctggcggccctggcctcgactcacctcaaccgggcctga

SEQ ID NO: 5878 - protein, 486 aa, Synechococcus sp. WH 5701
MVLAADRLSLIPFLFPLMLELASSPIGAPLGEGCTGFGTDGIRGQVGSLITPLLALQMGYWCGRVLPPERPVLIGMDSRNSGPMLAAALTAGLTAAGREVWNLGLCPTPAVPGTIRRVGAAGGLMVSASHNPPGDNGIKVFGPAGDKIDRTLQSAIEAGLRGEEAVTIQATGLSGPRGCGPAHQREDLLEGYREALIASVAGRRLDGCRIVLDLCWGSATACGAAVFRSLGADLTVLHGEPDGQRINVSCGSTHLEALRQAVLQSGAHMGFAFDGDADRMMAVDGKGRVVDGDQVLYLWGGALLETDALPGRLLVATVMSNLGFERAWQARGGLLQRTDVGDQHVHAAMEASGAGLGGEQSGHILSAQHGMSGDGLLTALQVATLIHNGAGSLADWMEASFEPYPQALVNVIVPDRSSRQQWQRCDPLRQAVEQAETAMAGNGRVLVRASGTEPLLRVMVEAAEQEAVDHWSSHLAALASTHLNRA

SEQ ID NO: 5879 - DNA, 1389 bp, Synechococcus sp. WH 7805
  CDS (1)..(1389): transl_table=11
atggcctcacctgcattccatcccctggattgtcctgatcctgcccaggtgagtttcggcaccgatggcctgcgtggtcatgtcggtacggcgatcacctccacccttgctctgcaggtggggttctggtgtggacgggtgctcccctctgatgggcctgtgctgatcgggatggattcccgcacgagcggatccatgctcgtgtccgcgcttgcggccggcctgaccgcagcggggcgagaggtttggacccttgggctgtgccccaccccggcagttccgggcctgatccgccggtttggggcggccggtggcttgatggtgtccgccagccataacccaccggaggacaacggcatcaaggtattcggtgccgatggcagcaagctcggctctgcgcttcagtcgcgaattgaggccggtttgcgcggtgaggagccgacgtcaccgcaagcgcctgcgttcggggtgtcacgccagcgttctgaacttctcgatctctacaaacaggatcttctcagcagcgtgcaccatcagcggctggatggtgtgccgattgttctggatctctgctggggctcggccacagcctgcggggccgtggtgttctccgagctcggtgccgatgtcacggtgctccatggcgaagccgatggggagcggatcaatgtggggtgcggctccacccatctcgagcccctgcgacgtgccgtgttggatcgtggagctgccatgggcttcgcttttgacggcgatgccgacaggatgttggctgtcgatggcaagggtcgcgtcgtcgatggcgaccatgtgctcttcctctggggctcagcgttgcaggacagcggtgcgcttcctgatcagagacttgtggccacagtgatgtccaacctgggatttgagcgagcctggcaggcccgaggtggactgcttgatcgcacccccgttggtgatcagcatgtgcatgccgccatggtccgcagtggtgcggctctcggtggtgagcaatccggtcacatcctttcttcagctcacggcctctccggtgatggggtgctcacggctttgcaactggccactctctgccatgcccaagggatgacgctggccgattggcttgatcacagctttaaggcctatccccagaaattggtgaatgtgcgggtgcctgatcgggctcgccgcaaaggttgggcggattgccaacctctctctgacttagtgcaacaggccgagcgcagcatggcggacgacgggcgggtgctggtgcgggccagtggcaccgagccccttctgcgtgtgatggtggaagcggctgattccagtgccgtggagcattggacccagcgcctggctgaggcggctgacctctacctcaatgccgcttga

SEQ ID NO: 5880 - protein, 462 aa, Synechococcus sp. WH 7805
MASPAFHPLDCPDPAQVSFGTDGLRGHVGTAITSTLALQVGFWCGRVLPSDGPVLIGMDSRTSGSMLVSALAAGLTAAGREVWTLGLCPTPAVPGLIRRFGAAGGLMVSASHNPPEDNGIKVFGADGSKLGSALQSRIEAGLRGEEPTSPQAPAFGVSRQRSELLDLYKQDLLSSVHHQRLDGVPIVLDLCWGSATACGAVVFSELGADVTVLHGEADGERINVGCGSTHLEPLRRAVLDRGAAMGFAFDGDADRMLAVDGKGRVVDGDHVLFLWGSALQDSGALPDQRLVATVMSNLGFERAWQARGGLLDRTPVGDQHVHAAMVRSGAALGGEQSGHILSSAHGLSGDGVLTALQLATLCHAQGMTLADWLDHSFKAYPQKLVNVRVPDRARRKGWADCQPLSDLVQQAERSMADDGRVLVRASGTEPLLRVMVEAADSSAVEHWTQRLAEAADLYLNAA

SEQ ID NO: 5881 - DNA, 1353 bp, Pseudoalteromonas tunicata D2
  CDS (1)..(1353): transl_table=11
gtgagcaataaaaagcattttggtacagatggtgtacgtggtttagtgggcgagtacccaattacacctggttttgccttaaagctaggttgggctgcaggtaaggtattatcaaaagcaggcactaaaaaagtacttattggtaaagatactcgcatttctggttatttattagaaacatctttagaagcagggcttatttcagctgggattaatgtggtgcttttaggcccgatgccaacgcctgcggtagcatatttgactcaaacatttcgtgccgaagctggtatcgttattagcgcttcacacaatccatttcacgataatgggattaagttcttttcaagccagggcctaaaattaccagatgaagttgaactcgaaattgaagcaatgctcgatgaagagatgacgtgtgtatcttctgagcttttaggtaaagcgcgtcgcttagaaaatgcagatggccgttatattgagttttgtaaaagccagttcccaaatgggatgtcgttagctgggctcaaaatagtcgttgattgtgctaatggtgcaacctatcacatagccccatcagtattaactgagttaggtgctgaagttgtcagttttgcctgccaaccaaatggactcaatattaatcttgaatgtggtgccacccacgttgatgcgttggttcgcaaagtattagaagaaaaagctgatgttggtattgcctatgatggtgatggtgaccgagtgatgatggtggaccgtaaaggccgagtatttgatggcgatgatattgtttatattttagcatgccaagctcagcaagatggtagtttaggtgatggcggtgtcgctggcacagtcatgtcaaatatggggctcgaaaatgccttgattcaacgtggtattccttttgcgcgaagcaaagtgggcgaccgctatgtcatggagttattgaaagaaaaaggctggaaaattggaggtgaaagttcgggccatattttgaatcttaaccttactacgacaggtgacggtattatttcaagtcttcaggtgcttgcagctatgatagcgcaaaataaaacgctagaagatttaggcaaagggtttgttaagtacccaatgaaaatgattaatgtacgttacccgcaaaatacagatcctgtgagtgatgagcgagtgctagcagcggtgcaagaagttgaaaccgctcttgatggcaaaggccgagttttacttcgtaaatcaggtactgagcctgttgttcgagttatggttgaagctgaacaagaaaagcaagtactcgatagtgcgaaaaaaatcgcgctagttgttgaaagtgtgagcaatcagactgtttaa

SEQ ID NO: 5882 - protein, 450 aa, Pseudoalteromonas tunicata D2
MSNKKHFGTDGVRGLVGEYPITPGFALKLGWAAGKVLSKAGTKKVLIGKDTRISGYLLETSLEAGLISAGINVVLLGPMPTPAVAYLTQTFRAEAGIVISASHNPFHDNGIKFFSSQGLKLPDEVELEIEAMLDEEMTCVSSELLGKARRLENADGRYIEFCKSQFPNGMSLAGLKIVVDCANGATYHIAPSVLTELGAEVVSFACQPNGLNINLECGATHVDALVRKVLEEKADVGIAYDGDGDRVMMVDRKGRVFDGDDIVYILACQAQQDGSLGDGGVAGTVMSNMGLENALIQRGIPFARSKVGDRYVMELLKEKGWKIGGESSGHILNLNLTTTGDGIISSLQVLAAMIAQNKTLEDLGKGFVKYPMKMINVRYPQNTDPVSDERVLAAVQEVETALDGKGRVLLRKSGTEPVVRVMVEAEQEKQVLDSAKKIALVVESVSNQTV

SEQ ID NO: 5883 - DNA, 1338 bp, Photobacterium sp. SKA34
  CDS (1)..(1338): transl_table=11
atgtctgaacgtaagttctttggtactgatggtattcgtggtttagtaggtgaagcaccaattacacctgactttgtaatgaagttaggttgggctgctggtcgcgtactatcgcaaactgggacaaaaaaagtcttaattggtaaagatacccgtatctctggctatatgttggaatctgcgttagaagcaggcttagcagctgcaggcttaaaagccgcattcaccggaccaatgccaacaccagcagttgcttatcttactcgtacgtttcgagcagaagccggtattgttatttcagcatcacataacccgtattacgataacggtataaagtttttttctgcaaaaggtactaagttacctgatgatattgagctagcaattgaagctgaaatggaaaaaccattaacctgtgtagaatcagcattacttggtaaagcttatcgtatcgatgatgcagctggacgttacattgaattttgtaaaggtacttttccaacccatttaagccttgaaggttttaagattattgtcgattgtgcccacggcgcgacttaccatattgcacctaaagttttttctgaactaggcgctgaagttatcgctattggttgtgagcctaatggtgtgaacattaacgacaaagtaggagcaactgatgtcgctgcgcttcaggctaaagtgcttgaagaaaaagcggattttggtatcgcactggatggtgatggcgatcgtgtgatcatggttgatgagctagggaacaaagttgatggtgaccaaattgcctacattatcgctcgcgatgcattacgccgtggcgagctaaaagggggtgttgttggtacattgatgacaaatatgggcatggaagttgctcttaagaatttaggcattccatttgtacgtgccaaagtaggcgatcgttacgtaatggaagagctgcagaagcatgactggttgattggtgctgagaactctggtcatgtcattttgcttgataaagtgacaaccggcgatggtattgttgctggccttcaagttatggcatcaatcgttgcaagtaagatgagcttaaaagaactttgtgatggtatggttatgttccctcaagtacttgaaaatgtacgcttcaaagggacatcagatccattaaagtctgatgcagttattactgcaactaaattagttgaagaaaagttaggtgataatggtcgagtattgctacgtaagtcaggcactgagccattaattcgtgttatggttgaaggtcaagatgcggctgatgttcagcaatatgctcttgatattgcaaaagcagtaaaagaaaactgttaa

SEQ ID NO: 5884 - protein, 445 aa, Photobacterium sp. SKA34
MSERKFFGTDGIRGLVGEAPITPDFVMKLGWAAGRVLSQTGTKKVLIGKDTRISGYMLESALEAGLAAAGLKAAFTGPMPTPAVAYLTRTFRAEAGIVISASHNPYYDNGIKFFSAKGTKLPDDIELAIEAEMEKPLTCVESALLGKAYRIDDAAGRYIEFCKGTFPTHLSLEGFKIIVDCAHGATYHIAPKVFSELGAEVIAIGCEPNGVNINDKVGATDVAALQAKVLEEKADFGIALDGDGDRVIMVDELGNKVDGDQIAYIIARDALRRGELKGGVVGTLMTNMGMEVALKNLGIPFVRAKVGDRYVMEELQKHDWLIGAENSGHVILLDKVTTGDGIVAGLQVMASIVASKMSLKELCDGMVMFPQVLENVRFKGTSDPLKSDAVITATKLVEEKLGDNGRVLLRKSGTEPLIRVMVEGQDAADVQQYALDIAKAVKENC

SEQ ID NO: 5885 - DNA, 1353 bp, Neptuniibacter caesariensis
  CDS (1)..(1353): transl_table=11
atgggtaagcgttatttcgggactgatggtattcgcggtaaggtaggtcagtttccaattacacctgattttgtactaaagcttggctgggcagcaggtaaagtgtttgcgcgtgaagggttaagcaaaatcctgatcggtaaagatacgcgaatttctggttatatgtttgaatctgcgctggaggctgggttgtcggctgctggcgttgatgtgttactcacggggcctatgcctaccccggctgttgcctatctttccagaacctttcgtgctgatgcgggtatcgtgatcagcgcttcccataacccttactttgataatggtatcaagttcttctcatctgaaggtacaaaactccctgatgagattgaacaggcaattgaagcgcaaatggatattgccatgacgacagtagattctgctgagctgggtaaagctaaacgtattgatgatgccgcgggtcgttacattgagttctgtaaggcaacagccggtggaattagtcttaaaggcctgaaaatcgtattggattgcgctaatggtgcaacttatcatgtggcgcctgctgtttttgatgaattgggtgcgaaggtggttgaaattgcctcttcaccggatggcctgaatattaatgaagagtgcggagcaacggcgactcagcgtctgcagacggtggtgaccgcagaaaaggcagatctgggtattgcattggatggcgatggtgatcgggtgattatggttgatcatctgggtcaggaagttgatggtgatgagctgctatacattattgcggctcaaatgcgtcgcgaaggcagttttacgggtggtgttgtcggtacactcatgacaaattatggcctggaacaagcttacgcccgtgaggatattcattttattcgtgccaaagtgggtgatcgctatgtcatggagcaactttatgcgaatgactggctgttaggcggcgagagttcagggcacattgtttgccgtcatttgaccactacgggcgatggcacagttgctgccttgcaagtgctgaaagctgcagtggaaacgggtaagagtctgagtgaacttcgtgctggaatgactaagttgccgcaaaaaatgatcaatgttcgtatggagcagaaggtcagtattgatggtgttgctgagatcgatgctgcagttgctgaagtcgaaactaagcttggagatcgtggtcgggtattgttgcggccttcgggaactgaaccggttgttcgggttatgattgaaggcgaagatgaggctgaagtaaatcagctttgtgagcagttggcaaaggatgtggaaaaagcgttgctggcgcttgaaagtttaagttaa

SEQ ID NO: 5886 - protein, 450 aa, Neptuniibacter caesariensis
MGKRYFGTDGIRGKVGQFPITPDFVLKLGWAAGKVFAREGLSKILIGKDTRISGYMFESALEAGLSAAGVDVLLTGPMPTPAVAYLSRTFRADAGIVISASHNPYFDNGIKFFSSEGTKLPDEIEQAIEAQMDIAMTTVDSAELGKAKRIDDAAGRYIEFCKATAGGISLKGLKIVLDCANGATYHVAPAVFDELGAKVVEIASSPDGLNINEECGATATQRLQTVVTAEKADLGIALDGDGDRVIMVDHLGQEVDGDELLYIIAAQMRREGSFTGGVVGTLMTNYGLEQAYAREDIHFIRAKVGDRYVMEQLYANDWLLGGESSGHIVCRHLTTTGDGTVAALQVLKAAVETGKSLSELRAGMTKLPQKMINVRMEQKVSIDGVAEIDAAVAEVETKLGDRGRVLLRPSGTEPVVRVMIEGEDEAEVNQLCEQLAKDVEKALLALESLS

SEQ ID NO: 5887 - DNA, 1362 bp, delta proteobacterium MLMS-1
  CDS (1)..(1362): transl_table=11
atgcgcagactgtttggaaccgacggcatccggggggtggccaacctctaccccatgaccaccgaaatcgccatgcaagtgggccgtgggattgcctttgtggtcaaacgccaggggcgccgccaccgcattgtgatcggcaaggatacccggatctccggctatatgatcgaaaacgccctggccgccggcatctgctccatgggagtggatatcctgctggtgggccccctgcccaccccggggatcgcctttatcaccaccagtatgcgggccgacgccggggtggtgatctcggcttcccacaacccctttccggacaacggcatcaaaattttcgccgccgacggctacaagctgcccgatgcccaggaactggagatcgaggagctgattttctcccagaaaatggcttcgttgcgccccaccgccgaagagatcggtaaggcctcccggatcgacgacgcccggggacgctatatcgttttcttaaaaaacaccttcccggcggaatataccctggatgattttcatatcgtgctggattgcgcccacggcgccacctatggggtggccccggcggtcttcgcggaactgggggcccgggtcagctgcctgggggtggaacccgacggcaccaacatcaaccacgattgcggagccctgcaaccccaggccatggccgccagggtccgtgaactcggggccgacctcggcatcgccctggacggcgacggggaccggctgatggtggccgatgagaccggccagatcctggacggtgaccaggtgatggcgatctgcgccgccgatctgctcaaacgcaaaaaacttaacaaaaagaccctggtggccacggtgatgagcaatatcggcctggagcactttatgaagggcttgggcggccgcctggaacgcagccaggtgggcgatcgttacgtggtcgaaaagatgcgggccaaaggctacaatttcggcggtgaacaatccggccacctgatcttcctggatcataacaccaccggcgatggcatcctggccgccctgcgcctgctggcggtgatgatcggcgaaaaccggcggctctcggagttggccagccgtttgcaactgctgccccaggtgttgcgcaatgtccgcctggagcaaccggtggcggtcaaagcaatcggcggccttaaaagcctggttaaaaaactggaggcggaactgggcagcgacggccgcatcctgatccgggcctcggggaccgaaccgctgctccgggtgatgatcgaggggccccaccgggagcggatcgaggccatggccgaggagatctgtcagcatatccagcagcggctggccggaaataagcgatga

SEQ ID NO: 5888 - protein, 453 aa, delta proteobacterium MLMS-1
MRRLFGTDGIRGVANLYPMTTEIAMQVGRGIAFVVKRQGRRHRIVIGKDTRISGYMIENALAAGICSMGVDILLVGPLPTPGIAFITTSMRADAGVVISASHNPFPDNGIKIFAADGYKLPDAQELEIEELIFSQKMASLRPTAEEIGKASRIDDARGRYIVFLKNTFPAEYTLDDFHIVLDCAHGATYGVAPAVFAELGARVSCLGVEPDGTNINHDCGALQPQAMAARVRELGADLGIALDGDGDRLMVADETGQILDGDQVMAICAADLLKRKKLNKKTLVATVMSNIGLEHFMKGLGGRLERSQVGDRYVVEKMRAKGYNFGGEQSGHLIFLDHNTTGDGILAALRLLAVMIGENRRLSELASRLQLLPQVLRNVRLEQPVAVKAIGGLKSLVKKLEAELGSDGRILIRASGTEPLLRVMIEGPHRERIEAMAEEICQHIQQRLAGNKR

SEQ ID NO: 5889 - DNA, 1332 bp, Oceanobacter sp. RED65
  CDS (1)..(1332): transl_table=11
atgtcccgtaaatattttggtacagatggtatccgtggacgcgttggtgaatcaccaattaccccggaatttgtcatgaagcttggttgggcagcgggacgcgtatttgctagccaaggcaaaaggaagattttaatcggaaaagatacccgaatttctggttatatgtttgagtcagctttagaggcaggcttgtctgcagcgggggtggatattggtattttaggtccaatgccgacgcctggtattgcctatctaacgcgtaccttccatgccgatgcaggtattgtcatcagcgcctctcataatccgtattacgataatggtattaagtttttctctgcagatggcagtaagttagacgatgctactgagcagcaaatcgaagagttgcttgatcaaccaatggaagttatgaactcagatcgattgggcaaggctaagcgaatcgaagatgcagcgggtcgctatatcgaattctgtaaaagtactgtttttggtttatcactcaaaggcatgcgagtggtattagattgtgcccatggtgctacttaccaaatagcgcccgcggtttttactgagttaggggccgatgtatttgttattggtaatgagccagatggccttaatattaataatcaggtgggctctacatctcctaaatcccttcagcagaaggttgtcgaattgagagctgatttgggtgttgcctttgatggtgatggtgaccgcgtagttatggtcgatcacaaaggtgaagtggttgatggcgatgagattatttatatgattgctcgtcaacagtatgaaaccgataccctgcaaggtggtgttgtcggaacacttatgtcgaatatggggatggagttggcgttaaaagatatgggtattcctttcgttcgcgcgaaagtcggtgatcgttacgttctgcagcagcttgcggagcacaactggtctttgggtggagaaagctcgggtcatattttgtgcttaaattctacgactacaggcgatggtattgtggctgcattgcaagctttaaagtctttgcaaagtcatggcaaaaacttgcatgaatataagcaaggtatgtcgaaattcccgcaagtgatgaaaaacgttaaggtggtagataagtctattgtagatagtgccgaggtgttaaaggcagtagagcaggcggaaacagaaatggcaggtaaaggccgcgtattgttgcgcccatcaggtactgagcctgtcgtacgtgtcatggtagagggacaagataaaactttagtaaacctgttagtcgatcgcctagttcaaattgtgagtcaagcggcgcaataa

SEQ ID NO: 5890 - protein, 443 aa, Oceanobacter sp. RED65
MSRKYFGTDGIRGRVGESPITPEFVMKLGWAAGRVFASQGKRKILIGKDTRISGYMFESALEAGLSAAGVDIGILGPMPTPGIAYLTRTFHADAGIVISASHNPYYDNGIKFFSADGSKLDDATEQQIEELLDQPMEVMNSDRLGKAKRIEDAAGRYIEFCKSTVFGLSLKGMRVVLDCAHGATYQIAPAVFTELGADVFVIGNEPDGLNINNQVGSTSPKSLQQKVVELRADLGVAFDGDGDRVVMVDHKGEVVDGDEIIYMIARQQYETDTLQGGVVGTLMSNMGMELALKDMGIPFVRAKVGDRYVLQQLAEHNWSLGGESSGHILCLNSTTTGDGIVAALQALKSLQSHGKNLHEYKQGMSKFPQVMKNVKVVDKSIVDSAEVLKAVEQAETEMAGKGRVLLRPSGTEPVVRVMVEGQDKTLVNLLVDRLVQIVSQAAQ

SEQ ID NO: 5891 - DNA, 1356 bp, Desulfitobacterium hafniense DCB-2
  CDS (1)..(1356): transl_table=11
atggaaggggtagtttatttgggtaaattgtttggaacggatggggtacggggtgtggccaataaggagttgacacccgatttagcctttcgtttaggtcaagccggtgcctatgtgttgagcaaggaacacccccatccacgcattgtaatcggcaaagatacccggatctccggggatatgttggaagcggctttaattgccgggatatgctctgtgggagctgatgtattaagagtaggggttttacccactccagggattgcctacttaacacgaaccttaaaagccagtgctggagtcgtcatctcagcatctcataacccggttcaagataatggaataaagtttttttcctccacaggttacaagctgcctgacgcggtagaggaagagattgaagatcttgtccatagtcatgaaaaaccctgggcaatccccgttggcagtgaaatagggcgggtgatagagatccaagatgctcagcgccggtatatggattttttgaaagggacggtgggctcccttgccggaattaaggtggtttatgatggctccaatggtgccgcgtctcacgtggggccccaagttcttcgggagctgggagtggaggtgattcctctatctgttacccctgatggaatcaatatcaatgcaggttgcggctctacccacccggaggtacttcaacaagctgtaatcgagcataaggccgatttggggttggctaatgacggtgatgcggatcgtttaatagctgtagatgaaaacggagaaatcgtcgatggggatttcatcatggttatctgcgctttagcacttaaagccaaagggcagctgatggaagattctgtcgtagttactgtcatgagtaatctgggtttgcatatcgctttaaaagaagctggaattagagtttatgaaacccaggtaggagatcgttatgtcatggaagagctcctcaaaacaggagcgaggctagggggggaacaatccgggcatattatcttcctggatcataacaccaccggggatggcttgcttacagctttgcagctcttagcagtgcttaaagagcaaggaaaacctatttcgaagttggcggccaaaatgcagcgtctacctcaggtactgattaatgtccgagtcaaggataagaagaaagctatggaaaacccttatgttttccaaaaggtggaggaagttaagcgtttcctgggagaaaggggacgggtcctcgtacgctcttccggaactgagtccttggttcgtgttatggtagaaggccaggatcatgagcagctcatgggtctggctcagtccgtggtggatattattaagcgagaagagctttaa

SEQ ID NO: 5892 - protein, 451 aa, Desulfitobacterium hafniense DCB-2
MEGVVYLGKLFGTDGVRGVANKELTPDLAFRLGQAGAYVLSKEHPHPRIVIGKDTRISGDMLEAALIAGICSVGADVLRVGVLPTPGIAYLTRTLKASAGVVISASHNPVQDNGIKFFSSTGYKLPDAVEEEIEDLVHSHEKPWAIPVGSEIGRVIEIQDAQRRYMDFLKGTVGSLAGIKVVYDGSNGAASHVGPQVLRELGVEVIPLSVTPDGININAGCGSTHPEVLQQAVIEHKADLGLANDGDADRLIAVDENGEIVDGDFIMVICALALKAKGQLMEDSVVVTVMSNLGLHIALKEAGIRVYETQVGDRYVMEELLKTGARLGGEQSGHIIFLDHNTTGDGLLTALQLLAVLKEQGKPISKLAAKMQRLPQVLINVRVKDKKKAMENPYVFQKVEEVKRFLGERGRVLVRSSGTESLVRVMVEGQDHEQLMGLAQSVVDIIKREEL

SEQ ID NO: 5893 - DNA, 1398 bp, Synechococcus sp. RS9916
  CDS (1)..(1398): transl_table=11
atggccgaccacgccacaccgcccctggggattccccaccacccgtctcaggcggcctttggcaccgatggtctgcgcggccgcgtgggctcagccatcaccccggccttagcgctgcaggtggggtattggtgtggtcgtgtgttcccccgtgaggggcccgtcttgatcggcatggattcccgcagcagtggcgccatggtgatggcggctctgactgctggcctcacagccgctggccgtgaggtgtggaccctcgggctgtgtgccacccccgcggtgccgctgttgatccgccagtgcggtgctgccggtggtctgatggtgtctgccagtcacaatccgccccacgacaacggcatcaaggtgttcggtgccgatggaaataaggtgcgccctgagctgcagcggtcgattgaggctgggctcagaggcgaggctgctgaggctgaggcggcgatgacgacggcctgtgcaccggcccatcaccgtcctgagctgctctgccattaccgcgatgcgctgctggccagcgtgcccggtcaggggctgagcggcgtcaaggtggtgctggatctctgttggggctctgccactgctctcggcgccgaggtgtttcaggccttgggcgctgatctcaccgtgttgcacggtgaaccggatggcagccgaatcaacgtgggatgcggttccacccacctcgcccctctgcgggaggcggtggtcaacagcggcgccgagatggggttcgcctttgacggtgatgcggatcggatgctcgccgtggatggacagggccgggtggtggatggtgaccacgtgctgttcctctggggttcagcgctgcaggagcagggggcgctgccggatcagcgactggtggccacggtgatgtccaacctgggctttgaacgggcctggcaggcacgtggcggcgtccttgagcgcacgccggtgggggatcagcatgtgcatgccgccatggtgagcagtggtgctgccctgggtggtgagcagtccggccacatcctgtcgtccgcctatgggctggctggtgatggcgtgctcacggcgctgcagatcgccacgctttgccaccagcgtcagctcagccttggcgcttggcgggatgagagtttccagtcctatccccagaagctggtgaatgtcaccgtggccgacaagggccgccgcaccggctgggaggcctgtgagcccctcacccatgcggtgagcgatgcggaagccgccatggccggcagcggccgtgtgttggtacgggccagtggtacggaaccgctgctgcgcgtgatggtggaagcggccgagcagaccgatgtcgaccactggagtcagcacctggcccagctggcggatcagcatctcaacgctgcttga

SEQ ID NO: 5894 - protein, 465 aa, Synechococcus sp. RS9916
MADHATPPLGIPHHPSQAAFGTDGLRGRVGSAITPALALQVGYWCGRVFPREGPVLIGMDSRSSGAMVMAALTAGLTAAGREVWTLGLCATPAVPLLIRQCGAAGGLMVSASHNPPHDNGIKVFGADGNKVRPELQRSIEAGLRGEAAEAEAAMTTACAPAHHRPELLCHYRDALLASVPGQGLSGVKVVLDLCWGSATALGAEVFQALGADLTVLHGEPDGSRINVGCGSTHLAPLREAVVNSGAEMGFAFDGDADRMLAVDGQGRVVDGDHVLFLWGSALQEQGALPDQRLVATVMSNLGFERAWQARGGVLERTPVGDQHVHAAMVSSGAALGGEQSGHILSSAYGLAGDGVLTALQIATLCHQRQLSLGAWRDESFQSYPQKLVNVTVADKGRRTGWEACEPLTHAVSDAEAAMAGSGRVLVRASGTEPLLRVMVEAAEQTDVDHWSQHLAQLADQHLNAA

SEQ ID NO: 5895 - DNA, 1350 bp, Alteromonadales bacterium TW-7
  CDS (1)..(1350): transl_table=11
atgaaacaaagaaagtattttggcacagatggcgtacgtggtttagtgggaacagcgccaatcaaccctgagtttgcaatgaagctgggttgggctgcaggacgtgtgctatcaaaaggtggaacaaaaaaagttattattggtaaagacacacgtatttctggttacatgcttgaaacagcccttgaagcaggtttaatagccgccggtattgatgttgttctgcttggcccaatgcctacgccggccgttgcttatttagcacaaacatttagggctgaagccggtattgtaataagcgcatcacataatccatattacgacaacggtatcaaattttttaatggtcaaggtttaaaacttgatgatgctgtagagcttgaaatagaggcaatgcttgatgagcaaatgacctgtgtggcctcagataagttaggtaaagcaacacgcttggcaagcgcagacggacgttatattgagttttgtaagagtcaatttccacaagggttgtctttggagggattaaaagtggttgtagattgcgctaacggcgcaacatatcatattgctccatcagttatgcgtgagctcggcgctgacgtaattacgcatgcatgtgagccaaatggtgtaaatataaaccatgaatgcggtgcaactcatgtagacacgttaaaacgcaaagtacttgaacataaagccgatgtaggtatagcttatgatggtgacggcgaccgtgtaatgatggttgaccataatggccgtgtatttgatggtgacgacttagtttatataattgcttgtcaggcagcgaacgatcatattttaggtggcggtgttgttggtactgttatgtcaaatatgggtctagaaaatgcactaaaagcaaaaggcattgagtttgctagaagcaaagttggcgatcgctatgtaatggaattacttcagcaaaaagggtggaaaattggtggagagagttcaggccatgtactcaatctagacttaatttcaacgggtgatggtattatatcaagcttgcaagtgctggctgctatggttgcacaaaatagaacgcttcaagatttaggcgccgggtttacaaaatacccaatgaaaatgattaacgtgcgttatacaccgggtaccgatcctacaacggcgccaaaagtccttgcggcagtcgaagaagtggaacaaaacttaggtaacaagggccgtgttttactccgtaaatcaggcactgaacctgtcgttcgtgttatggttgaagcagaacaagaaaaaatagtattagacagtgcacgtaagattgcagagattgtcgaatctatgagcaaacaacctgattga

SEQ ID NO: 5896 - protein, 449 aa, Alteromonadales bacterium TW-7
MKQRKYFGTDGVRGLVGTAPINPEFAMKLGWAAGRVLSKGGTKKVIIGKDTRISGYMLETALEAGLIAAGIDVVLLGPMPTPAVAYLAQTFRAEAGIVISASHNPYYDNGIKFFNGQGLKLDDAVELEIEAMLDEQMTCVASDKLGKATRLASADGRYIEFCKSQFPQGLSLEGLKVVVDCANGATYHIAPSVMRELGADVITHACEPNGVNINHECGATHVDTLKRKVLEHKADVGIAYDGDGDRVMMVDHNGRVFDGDDLVYIIACQAANDHILGGGVVGTVMSNMGLENALKAKGIEFARSKVGDRYVMELLQQKGWKIGGESSGHVLNLDLISTGDGIISSLQVLAAMVAQNRTLQDLGAGFTKYPMKMINVRYTPGTDPTTAPKVLAAVEEVEQNLGNKGRVLLRKSGTEPVVRVMVEAEQEKIVLDSARKIAEIVESMSKQPD

SEQ ID NO: 5897 - DNA, 1338 bp, marine gamma proteobacterium HTCC2143
  CDS (1)..(1338): transl_table=11
atgtcgcgaaaatattttggcactgatgggataagagggcgagtaggaactgggccgattactccggagtttgttctcaagttgggttgggctgttggtaaggtgtttgctggaagtggtcgcagcaaggtgatcatcggcaaggacactcgtatctcggggtatatgtttgaatcagccctcgaagcgggattggtggctgccggtgttgatgtggcaatgttaggtccaatgcctacccccgccgttgcctatctcactcgaacgtttcatgcgcaggccggtatcgttattagtgcttctcacaacccttatcctgacaacggcatcaagtttttttcatcacatggagccaagctggatgatgcggtggagcttgctatagaggcccagatggatcagccgatgacgattgttgagtcggcagacctgggtaaagtgactcgggttgatgatgctgccgggcgctacattgagttttgtaaaagcacaatccccagtagttttagtttgcggggtgtgaaaatggtcatcgactgtgcgcatggagcgacttaccaggttgcgcctgctgttatggaagagctgggtgcaagcgttatcctgatgggagcgcagccaaacggtttaaatattaatgatgaggtaggctcaactgagccggctgcgctgcaggctagggtgttgcaagagagcgctgatttgggcattgcctttgatggcgacggcgatcgactgctatttgttgaccgcaatggagaggtcgttgatggtgatgaattgttgtttattattgcgaaggatcaacttcgaagcgcgggtagttgcggcggtgttgtcggtactttaatgtcgaatctcggtttcgagttggcactgaaagagttagaaatcccctttgtgaggtcgaaggtgggcgatcgctatgttgttgaattgatgacatctcgggggtggaagttaggtggcgaaaattccgggcatattatttgtgcggatgtcaccaccactggtgacgcgctggttgcggcattgaaagtgttgtatgcattggttgatggaggggtgcctttacatgatgctaaactggggatgaataaattcccccagacgatgattaatgttgcacttgctgacaaaagtcggctgcagaataaccccgagattgatcgagctattgccgcagctgaaaaaagtttgaatggcagggggcgtgtattattgcgtccctccgggactgagccagttgttagagtcatggtagagggtgaagacgaggctctggtgaataccttggctgctgaaatcgccgccgtcgtagagcgggctgttttgtaa

SEQ ID NO: 5898 - protein, 445 aa, marine gamma proteobacterium HTCC2143
MSRKYFGTDGIRGRVGTGPITPEFVLKLGWAVGKVFAGSGRSKVIIGKDTRISGYMFESALEAGLVAAGVDVAMLGPMPTPAVAYLTRTFHAQAGIVISASHNPYPDNGIKFFSSHGAKLDDAVELAIEAQMDQPMTIVESADLGKVTRVDDAAGRYIEFCKSTIPSSFSLRGVKMVIDCAHGATYQVAPAVMEELGASVILMGAQPNGLNINDEVGSTEPAALQARVLQESADLGIAFDGDGDRLLFVDRNGEVVDGDELLFIIAKDQLRSAGSCGGVVGTLMSNLGFELALKELEIPFVRSKVGDRYVVELMTSRGWKLGGENSGHIICADVTTTGDALVAALKVLYALVDGGVPLHDAKLGMNKFPQTMINVALADKSRLQNNPEIDRAIAAAEKSLNGRGRVLLRPSGTEPVVRVMVEGEDEALVNTLAAEIAAVVERAVL

SEQ ID NO: 5899 - DNA, 1341 bp, marine gamma proteobacterium HTCC2080
  CDS (1)..(1341): transl_table=11
atgaataaaaaatattttggtactgacgggattcgcggccgagttggtgaaacgcccattacaccggagtttatgttgcgcttgggctgggcctgtggccgggtgttttcagagcgttcatcggaaaaagtgtcggttattattggcaaggacacccgagtgtcgggctacatgtttgaatctgctcttgaggcgggccttgtggctgcaggtgccaatgtgaaattgctaggtcctttgcccacgccggctattgccatgatgacgcgcagccagaacgctgcagtaggcattgttataagcgcctctcacaacccttactacgataacggcatcaagtttttttcggggcttggtgcaaagttgtctgacgaattagagctggctatcgaggcggcgctcgatattccgatgcaaaccgtggattcggctcagttgggcaaggcaacgcgactgagcgatgctgcaggcaggtatattgaattttgtaaagcgaccttgccgggacaatacaccctcaaaggcctaaatttcgtactcgattgcgcccacggcgccacttataacgtggcacccgctgtatttcgtgagctgggtgctaacgtcactgttatcggcgctgagccagatggttttaatattaaccagggtgtcggctctacggcgactgaattgctcagtcagcaagttgttgagactggagctaattttggaatagcttttgatggcgatggtgatcgcgttctctttgtcgatgccgatgggtctcttgttgatggtgatgccttgctttacgtcctggcgatgcaccgtcttgctgtaggacagtccgatccgggggtggtcggcacccaaatgtctaacatggggcttgagatagcccttggagaacaaggtgttcaattagctagaacgaaggtaggtgatcggtacgtgcgcgagcgcatggccgctgagggttggcagctaggaggagagtcttctgggcatttgatttgcggggacgtgactactacaggagatgggattgtagctgcgctgcaggtactcaaggcaattgtcgccagtggccggtcgctgtcggacttgctgtcgggtatgaagtgcttacctcaagtcatgatcaatgtacccctgccagaaaccagcctcgatttgacgggcgataatcccgtgtctgcaatttgtcgtgaagtggagagcgccttaaaggggcggggaaggcttttgttgcggccttcaggtactgagcctgtaattagggtcatggtcgagggtgatgacgctgttgaaataaaacagctcgctgaacaggtcgccggtgttattcgatgtgcttga

SEQ ID NO: 5900 - protein, 446 aa, marine gamma proteobacterium HTCC2080
MNKKYFGTDGIRGRVGETPITPEFMLRLGWACGRVFSERSSEKVSVIIGKDTRVSGYMFESALEAGLVAAGANVKLLGPLPTPAIAMMTRSQNAAVGIVISASHNPYYDNGIKFFSGLGAKLSDELELAIEAALDIPMQTVDSAQLGKATRLSDAAGRYIEFCKATLPGQYTLKGLNFVLDCAHGATYNVAPAVFRELGANVTVIGAEPDGFNINQGVGSTATELLSQQVVETGANFGIAFDGDGDRVLFVDADGSLVDGDALLYVLAMHRLAVGQSDPGVVGTQMSNMGLEIALGEQGVQLARTKVGDRYVRERMAAEGWQLGGESSGHLICGDVTTTGDGIVAALQVLKAIVASGRSLSDLLSGMKCLPQVMINVPLPETSLDLTGDNPVSAICREVESALKGRGRLLLRPSGTEPVIRVMVEGDDAVEIKQLAEQVAGVIRCA

SEQ ID NO: 5901 - DNA, 1344 bp, Marinobacter sp. ELB17
  CDS (1)..(1344): transl_table=11
atgtcaggcaggcagtattttggtaccgatggaattcgcggccacgtcggtgagggccctattactcctgagttcatgctgcgtttggggtgggctgcaggccaggcgtttaaacgcgaaggccagcgcaacagcgtgatgatcggcaaagacacccggctgtccggctacatgtttgaatctgcgctggaggccggcctggctgctgccggggtagacgtaaagctgctgggccccatgccaacaccggctatcgcctaccttacgcgcacattccgcgcttcggccggtattgtgatcagtgcttcgcacaatccccattacgacaacggtatcaagttcttctcggcagatggcaccaagctggatgacgccttggaagccgaaatcgagcactggctggaacaaccgctgacggtgtgtgattcggcagaactcggcaaagcgtcgcgcattgatgacgcccccggccgctacatagaattctgtaaaagtaccgtgcccaatgaattttctctggaaggcatgagcattgttttggactgcgctcacggagctacctatcacgttgcgccaaaagtgtttcgtgagttgggagcgaacgtatcggtgattggtgcagcacccgatggtcttaatattaacctcaatgtgggctccacccaccttgcaggtttgagtcaggcggttctagacagaaaagctgatctggggatagcctttgatggcgacggcgaccgcgtgcttatggtcgaccgtgacgggtccgaagtagacggcgatgagctgctgtatgtgattgcctcacagcgctatgccgaaggccgcctgaaaggcggtgtggtgggtaccctgatgaccaatcttggcgttgagctggccttgaaggagctggggattgagttcgagcgcgccaacgtgggtgatcgctacgtaatggagcgcctgttggcgaagggctgggtgctgggtggcgaaggttccggtcacatggtcatccgtgactgtaccagcaccggcgacggcattgtgtcggcgcttcaggtgatgctcgctatctggaaatcaggtaaaaccctggctgaaattcgccggggcatgagcaaactgccgcagaccatgatcaatgtgcgagtgaccaagcgcttcaatccgcttgagcgtgaagatattgtggccgccgtaagtcgcgccgaagccgaactcggcggcgacggccgggtgttgttgcgggcatctggcaccgagccgctgattcgagtcatgacagaaggccaggatgctgaggtgattgaacgcattgcccgacaattagcgaaggtggtggaaagctcgattgcctga

SEQ ID NO: 5902 - protein, 447 aa, Marinobacter sp. ELB17
MSGRQYFGTDGIRGHVGEGPITPEFMLRLGWAAGQAFKREGQRNSVMIGKDTRLSGYMFESALEAGLAAAGVDVKLLGPMPTPAIAYLTRTFRASAGIVISASHNPHYDNGIKFFSADGTKLDDALEAEIEHWLEQPLTVCDSAELGKASRIDDAPGRYIEFCKSTVPNEFSLEGMSIVLDCAHGATYHVAPKVFRELGANVSVIGAAPDGLNINLNVGSTHLAGLSQAVLDRKADLGIAFDGDGDRVLMVDRDGSEVDGDELLYVIASQRYAEGRLKGGVVGTLMTNLGVELALKELGIEFERANVGDRYVMERLLAKGWVLGGEGSGHMVIRDCTSTGDGIVSALQVMLAIWKSGKTLAEIRRGMSKLPQTMINVRVTKRFNPLEREDIVAAVSRAEAELGGDGRVLLRASGTEPLIRVMTEGQDAEVIERIARQLAKVVESSIA

SEQ ID NO: 5903 - DNA, 1347 bp, Bacillus sp. SG-1
  CDS (1)..(1347): transl_table=11
atgggaaagtatttcgggacagatggtgtaagaggaattgctaatacagagttgactccagagttagcttttaaattgggaaggttcggcggatatgtcctgacaaaggatgcagaccgccccaaaattcttattggccgcgatactagaatttcaggccacatgctggaaggtgcccttgtggcaggcttgctgtcaatcggagcggaagttatgcgccttggggtcatttccacacctggtgtagcctatttgacgaaagcacttgatgcccaggcaggggtcatgatctctgcatcgcataaccctgtgggagataacgggatcaagttcttcggttcagatggattcaagctgtccgatgaccaggaaaaagaaattgaggatcttcttgatcaagtagaggatacacttcctcgtcctatcggtgccgatctgggacaagtcagcgactactttgaaggtggacagaagtacctacagtacttgaagcagtcggttgatgaagagttcgatggccttacgattgcccttgattgtgctcatggagctacgtcttcactcgcaccgcacctatttgcggacttggatgcggatcttatcacaatgggagcatcccctaacggcttaaacatcaatgacggtgtaggttccactcaccctgaatccttggctgagcttgtaaaagaaaaaggagcggatgtcggccttgcatttgatggtgatggagaccgcttgattgcaattgatgagaatggtgaaattgtagacggcgaccaaattatgttcatctgtgctaagcatttgaaatctgaggcacgtttaaagcagtccactgttgtttcaactgtcatgagcaaccttggattccacaaaggaatggaatcaaatgatattaagagcatccaaaccgcagtaggagaccgttatgtagttgaagagatgagaaagaataattacacactgggcggagagcagtccggacatatcatcttccttgactacaatacaacaggagatggtttgttaacgggtattcagttagttaatattatgaaattgacaggtaaatcattgtcagaacttgcaggcgaaatgaaaaaattcccgcagaaattggttaatattaaagtgacggataaatatcacgtaacagataatgccaaggtcaaagagataatcgagaaggttgaagcagaaatgaacggcaatggaagaatccttgttcgtccttcaggtacggaacctcttgtaagggtgatggctgaagcacctacagaagaactgtgtgaaaaatatgtagacgatattgcccaggttgtgcaagaagaaatgggattaaaataa

SEQ ID NO: 5904 - protein, 448 aa, Bacillus sp. SG-1
MGKYFGTDGVRGIANTELTPELAFKLGRFGGYVLTKDADRPKILIGRDTRISGHMLEGALVAGLLSIGAEVMRLGVISTPGVAYLTKALDAQAGVMISASHNPVGDNGIKFFGSDGFKLSDDQEKEIEDLLDQVEDTLPRPIGADLGQVSDYFEGGQKYLQYLKQSVDEEFDGLTIALDCAHGATSSLAPHLFADLDADLITMGASPNGLNINDGVGSTHPESLAELVKEKGADVGLAFDGDGDRLIAIDENGEIVDGDQIMFICAKHLKSEARLKQSTVVSTVMSNLGFHKGMESNDIKSIQTAVGDRYVVEEMRKNNYTLGGEQSGHIIFLDYNTTGDGLLTGIQLVNIMKLTGKSLSELAGEMKKFPQKLVNIKVTDKYHVTDNAKVKEIIEKVEAEMNGNGRILVRPSGTEPLVRVMAEAPTEELCEKYVDDIAQVVQEEMGLK

SEQ ID NO: 5905 - DNA, 1338 bp, Erythrobacter sp. SD-21
  CDS (1)..(1338): transl_table=11
atggcacggacatacttcggcaccgacggaattcgcggccgcaccaacgaaggcgtgatgaccgccgagaccgcgatgaaggtcggccaggcagcgggcacacatttcctgcgcggcggccacaagcaccgcgtcgttatcggcaaggatacgcgcctgtcgggctatatggtcgaaagcgcgctggtcgccggcttcaccagtgtcggcatggacgtgatcatgaccgggccgctgcccacgcctgccatcgccctgctcacccgcgaaatgcgcgccgacctcggggtgatgatctccgccagccacaacccattcgaagataacggcatcaagctcttcggccccgatggttacaagctgtcggacgaggcggaaatggccatcgagacgctgatgacgcagcagcctctcctcgtcagccccgagcggatcggacgggcgcggcggatcgacgatgccagcgggcgctatatccacgcggtcaagcaatcggtggcgagcgatgtgcgcttcgatggcctcaaggtcgtggtcgattgcgccaacggagcggcttacaaggtcgccccaagcgcaatctgggaactgggcgcgcaagtgatcgccatgggcgtcgaacccaacggcacgaacatcaaccgcgatgtcggctcgacctccctcgacgctatcaaggcccgcgtggtcgaggaaggcgcgcatatcggcattgcgctcgatggcgatgccgaccggctgatcgtgatcgacgagaagggcaacacggtcgatggcgaccagatcatgggcctcatcgccacgcgcctgaaggagcgcggcgacctcaggggcggcggcgtggtggccacggtgatgagcaatctcgggctcgaacgctatttggcaagccagggcctcactctggaacgcaccagggtcggcgaccgctatgtcctcgaacgcatgcggcagggcggcttcaacgtcggcggcgagcagtcggggcacatgatcctgagcgactacggcaccacgggcgacggcacggtggcggcgctgcgtgtgcttgccagcgtggtccgcttcggcaagccggcgagcgagctgctccatgtcttcgatcccgtcccccaattgctcaagaacgtgcgctattcgggcggcaaaccgcttgagaacgagagcgtgaaagccgtgatcgtcgaggcggagaaggaactggaaggcaagggccgcctggtcatccgtccctcgggcaccgagcccgtcattcgcgtcatggccgagggagacgacgcgcgacaggtcgagacggtcgtcgaccggatttgcgatgccgtgagggaggccgcctga

SEQ ID NO: 5906 - protein, 445 aa, Erythrobacter sp. SD-21
MARTYFGTDGIRGRTNEGVMTAETAMKVGQAAGTHFLRGGHKHRVVIGKDTRLSGYMVESALVAGFTSVGMDVIMTGPLPTPAIALLTREMRADLGVMISASHNPFEDNGIKLFGPDGYKLSDEAEMAIETLMTQQPLLVSPERIGRARRIDDASGRYIHAVKQSVASDVRFDGLKVVVDCANGAAYKVAPSAIWELGAQVIAMGVEPNGTNINRDVGSTSLDAIKARVVEEGAHIGIALDGDADRLIVIDEKGNTVDGDQIMGLIATRLKERGDLRGGGVVATVMSNLGLERYLASQGLTLERTRVGDRYVLERMRQGGFNVGGEQSGHMILSDYGTTGDGTVAALRVLASVVRFGKPASELLHVFDPVPQLLKNVRYSGGKPLENESVKAVIVEAEKELEGKGRLVIRPSGTEPVIRVMAEGDDARQVETVVDRICDAVREAA

SEQ ID NO: 5907 - DNA, 1335 bp, Moritella sp. PE36
  CDS (1)..(1335): transl_table=11
atgtcaagaaagtattttggtaccgatggtattcgtggtcttgtaggtgtagcgccaatcacacctgagtttgcacttaaactgggttgggctgcaggtaaggtacttgcaaaacaaggcacaagaaaagttctaatcggtaaggatactcgtatttcaggttatatgctggaatgtgcgttagaagcgggtttatctgcggcggggcttgatgtcgcgtttatggggccaatgccaacgccggctgttgcctatttaacgcgtacattccgagcggaagcgggtattgtgatcagtgcatcacacaatccatatcacgataacggcattaagtttttctctgcaaatggtactaagctaccggatgaggttgaactggcgattgaagcgcaattagaaaaagaattaacctgtgttgagtcagctcaattaggtaaagcagttcgtattgaagatgccgcaggtcgttatattgaatattgtaaaagtaccttcccatcacgcgcaagtttgaaggggctgaaaattgtgctcgattgtgcccatggtgcaacttaccatatcgcaccaagcgtatttacagagctcggcgcagagatcattactatcggtgtggagccaaatggtttgaacattaatgatggttgtggtgcaacggcgcctgaagcactagtcgcacgtgtacttgccgaaaaagccgatttaggtgtggcttatgatggtgatggtgatcgcctgatgatggttgatcataccggttatgtgattgatggtgatgaagttctttacattatcgcacgtgatgcactgcgcaacggcgaattaaaaggcggcgttgttggtacattaatggcgaacatgggcttagagctagcacttaagtcactgggtattccgtttgcccgtagtgcggttggcgatcgctatgtggtcgaaatgatgcttgagaaaggttggcgtatcggtggtgaaaattcaggccatattatttctctggatcacaccacaacaggtgacggcattgtatcaagcttattggtattagcggcactggttaatagtggtttaacgctgaaagaattacgctctggtatgagcaaattcccacaagtattggttaacgttcgctttaatggtgataccgatccattattagccgaatcagtactacaggctgttaaggatgtagagcaggaacttgccgatcgcggtcgggtgttattgcgtaaatcgggcaccgaaccacttattcgtgtgatggttgaaggtgaagatgaaacgcatgtattagcattagcaaataaaattgctgatgccgtgaaagcgacattctaa

SEQ ID NO: 5908 - protein, 444 aa, Moritella sp. PE36
MSRKYFGTDGIRGLVGVAPITPEFALKLGWAAGKVLAKQGTRKVLIGKDTRISGYMLECALEAGLSAAGLDVAFMGPMPTPAVAYLTRTFRAEAGIVISASHNPYHDNGIKFFSANGTKLPDEVELAIEAQLEKELTCVESAQLGKAVRIEDAAGRYIEYCKSTFPSRASLKGLKIVLDCAHGATYHIAPSVFTELGAEIITIGVEPNGLNINDGCGATAPEALVARVLAEKADLGVAYDGDGDRLMMVDHTGYVIDGDEVLYIIARDALRNGELKGGVVGTLMANMGLELALKSLGIPFARSAVGDRYVVEMMLEKGWRIGGENSGHIISLDHTTTGDGIVSSLLVLAALVNSGLTLKELRSGMSKFPQVLVNVRFNGDTDPLLAESVLQAVKDVEQELADRGRVLLRKSGTEPLIRVMVEGEDETHVLALANKIADAVKATF

SEQ ID NO: 5909 - DNA, 1344 bp, Rickettsiella grylli
  CDS (1)..(1344): transl_table=11
atgacaaaaattacgctcaactattttgggaccgatgggattcgaggaaaagtaggtgaataccctattactccagaatttatcttaaaactaggctgggctgtaggaaaagttttagataatggacagaataaagtccttatcgggaaagatacccgcctttcaggttatatgcttgaatctgctttagaggcaggtctatctgcagcaggtatcgatatccaccttctcggtcctattccaactccagcgattgcttttttaacttcggatctcggtgcacaagcgggaattgtaatcagcgcatcgcataacccttactatgataatgggattaaatttttttcacatgatgggacaaaattagcggataacattgaatcacaaatcgaaacttatcttactcgaccgtttcaaacggttaattcagctaaattaggaaaagcagttcgagtagaggatgcaaaaattcgttatgtgaatttttgtaaatctacactccctccatcttttcatttaaatgggttaaaaatagtattggactgcgcaaatggatcgacttaccatattgctccgtcgttattttctggcttaggtgctcatcttaccctattagggaccgcgccaaatggcttaaatattaataaaaattgtggctcaacccatttagaaactttacaaaaaactgttttagaaaagaaagcagatttaggtatcgccttcgatggggatggtgatcgtgtactgatggttgattatttgggcgaaattgttgatggtgatgaaatactatttttattaacgcaacacggccttaaaaaaggctatattacgggcggcatcgtaggcactaccatgagtaatcttgggttagaattagcaacaaaaaaattgggacttgattttattcgtaccgcggtaggtgatcgttacgtcaatgaaacattacaacaaaaaaattggcaattaggtggagagccttctggtcatattatctcacgtcgatttactaaaacgggggatgggattattattgcactacaagttctagaagcacttcaattagcagagatacccttgcatattgccaaaaaatcaatgaaaaaatttcctcaagttttaattaatgttcctgcagaaaatccgcttgcaataatgaacgcatctcctctaaaaaaagcaataaaaaagacaaccctacaattaagaaaccacggtcgcctcttagtacgtccttcaggaacagaatctgttgttcgaattatggtcgaagggattgaattatcagaagtacagtctattgcccttaaattagctaaaacagttcaaattttagcacattaa

SEQ ID NO: 5910 - protein, 447 aa, Rickettsiella grylli
MTKITLNYFGTDGIRGKVGEYPITPEFILKLGWAVGKVLDNGQNKVLIGKDTRLSGYMLESALEAGLSAAGIDIHLLGPIPTPAIAFLTSDLGAQAGIVISASHNPYYDNGIKFFSHDGTKLADNIESQIETYLTRPFQTVNSAKLGKAVRVEDAKIRYVNFCKSTLPPSFHLNGLKIVLDCANGSTYHIAPSLFSGLGAHLTLLGTAPNGLNINKNCGSTHLETLQKTVLEKKADLGIAFDGDGDRVLMVDYLGEIVDGDEILFLLTQHGLKKGYITGGIVGTTMSNLGLELATKKLGLDFIRTAVGDRYVNETLQQKNWQLGGEPSGHIISRRFTKTGDGIIIALQVLEALQLAEIPLHIAKKSMKKFPQVLINVPAENPLAIMNASPLKKAIKKTTLQLRNHGRLLVRPSGTESVVRIMVEGIELSEVQSIALKLAKTVQILAH

SEQ ID NO: 5911 - DNA, 1353 bp, Thauera sp. MZ1T
  CDS (1)..(1353): transl_table=11
atggcgcgcaagtatttcggcaccgatggtgtgcgtggcaaggtcggtgatacgccgatcacgcccgagttcgtgatgaggctgggctatgcggccggcgtgaccttggtcgcgcgcgagaagctgcccgcgggcgaacaccccgcggtgctgatcggcaaggacacgcgcatttccggctacatgctcgaagccgcgctcgaggccgggttcgccgcggctggtgtggacgtgatgctggccggaccgatccccaccccggcggtagcctatctcacgcgcgcactgcgcctgcaggccggcgtggtgatctcggcctcgcacaaccccttctacgacaacgggatcaagttcttctccgccgacggcagcaagctgcccgatgcggtcgaggccgagatagaggcccacctcgacgagccgatgggttgtgtggactccgcccgcctgggcaaggcgcgccgcatcgacgacgccgccgggcgctacatcgagttctgcaagagcacctttcccaacgagctcgacctgcgcggcctgcgcatcgcggtggattgcgcgcacggcgcggcctaccagatcgcccccaaggtcttccacgagctcggcgcggagatcatcccggtgggcgtcgagcccaacggcctcaacatcaacgacggcgtcggtgcgacgcggccggagaacctgcggcaggcggtgctcaagcatggcgcggacctgggcatcgcgctcgacggcgacgccgaccgcctgatcatggtggaccatcggggcgagatctacgatggcgacaagctgctctacgtggtggcctgtgcgcgccacgccgaaggccggctggagggcgtggtcggcacgctgatgagcaacctcggcttcgagcacgcgatccagcgcctcggcacgccctttgcacgcgccaaggtgggcgaccgctacgtgctcgagctgctgcaggagcgcggctggaagattggcggcgagaactccggtcacatcatctgcctcgaccgccacacgaccggcgacggcatcgtgtcggcgctgcaagtgctcgccgcgctcaagcagcgcggactttcgctggcggacgcctgcgcggatctggtgttctacccccagcgcctgatcaacgtgcgcatgcctgccggcttcgactggcgtgcggacggctcgatcgcgagcgcacaggccagagccgaacagacgctcggcgatagcgggcgcgtgctgctgcgcccttcgggcaccgagcccctgctgcgcgtgatggtggagggccgcgacggcgagctggtcgagcgtctcgcgcgcgagatcgccggcgtcgtcgaggaagcgatcgcctga

SEQ ID NO: 5912 - protein, 450 aa, Thauera sp. MZ1T
MARKYFGTDGVRGKVGDTPITPEFVMRLGYAAGVTLVAREKLPAGEHPAVLIGKDTRISGYMLEAALEAGFAAAGVDVMLAGPIPTPAVAYLTRALRLQAGVVISASHNPFYDNGIKFFSADGSKLPDAVEAEIEAHLDEPMGCVDSARLGKARRIDDAAGRYIEFCKSTFPNELDLRGLRIAVDCAHGAAYQIAPKVFHELGAEIIPVGVEPNGLNINDGVGATRPENLRQAVLKHGADLGIALDGDADRLIMVDHRGEIYDGDKLLYVVACARHAEGRLEGVVGTLMSNLGFEHAIQRLGTPFARAKVGDRYVLELLQERGWKIGGENSGHIICLDRHTTGDGIVSALQVLAALKQRGLSLADACADLVFYPQRLINVRMPAGFDWRADGSIASAQARAEQTLGDSGRVLLRPSGTEPLLRVMVEGRDGELVERLAREIAGVVEEAIA

SEQ ID NO: 5913 - DNA, 1458 bp, Cyanothece sp. PCC 8801
  CDS (1)..(1458): transl_table=11
atggtcagttccttgtcgcgtaacggaaatagtcatcataatggtgttaatgtcgccataacgtcgggtttttcaacaaaattagcccccctacctaacgggcctttatttggaaccgatgggattcgggggaaagcaggagatttattaaccgccccctttgccctagaattaggattttgggcaggacaagtcctcaaagccaataaagtgaccccaggaccggttattattggccaagattcgcgtaactctagcgatatgttagcgatggccatggctgccgggttaacctctgccgggttagaagtctggaatttaggcttgtgcccaactccgtgtgtcgcccatttaacccgcattagtcaagctatgggtggtattatgatttctgcgagtcataacccccccgaagacaacggaatcaagttttttaaccacgaaggcacaaaattaagccaaacccttgcacaacaaattgaagacggactgcggggtcatctttcttttgatcgcgatcgcaatagagaatgggggaaaacctatcatcaagcgaatttagtcgatacttactgtcaatttttacaggaaaccctgcccgaaaacctggacttacagggaatgcgcgttgttttagacctcgcttggggagcatcggtggaagtcgccccgaaactgtttaaagccttgggggctgaggtcatttgtttacacgatcgccccgacggcaatcgcattaatgtcaattgtggatcgacccatttagacctactgcaacaagccatcaaggaacatcaagcagacttagggtttgcttttgatggagatgctgaccgtgtgatggctgtcgatagtcaaggccgggttgtagatggggactacattctttatctgtggggtaaacatctgctagaacaaggaaaattgccccataatctgctgattgggacggtcatggcgaatttaggctttgaacgggcttgggaggcattagggggtcaactgatgcggacagcagtaggcgatcgccatgttcaagcgcaaatgtgggaaactggggcaatacttgggggagaacagtcgggacatatcatctgtcatcaccacagtttttctggggatggggttcaaaccgcccttcatttagcggctttagttcgtcagtctggagagtccctagcgacgttggttaacgagagtttccaaacctatccccaaattctacggaatattcgggttgaagaccgcgatcgtcgtcgttattggcaagaatgtacgccagtgatggaagcagttaaccaagcagaagcagccatgggcaatacgggtcggatcttggttcgtccgtcaggaactgaacccctaattcgggtgatggttgagtcttgcagtgctgatgatgctaattattgggttaattatctggttaatgtggttgaacaacatttagctaattga

SEQ ID NO: 5914 - protein, 485 aa, Cyanothece sp. PCC 8801
MVSSLSRNGNSHHNGVNVAITSGFSTKLAPLPNGPLFGTDGIRGKAGDLLTAPFALELGFWAGQVLKANKVTPGPVIIGQDSRNSSDMLAMAMAAGLTSAGLEVWNLGLCPTPCVAHLTRISQAMGGIMISASHNPPEDNGIKFFNHEGTKLSQTLAQQIEDGLRGHLSFDRDRNREWGKTYHQANLVDTYCQFLQETLPENLDLQGMRVVLDLAWGASVEVAPKLFKALGAEVICLHDRPDGNRINVNCGSTHLDLLQQAIKEHQADLGFAFDGDADRVMAVDSQGRVVDGDYILYLWGKHLLEQGKLPHNLLIGTVMANLGFERAWEALGGQLMRTAVGDRHVQAQMWETGAILGGEQSGHIICHHHSFSGDGVQTALHLAALVRQSGESLATLVNESFQTYPQILRNIRVEDRDRRRYWQECTPVMEAVNQAEAAMGNTGRILVRPSGTEPLIRVMVESCSADDANYWVNYLVNVVEQHLAN

SEQ ID NO: 5915 - DNA, 1464 bp, Cyanothece sp. PCC 7424
  CDS (1)..(1464): transl_table=11
atggtaacttctttatatcgaaatggtaacggtcgtttaaatagctacactcaagatacagcaaaccttggtgtagtcaatcagctttgccctctgcctaaaactcctctatttggaacggatggtattcgaggaaaagtcggtgaacttttaaatgcgtctttagctttagatttaggattttgtgcggcacaagtgttaaaagccactatgccaaccccagggccgattattattggtcaagattcgagaaattctagtgatatgttaacaacggctatcaccgccggcttaacctctgccggtgtcgaagtttggcagattggcctatgtccgactccctgtgtggcttacttagcgcgcaatactgaggcaatgggaggaattatgatttctgccagccacaaccctcccgaagataacggaattaagttttttgaccatcaaggattaaaactctccaaaggattagcgcaacaagtagaagatcttctcagaaacacccttgaatctaactctcaacgggaatcttccttaagttggggtaaatattatcatcgtcgagaattaattgagcagtatttacagcagttaagcttatctatccccacagatgttaacttagaaggaatgcgaattgtcttagatttggcttggggtgctgcggtagaaattgctccccaagtttttaagtctttgggtgcagaggtgatctgtttacacgatcaacccgatggcgatcgcattaatgttaactgtgggtctactcatttaaatttattacaacaagcggttaaagaatttggggcagatttaggggttgcctttgatggagatgccgatcgggtgttagcggtagattctgaagggagagtagtcgatggggattatattctctatttttggggtcaaaccctcaaagctcaagataaattgcccaacaatttaattattgccacagtcatggctaatttaggctttgagaaagcgtggcaaaatcttgggggtcaattaattcgtactgcggtaggggatcagcacgttcaagctcaaatgtgggaaaccggagcaatgttagggggtgaacagtctggccatattatctgtcatcatcatggggtttctggggatggcattcaaaccgccttacatttggccgctttagtgcgtcagtcgggacggtctttaggcgctttagttgagcaaagttttcagccttacccccaaattttacgcaatgttcgggtagaagaccgagaacgtcgctgtaattggaaagactgtaaccctctccaaattgcgatcgctgaagctcaagccgctatgggagatcgaggacgagttttagttcgagcttccggaacagaacccttaattcgggttatggtagagtccgaatgtgcccagtccgctaactattggacagagcatttaatcggtgtggttcagaaatatttagcttaa

SEQ ID NO: 5916 - protein, 487 aa, Cyanothece sp. PCC 7424
MVTSLYRNGNGRLNSYTQDTANLGVVNQLCPLPKTPLFGTDGIRGKVGELLNASLALDLGFCAAQVLKATMPTPGPIIIGQDSRNSSDMLTTAITAGLTSAGVEVWQIGLCPTPCVAYLARNTEAMGGIMISASHNPPEDNGIKFFDHQGLKLSKGLAQQVEDLLRNTLESNSQRESSLSWGKYYHRRELIEQYLQQLSLSIPTDVNLEGMRIVLDLAWGAAVEIAPQVFKSLGAEVICLHDQPDGDRINVNCGSTHLNLLQQAVKEFGADLGVAFDGDADRVLAVDSEGRVVDGDYILYFWGQTLKAQDKLPNNLIIATVMANLGFEKAWQNLGGQLIRTAVGDQHVQAQMWETGAMLGGEQSGHIICHHHGVSGDGIQTALHLAALVRQSGRSLGALVEQSFQPYPQILRNVRVEDRERRCNWKDCNPLQIAIAEAQAAMGDRGRVLVRASGTEPLIRVMVESECAQSANYWTEHLIGVVQKYLA

SEQ ID NO: 5917 - DNA, 1338 bp, Enterobacter sp
  CDS (1)..(1338): transl_table=11
atgagtaatcgtaaatatttcggtaccgatgggattcgtggtcgtgtaggggatgcgccgatcacacctgattttgtgcttaagctgggttgggccgcgggtaaagtgctggcgcgccacggctcccgtaagattattattggtaaagacacgcgtatttctggctatatgctggagtcagcactggaagcgggtctggcggcagcgggcctttccgcactcttcactggcccgatgccaacaccggccgtggcttatctgacgcgtaccttccgcgcagaggccggaattgtgatatctgcatcgcataacccgttctacgataatggcattaaattcttctctatcgacggcaccaaactgccggatgcggtagaagaggccatcgaagcggaaatggaaaaggagatcagctgcgttgattcggcaggactgggtaaagccagccgtatcgttgatgccgcgggtcgctatatcgagttttgcaaagccacgttcccgaacgaacttagcctcagtgaactgaagattgtggtggattgtgcaaacggtgcgacttatcacatcgcgccgaacgtgctgcgcgaactgggggcgaacgttatcgctatcggttgtgagccaaacggtgtaaacatcaatgccgaagtgggggctaccgacgttcgcgcgctccaggctcgtgtgctggctgaaaaagcggatctcggtattgccttcgacggcgatggcgatcgcgtgattatggttgaccatgaaggcaataaagtcgatggcgatcagatcatgtatatcatcgcgcgtgaaggtcttcgtcagggccagctgcgtggtggcgctgtgggtacattgatgagcaacatggggcttgaactggcgctgaaacagttaggaattccatttgcgcgcgcgaaagtgggtgaccgctacgtactggaaaaaatgcaggagaaaggctggcgtatcggtgcagagaattccggtcatgtgatcctgctggataaaactactaccggtgacggcatcgttgctggcttgcaggtgctggcggcgatggcacgtaaccatatgagcctgcacgacctttgcagcggcatgaaaatgttcccgcagattctggttaacgtacgttacaccgcaggtagcggcgatccacttgagcatgagtcagttaaagccgtgaccgcagaggttgaagctgcgctgggcaaccgtggacgcgtgttgctgcgtaaatccggcaccgaaccgttaattcgcgtgatggtggaaggcgaagacgaagcgcaggtgactgaatttgcacaccgcatctccgatgcagtaaaagccgtttaa

SEQ ID NO: 5918 - protein, 445 aa, Enterobacter sp
MSNRKYFGTDGIRGRVGDAPITPDFVLKLGWAAGKVLARHGSRKIIIGKDTRISGYMLESALEAGLAAAGLSALFTGPMPTPAVAYLTRTFRAEAGIVISASHNPFYDNGIKFFSIDGTKLPDAVEEAIEAEMEKEISCVDSAGLGKASRIVDAAGRYIEFCKATFPNELSLSELKIVVDCANGATYHIAPNVLRELGANVIAIGCEPNGVNINAEVGATDVRALQARVLAEKADLGIAFDGDGDRVIMVDHEGNKVDGDQIMYIIAREGLRQGQLRGGAVGTLMSNMGLELALKQLGIPFARAKVGDRYVLEKMQEKGWRIGAENSGHVILLDKTTTGDGIVAGLQVLAAMARNHMSLHDLCSGMKMFPQILVNVRYTAGSGDPLEHESVKAVTAEVEAALGNRGRVLLRKSGTEPLIRVMVEGEDEAQVTEFAHRISDAVKAV

SEQ ID NO: 5919 - DNA, 1353 bp, Magnetospirillum gryphiswaldense
  CDS (1)..(1353): transl_table=11
atgacgcgcaagctgttcggcaccgatggcatccggggtacggccaatatcgaccccatgaccgccgagatggcgttgaagctgggcatggccgccggtcggcatttcacccggggcgagcaccgccatatggtggtcatcggcaaggacacccgtctgtccggttacctgctggagccggcgctgaccgccggtttcatcgcggtgggcatggacgtggtgctgttggggccgctgccgaccccggcggtggccatgctgacccggtcgttgcgcgccgatctcggcgtgatgatttccgcctcgcacaatgcctatcaggataacggcatcaagctgttcggccccgacggtttcaaactgtcggacgaggacgagatcgagatcgaacacaagatgttcaacggtctggaagcctatcgcgtcggttccgaccatctgggcaaggccaagcgcctggatgacgccgtcggtcgttatatcgaatacgccaaaagcagctttccccgcggtctgcgtctggatgggctgaagatcgtcgtcgattgcgccaacggcgccgcctacaaggtcgcgcccaccgtgttatgggaattgggggccgaggtgatcccgctggcggtgtcgcccgacggcttcaatatcaacaaggattgcggttcgctgcatacccagacgctgcagacccaggtggtggcccatggtgcccatctgggcatcgcccttgatggcgacgccgaccggctggtgctgtgcgacgaaaagggcacggtcatcgacggcgatcaggtcatgggcctgatcggcctgaccctggccaagtccggcaaattgactggcggcggcatcgtcgccaccgtcatgtccaatatggggctggaaaagcatctggccggtcacggtctgcacttgcaccgcaccaatgtgggcgaccgctatgtgctggagcgcatgcgccgtgacggcttcaacgtcggcggtgaacaatcgggccacatcatcctgtccgaccattccaccaccggcgacggtctggtggcggctttgcaggtgctggcggcgctggtggaggcggacaagccggccagccaagtgctgcacctgttcgatccgtttccccaggttttgaaaaatgtccgtgtcgccggcaagcccgatgcggtgctggcgttggacggtgtccaggcggccatcgccgccggcgaggcccggctgaacggcaccggtcgggtgctgatccgcaagtcgggcaccgaaccgctgatccgggtgatggccgagggcgaggacaaggccttggtcgacaccgtggtcgacgacatcgtcgccaccatcagcgcggcggcgggctaa

SEQ ID NO: 5920 - protein, 450 aa, Magnetospirillum gryphiswaldense
MTRKLFGTDGIRGTANIDPMTAEMALKLGMAAGRHFTRGEHRHMVVIGKDTRLSGYLLEPALTAGFIAVGMDVVLLGPLPTPAVAMLTRSLRADLGVMISASHNAYQDNGIKLFGPDGFKLSDEDEIEIEHKMFNGLEAYRVGSDHLGKAKRLDDAVGRYIEYAKSSFPRGLRLDGLKIVVDCANGAAYKVAPTVLWELGAEVIPLAVSPDGFNINKDCGSLHTQTLQTQVVAHGAHLGIALDGDADRLVLCDEKGTVIDGDQVMGLIGLTLAKSGKLTGGGIVATVMSNMGLEKHLAGHGLHLHRTNVGDRYVLERMRRDGFNVGGEQSGHIILSDHSTTGDGLVAALQVLAALVEADKPASQVLHLFDPFPQVLKNVRVAGKPDAVLALDGVQAAIAAGEARLNGTGRVLIRKSGTEPLIRVMAEGEDKALVDTVVDDIVATISAAAG

SEQ ID NO: 5921 - DNA, 1371 bp, Microcystis aeruginosa PCC 7806
  CDS (1)..(1371): transl_table=11
ttgatcgaattaccgtcatcacccctgttcggcacggacggaattcgcggccaagtgggagaattattaactgcccccctagcgctacaaatcggattttgggcgggacaggtattaaaaaatcaagctggtgtcaccaaaccagtaattatcggtcaagattcccgtaattccagtgatatgttagccaatgctatcactgcgggtttaacttgggcgggaatagaagtctggcaactgggattatgtcccactccctgcgtcgcctatttaaccagagaaagcgaagcgatgggggggatcatgatttctgccagtcataatcctcctgaagataacggcattaaattttttgacggcagcggtttaaaattgtctggcagtttagccgcacagatagaagcgggtttaaggggcaatttagaattagcagataaaccagtaaattggggaaaagcaactttttgtcccgaattaatccaaaaatattatcaagctgtcattgattccgtcgggaaggatattaacctatcgggattaaaaatagttttggatctagcttggggggcagccgttaacctagcacctttagtattccaaaccttgggggcggaagttatctgcctacacgatcgagccgatggcgatcgcattaatgttaattgtggttctacccatttggaacgcttacaggcggcggtgattaatcagcaagcggatttagggtttgctttcgatggcgatgccgatcgagtcttggccgtggatagtcagggtagagtagtagatggcgattatatcctctatttttggggtcgttccctcctagaagccggacagctaccggatgggttattagtagcaacggtgatggctaatttaggctttgaacgcgcttggcaaaaactggggggtcaattcttgcggactgccgtgggtgatcagcacgttcaggcgcaaatgtgggaaactggggccatgctagggggtgaacaatccggccatattctctgccatcattacggagtttctggggatggaatgcaaaccgccctacatttagcggttttagtgcagaaatcggcggtttccttggctaatttagtcgatcatagctttgtcacctatccgcagattttacgcaatgtgcgggtggaagatagagaagtgcgacgtaattggcagcaatgtgaacctttgcgacgggaaatctgccaagctgagacagccatggcggaaaaaggccgaattttggtgcgagcttccgggacagaaccgttaattcgggtaatggtggaagcagaaaccctcgaattagccagtttttggacagaaaggctcgtagaagcggtgcgaagctatcttttgtag

SEQ ID NO: 5922 - protein, 456 aa, Microcystis aeruginosa PCC 7806
MIELPSSPLFGTDGIRGQVGELLTAPLALQIGFWAGQVLKNQAGVTKPVIIGQDSRNSSDMLANAITAGLTWAGIEVWQLGLCPTPCVAYLTRESEAMGGIMISASHNPPEDNGIKFFDGSGLKLSGSLAAQIEAGLRGNLELADKPVNWGKATFCPELIQKYYQAVIDSVGKDINLSGLKIVLDLAWGAAVNLAPLVFQTLGAEVICLHDRADGDRINVNCGSTHLERLQAAVINQQADLGFAFDGDADRVLAVDSQGRVVDGDYILYFWGRSLLEAGQLPDGLLVATVMANLGFERAWQKLGGQFLRTAVGDQHVQAQMWETGAMLGGEQSGHILCHHYGVSGDGMQTALHLAVLVQKSAVSLANLVDHSFVTYPQILRNVRVEDREVRRNWQQCEPLRREICQAETAMAEKGRILVRASGTEPLIRVMVEAETLELASFWTERLVEAVRSYLL

SEQ ID NO: 5923 - DNA, 1287 bp, Thermotoga sp
  CDS (1)..(1287): transl_table=11
gtgaaggtgaggtacttcggaaccgacgggataaggggtgttttcggggataccctgaccgatgaactggcgtttaaggtaggaaaggcgctgggagagatcgtcggagaaggaaaagttctcataggaaaggacacaagggtttctggggattctctggaggcggccctcgccgcagggctcacctcgatgggtgtcgatgttctctcctgtggaatccttcccacacctgctgtggcccttctcacaaggatcacaaggtcctacggtgtggttatctcggcctctcacaatccaccagagtacaacggtataaaggtcctgaaaaacggttacaagataccggacgagttggaggaagagatagagaggagaatggaaggagagtttcagagacggtacgtcgtggggaagatcaagtctttcagggaaggaaaagatatgtacatcggtgccgttcttgagatgttcaaagatcttgacctttccggaaagagcgtttcccttgatcttgccaacggcgccacaacgaccacggcgaaagacgtgttcgagttcctcggtgccgaggttgaggttttcaactcctctcaggacggtcttctcataaatcagggctgcggtgccactcacccgaaatttctcgcagaggagatgaagaggggtagaataggtttttccttcgatggtgatggtgatcgtgtgatcgctgtagacgaggaaagaaacgtggtgaacggcgataagatcataggaatactggcagagggaatgatggaggaaggaagactgagggaatccgtcgttgtaggaaccatcatgaccaacggggggctcgaggagtatctgaggaaacggggaatagaacttgttcgaacgaaggtgggagacaagtacgttctggaggaaatgctgaagtcaggggcaaatctcggtggtgaaagatcggggcacatcataatcctcgacagaagcacaacgggagatggtctcataaccgctctggaactgatgagagtcgttgaaaggttgaagaagaatctctcagatcttgcaaaagagataccggatcttccacagatcaccagaaacgtgaggaggacggagaaaacctctctagaaaatggaagattgagagagttgatcgaaaggtacagtgccgagggttataggatcgtggtgagaccgtccgggacagaacccgtcgtaaggatcaccgtcgagggaaaagatagaaacagagtggaagagattgcggaagaactttcaaggattctcgagggttga

SEQ ID NO: 5924 - protein, 428 aa, Thermotoga sp
MKVRYFGTDGIRGVFGDTLTDELAFKVGKALGEIVGEGKVLIGKDTRVSGDSLEAALAAGLTSMGVDVLSCGILPTPAVALLTRITRSYGVVISASHNPPEYNGIKVLKNGYKIPDELEEEIERRMEGEFQRRYVVGKIKSFREGKDMYIGAVLEMFKDLDLSGKSVSLDLANGATTTTAKDVFEFLGAEVEVFNSSQDGLLINQGCGATHPKFLAEEMKRGRIGFSFDGDGDRVIAVDEERNVVNGDKIIGILAEGMMEEGRLRESVVVGTIMTNGGLEEYLRKRGIELVRTKVGDKYVLEEMLKSGANLGGERSGHIIILDRSTTGDGLITALELMRVVERLKKNLSDLAKEIPDLPQITRNVRRTEKTSLENGRLRELIERYSAEGYRIVVRPSGTEPVVRITVEGKDRNRVEEIAEELSRILEG

SEQ ID NO: 5925 - DNA, 1338 bp, Shewanella sp
  CDS (1)..(1338): transl_table=11
atgagcgaacgtaaattttttggaaccgatggtattcgtggcaaggtaggttcaggccagatgactcccgagctggcattaaagttaggttgggctgctggacgtgtgttatcccgcagcggcacaaacaaagtgattattggtaaagatacccgtatttccggttatatgtttgagtctgccttagaggcaggcctttcggcagcgggcctcaatgtaatgttaatggggccaatgccaacacccgctgtggcttatctcactcgtacatttcgcgccgaagcgggtgtggtgatcagtgcatcccacaatccatactatgataacggcattaaatttttctccaatgatggcagcaagctcgatgataacttagagcttgaaattgaagccgaattagaaaagcccttagagtgtgttgagtcgcatttattgggcaaagtgtcacgcattgaagatgcgcgtggccgctatatcgaatattgcaagggtaacttccctgcggatcaaaccctaacagggttaaaaattgtcgtggactgtgctcacggtgcgacctatcacattgcacctgcggtatttcgtgagttaggtgcagaggtgattgctattggtgataagcccaatggcgttaacatcaatgacaaagtgggcgccacgtccatggcgaaaatttgtgaaaccgtattaaccgaaggcgccgatttagggattgcgcttgatggtgacggcgaccgtattatgatggtcaacagccgcggtgaagtgatcgatggcgaccaaattctctatattctggcctgtgatgctaaggctcgtggcgtgctgcgcggtggcgttgtagggacgctcatgtctaatctcggtctcgatttagccctgcaagccttagatattccttttgctcgctctaaagtgggtgaccgttatgtgatggagttactgaaagaactcgattggcgcatcggcggtgaaaactcgggccacattctaaacctcgaccatggcacgacgggtgatggtatcgtggcggggatcttggtgctggcggcaatgcgtcgacaaaatgccactttagagcaactcactgccccgatggagatgttgccacaagtgttagtgaatgtgcgttttgagggggaacacgacccattaagctcagataaagtcaaagccgctcaagctctggttgaatcacaactgggtgcccgaggtcgcgtattactacgtaaatcaggtactgaaccgttaattcgcgtaatggttgaaggtgatgatcacaatactgtgttagcgcacgccaatttgattgcagatgcggtaaaatcggcgagctaa

SEQ ID NO: 5926 - protein, 445 aa, Shewanella sp
MSERKFFGTDGIRGKVGSGQMTPELALKLGWAAGRVLSRSGTNKVIIGKDTRISGYMFESALEAGLSAAGLNVMLMGPMPTPAVAYLTRTFRAEAGVVISASHNPYYDNGIKFFSNDGSKLDDNLELEIEAELEKPLECVESHLLGKVSRIEDARGRYIEYCKGNFPADQTLTGLKIVVDCAHGATYHIAPAVFRELGAEVIAIGDKPNGVNINDKVGATSMAKICETVLTEGADLGIALDGDGDRIMMVNSRGEVIDGDQILYILACDAKARGVLRGGVVGTLMSNLGLDLALQALDIPFARSKVGDRYVMELLKELDWRIGGENSGHILNLDHGTTGDGIVAGILVLAAMRRQNATLEQLTAPMEMLPQVLVNVRFEGEHDPLSSDKVKAAQALVESQLGARGRVLLRKSGTEPLIRVMVEGDDHNTVLAHANLIADAVKSAS

SEQ ID NO: 5927 - DNA, 1338 bp, Shewanella sp
  CDS (1)..(1338): transl_table=11
atgagcgaacgtaaattttttggaaccgatggtattcgtggcaaggtaggttcaggccagatgactcccgagctggcattaaagttggggtgggctgctggacgtgtgttatcccgcagcggcacaaacaaagtgattattggtaaagatacccgtatttccggttatatgtttgagtctgccttagaggcaggcctttcggctgcgggcctcaatgtgatgttaatgggacccatgccaacacccgctgtggcatatcttactcgcactttccgcgccgaagcgggtgtggtgatcagtgcatcccacaatccatactatgataacggcattaaatttttctccaatgatggcagcaagctcgatgataacttagagctcgaaattgaagccgaattagaaaagcccttagagtgtgttgagtcgcatttattgggcaaagtgtcacgcattgaagatgcccgtggtcgttatatcgaatattgcaagggtaacttccctgcggatcaaaccctaacagggttaaaaattgtggtggactgtgctcacggtgcgacctatcacattgcacctgcggtattccgtgagttaggtgcagaggtgattgctattggtgataagcccaatggcgttaacatcaatgacaaagtgggcgccacgtccatggcgaaaatttgtgaaaccgtattaaccgaaggcgccgatttagggattgctcttgatggtgacggcgaccgtattatgatggtcaacagccgcggtgaagtcatcgacggcgatcaaattctatatattctggcctgtgatgctaaggctcgtggcgtgctgcgcggtggcgttgtagggacgctcatgtctaatctcggtctcgatttagccctgcaagccttagatattccttttgctcgctctaaagtgggtgaccgttatgtgatggagttactgaaagagctcgattggcgcatcggcggtgaaaactcgggtcacattctaaacctcgaccatggcacgacgggtgatggtatcgtggcggggatcttggtgctggcggcaatgcgtcgacaaaatgccactttagaacaacttactgccccgatggagatgctgccacaggtgttagtcaatgtgcgttttgagggcgaacacgaccctttaagctctgataaagttaaagccgctcaagctcaggttgaatcacaactgggtgcccgaggtcgcgtattgctacgtaaatcaggtactgaaccgttaattcgcgtgatggttgaaggcgatgatcacaatactgtgttagcgcacgccaatttgatcgcagatgcggtaaaatcggcgagctaa

SEQ ID NO: 5928 - protein, 445 aa, Shewanella sp
MSERKFFGTDGIRGKVGSGQMTPELALKLGWAAGRVLSRSGTNKVIIGKDTRISGYMFESALEAGLSAAGLNVMLMGPMPTPAVAYLTRTFRAEAGVVISASHNPYYDNGIKFFSNDGSKLDDNLELEIEAELEKPLECVESHLLGKVSRIEDARGRYIEYCKGNFPADQTLTGLKIVVDCAHGATYHIAPAVFRELGAEVIAIGDKPNGVNINDKVGATSMAKICETVLTEGADLGIALDGDGDRIMMVNSRGEVIDGDQILYILACDAKARGVLRGGVVGTLMSNLGLDLALQALDIPFARSKVGDRYVMELLKELDWRIGGENSGHILNLDHGTTGDGIVAGILVLAAMRRQNATLEQLTAPMEMLPQVLVNVRFEGEHDPLSSDKVKAAQAQVESQLGARGRVLLRKSGTEPLIRVMVEGDDHNTVLAHANLIADAVKSAS

SEQ ID NO: 5929 - DNA, 1353 bp, Shewanella sp
  CDS (1)..(1353): transl_table=11
atgtctaggaagtattttggtaccgatggtgtgcgcggcaaggtagggacatttcctattactcctgactttgcgatgaggttaggttgggcggctgggacggtacttgcatctactggcacgaaagaagtgttgattggtaaagatacccgaattagcggttatatgctggaatccgcaatggaagcgggtttttctgctgctggtgtaaatgtggctttgattggcccgatgccaacgcctgctgtggcgtatttagcttcaacctttagagctgacgctggcgtggtgatcagtgcttcccataaccctttttatgataacggtattaagtttttttcaaacacaggtaccaagctaaatgatgcacaagagcttgaaattgaagcgctgttagaacaagcgctggagcataatgcgttgcaatgtgttgcttctgaaaagctaggcaaagtgcgccgtattgatgatgctgcgggtcgttatattgagttttgtaagggaaccttccctaatcatttaagcctggcgggattaaagattgttgtcgatagtgctcatggcgctgcctaccatattgcaccgaacgtttaccgtgagttaggggctgaggtgatcagtattaatgacaaacccaacggcgtgaacattaacgatcattgcggtgcgacacatttagatagcttgcaatctgcggtgatgatccacgaagcggatttaggtattgcgctcgatggtgatgccgaccgagtgatgtttgttgaccataatggtcatgtggttgatggcgatgagattttgtttattttggcgcaagcggcttatcaaaaaggtgagatgcagggcggggtagttggcacgttaatgtcaaaccttggtttagaactggcactcaaaggaatggatataccctttgtgcgagctaaagttggtgaccgctatgttgttgaacaactcaaagaaacaggttggcagttgggtggtgaaggttctggccatattttgagtttaaaacatgcttctactggggatggtatagtggcttctttacaggtacttaaagccgttctagagtcaggcaaacgtttagctgaactaaaagcggagatgactaaattaccacaggtgcttatcaatgtacgtttaacatcgggttgcgcagatagtattttaagcaaagacagtgttaaacaggcagtgatagccgctgaagaagtattaggaaatcaaggtcgtgtattgctacgaaaatcaggaacagagcctttaatccgagtgatggtggagtcaacggatattagcttgactcaacaacaagctgaatatatcgctcaggccgttaaagtggcatag

SEQ ID NO: 5930 - protein, 450 aa, Shewanella sp
MSRKYFGTDGVRGKVGTFPITPDFAMRLGWAAGTVLASTGTKEVLIGKDTRISGYMLESAMEAGFSAAGVNVALIGPMPTPAVAYLASTFRADAGVVISASHNPFYDNGIKFFSNTGTKLNDAQELEIEALLEQALEHNALQCVASEKLGKVRRIDDAAGRYIEFCKGTFPNHLSLAGLKIVVDSAHGAAYHIAPNVYRELGAEVISINDKPNGVNINDHCGATHLDSLQSAVMIHEADLGIALDGDADRVMFVDHNGHVVDGDEILFILAQAAYQKGEMQGGVVGTLMSNLGLELALKGMDIPFVRAKVGDRYVVEQLKETGWQLGGEGSGHILSLKHASTGDGIVASLQVLKAVLESGKRLAELKAEMTKLPQVLINVRLTSGCADSILSKDSVKQAVIAAEEVLGNQGRVLLRKSGTEPLIRVMVESTDISLTQQQAEYIAQAVKVA

SEQ ID NO: 5931 - DNA, 1353 bp, Shewanella sp
  CDS (1)..(1353): transl_table=11
atgtctaggaagtattttggtactgatggtgtgcgtggcaaagtaggtactttccctattacgcctgattttgcgatgaagttaggttgggctgctgggacggtacttgcatctactggtacgaaagaagttctcattggcaaagatactcgcattagcggttatatgctggaatcggcaatggaagcgggtttttctgctgctggtgtaaatgtggctttgattggccccatgccaacgcctgctgtggcgtatttagcttcaacctttagagctgacgctggcgtggtgatcagtgcttctcataatcctttttatgataacggtattaagtttttttcaaacacaggtaccaagctaaatgatgcacaagagcttgaaattgaagctctattagaacaagcgctggaacataatgcgttgcaatgtgttgcttctgaaaagctaggcaaagtgcgccgtattgatgatgctgcgggtcgttatattgagttttgtaagggaaccttccctaatcatttaagcctggcgggattaaagattgttgtcgatagtgctcatggcgctgcctaccatattgcaccgaacgtttaccgtgagttaggggctgaggtgatcagtattaatgacaaacccaacggcgtgaacattaacgatcattgcggtgcgacacatttagatagcttgcaatctgcggtgatgatccacgaagcggatttaggtattgcgctcgatggtgatgccgaccgagtgatgtttgttgaccataatggccatgttgttgatggcgatgagattttatttatattggcgcaagcggcttatcaaaaaggtgaaatgcagggcggggtagtaggcacgttaatgtcaaatcttggtttagagctagcgcttaaacaaatgggcattccctttttgcgggctaaagttggtgaccgttatgtggttgagcagcttaaagaaacgggttggcaactgggtggtgaaggttctgggcatattttaagtctgcaacacgcttcaacgggtgatggtattgtggcgtccttgcaggtacttaaagccattttagagtcgggtaaacgtttagctgaactaaaagctgggatgactaaattgccacaagtgcttatcaatgtgcgtttaacctcgggtagcgctgatagtattttgagcaaagatagtgttaagcaggccgtgattaccgcagaggaagtattaggtaaccaaggtcgagtgttgttacgcaaatcaggaactgagcccttaatccgggtgatggtagagtcaacggatattagcttgactcaacaacaagccgaatatatcgctcaggccgttaaagtggcatag

SEQ ID NO: 5932 - protein, 450 aa, Shewanella sp
MSRKYFGTDGVRGKVGTFPITPDFAMKLGWAAGTVLASTGTKEVLIGKDTRISGYMLESAMEAGFSAAGVNVALIGPMPTPAVAYLASTFRADAGVVISASHNPFYDNGIKFFSNTGTKLNDAQELEIEALLEQALEHNALQCVASEKLGKVRRIDDAAGRYIEFCKGTFPNHLSLAGLKIVVDSAHGAAYHIAPNVYRELGAEVISINDKPNGVNINDHCGATHLDSLQSAVMIHEADLGIALDGDADRVMFVDHNGHVVDGDEILFILAQAAYQKGEMQGGVVGTLMSNLGLELALKQMGIPFLRAKVGDRYVVEQLKETGWQLGGEGSGHILSLQHASTGDGIVASLQVLKAILESGKRLAELKAGMTKLPQVLINVRLTSGSADSILSKDSVKQAVITAEEVLGNQGRVLLRKSGTEPLIRVMVESTDISLTQQQAEYIAQAVKVA

SEQ ID NO: 5933 - DNA, 1332 bp, Acinetobacter sp
  CDS (1)..(1332): transl_table=11
atgagttattttggaaccgatggcattcgtggaaaattcggtgagatgccgatcacccctgaatttgcattaaaattagggtttgccgctggaaaagtattaaaacgaacaagtccaattaataagcctattgttgttttgggtaaagatacccgtttatctggttatattttagagtcagctttacaggcaggtttaaatgcggcaggcgtttatgtgcatttactggggcctttgccaacccctgcaattgcgcatctaacgcgtgctttacatgccgatgcaggtattgtgatttctgcatctcataatccctactttgataatggcattaagtttttctctggtgaaggtaaaaaactacctgattcacttcaagatgagattaatcaggaacttgagcacgagttgcatattgaagacaccgcaaatttgggtaaaagtgtgcgtctcatcgatgctaatgggcgctatatcgagttttgtaaatcaacttttccgtatcattttgacttacgaaatctgaccattgtggtggattgtgccaatggtgcagcctataacgtaggtccttcggtttttcgtgagctcggtgcaaaagtgattgcactgtataatgatccgaatggtatgaacatcaatgagcattgtggttcaacccatccagaaaatctgcaaaaagcagtggttcattacaaggccgatttaggcattgcttttgatggtgatgcagaccgagtgattctggttgataaattcggagagttggtcgatggagatcatattctatatatcttggcgactcaggccaaaaagaaacctgctggcattgtcggcacggtcatgagtaatatggctttggaattggctttggcaaaagctgatgtgccgtttatacgcgccaaggtcggagatcgctatgtgttacaggcacttgaagaaaatgattgggtgactggaggcgagccttctggacatattttgaccttagacaagagtacaacgggtgatgccattattgcggcattacaagtgttgacggttatggttgagcaaaataaagctttacatgaactggtaactggttttgaattattcccgcaagtactggtcaatgtgcgtctggatcaaatgatggatccatactcggtccccgccttagtcagtgaatttgaacaggcagaagcacagttgaaaggacgtggacgtctattgattcgtaaatcaggtaccgaacctgtcattcgtgtgatggttgaaggtgacaatcaaaaagaagtcactgacttggctcatcgtttggcagaatctgtacgtacacatgccgcctaa

SEQ ID NO: 5934 - protein, 443 aa, Acinetobacter sp
MSYFGTDGIRGKFGEMPITPEFALKLGFAAGKVLKRTSPINKPIVVLGKDTRLSGYILESALQAGLNAAGVYVHLLGPLPTPAIAHLTRALHADAGIVISASHNPYFDNGIKFFSGEGKKLPDSLQDEINQELEHELHIEDTANLGKSVRLIDANGRYIEFCKSTFPYHFDLRNLTIVVDCANGAAYNVGPSVFRELGAKVIALYNDPNGMNINEHCGSTHPENLQKAVVHYKADLGIAFDGDADRVILVDKFGELVDGDHILYILATQAKKKPAGIVGTVMSNMALELALAKADVPFIRAKVGDRYVLQALEENDWVTGGEPSGHILTLDKSTTGDAIIAALQVLTVMVEQNKALHELVTGFELFPQVLVNVRLDQMMDPYSVPALVSEFEQAEAQLKGRGRLLIRKSGTEPVIRVMVEGDNQKEVTDLAHRLAESVRTHAA

SEQ ID NO: 5935 - DNA, 1392 bp, Acidobacteria bacterium
  CDS (1)..(1392): transl_table=11
ttgtcgttaccaaccatggacaaacctgtacgtcagcttttcggcacagatggaattcgcggggttgccggcgagtatccactcgatccgcatactgtgttcgccattggccgcgcgttgggcgcgcgtctcgtggagaagtaccagaccgctcgcgtgctgattgggcaggacactcgcgaatcaagcgactggatcagccgcgcgcttgcgcgtggcttggagagcgcgaattgcggagttgccagcgccggggtgatcacgacaccgggcgtggcatacctcacgcgcacgcatggattttccgcggggatcgtggtgtcggcgtcgcacaatccgtggaccgataacggcatcaaggtcttcggcgcgaatgggtacaagctctcggacgatatcgagcacgagatcgaagcgcagatcttctatcacctcgaagaactcgagcgcgccgaaagcgaaggcgaaggaccggccatgctgcccggagatgacaaacttcgcgaagattacgcagagtggctgcggtcgcaggtcgagggcacggatttcagcaagttccgcgttctgctcgactgcgcgaatggtgcggcaagttccatcgcgcaccttgtgtttccgaaagtaggagtgttcagcgaattcacgcacatttgtccaacgggacggaacatcaacgcgaattgcggggcgctgcatccggaagaagccgccaagcatgttggacaatcgcgcgggcgattcgatcttgggattacgtttgatggcgatgccgatcgcgctctcttcagtgatggggacggcaatatcgtgaatggcgatgccgtgttgctgctcgcggcacgagatatgaaagcgcgcgggcacctcaaggaagacaccgtcgtggcgacgacgatgtcaaacatggggttggaagcggcgctgaagcgctccgggatccgcatgctgcgcgcggctgtgggcgacaagtacgtgttggaagaaatgaagaagactggcgcgacactcggcggcgaacagtcgggacacattctgttcatggacagtgacgcaacgacgggcgacggtatcctgacggctctgcgagtcctcgaggtattggcgcgatcgggcaagtcactggcggaactgatcgctgatcttaaggtcttcccgcaggtcattcgcaacgtgaaagtaaacgccaagattccgatgaaagaactgcccgcggtaatgagcgcgattgaagctgccgagcaagatcttggcgatagcgggcgcgtggtcgtgcgctactcaggaacggaaaaattggcgcgggtgatgatcgaagcggaatcggaagcgaaaatgaatcagcacgcgaccgcgatcgccgaggcgatccaggaagccatcggaatttag

SEQ ID NO: 5936 - protein, 463 aa, Acidobacteria bacterium
MSLPTMDKPVRQLFGTDGIRGVAGEYPLDPHTVFAIGRALGARLVEKYQTARVLIGQDTRESSDWISRALARGLESANCGVASAGVITTPGVAYLTRTHGFSAGIVVSASHNPWTDNGIKVFGANGYKLSDDIEHEIEAQIFYHLEELERAESEGEGPAMLPGDDKLREDYAEWLRSQVEGTDFSKFRVLLDCANGAASSIAHLVFPKVGVFSEFTHICPTGRNINANCGALHPEEAAKHVGQSRGRFDLGITFDGDADRALFSDGDGNIVNGDAVLLLAARDMKARGHLKEDTVVATTMSNMGLEAALKRSGIRMLRAAVGDKYVLEEMKKTGATLGGEQSGHILFMDSDATTGDGILTALRVLEVLARSGKSLAELIADLKVFPQVIRNVKVNAKIPMKELPAVMSAIEAAEQDLGDSGRVVVRYSGTEKLARVMIEAESEAKMNQHATAIAEAIQEAIGI

SEQ ID NO: 5937 - DNA, 1335 bp, Acidovorax sp
  CDS (1)..(1335): transl_table=11
atgacccgcaagtatttcggcaccgatggcatccgcggcacggtggggcagtcgcccatcacccccgacttcgcgctgcgcttggcacatgcggtagggcgtgtgctgcgccgcacgcaggagcgtcccacggtgctcatcggcaaggacacgcgcatctccggctacatgctggaaagcgcgctggaatcgggcttcaactcggcgggtgtggatgtcgtgctgctggggccgctgcccacgccgggcgtggcctacctcacgcgtgcccagcgtgcgagcctgggcgtggtcatcagcgccagccacaatccataccccgacaacggcatcaagttcttcagtgcgcaaggcaccaagctgcccgacgcatgggaagaagaggtggaagccgccctggagcaaccgcccgtgtgggccgattccgcatcgctgggcaagacgcgacggctggatgacgccgccggccgttacatcgaattctgcaagagcacttttgccaacgacctcaccctgcggggcctgaagatcgtcgtggatgccgcacatggcgcggcttatcacatcgcgcccaaggtgttccatgaactgggggccgaggtcatggcgatcgggtgcgcgcccgatgggctcaacatcaaccatcaggtgggcgccacgcatccggacgcgctggtgcgagccgtgcgtgccaaccatgctgactacggcattgcgctggacggcgacgcggaccgcgtgcaaatggtggatgcggcggggcggcttttcaacggtgacgaactgctctacgtgatggtcgccgcccggctggcgcgcgacgagcatgtgcccggcgtagtcggcaccttgatgaccaacatggccgtggaagaggccctgcagcggcgcggcgtgaaattcatgcgcgccaaggtgggggaccgctatgtgctggaagagctccagcgccagcattggctgttgggcggggagggctcgggccacctgctcgcgctggaccggcacaccacgggcgatggcctgatcagcgcgttgcaggtgttgcaggcgtgcgtgcgcagcggcaaaacgctggcacagctgctcgcggacgtgccgttgtttccccaggtgttgctcaatgtgcgcttgaacccgggccaggactggaaaaccaaccctgtgctcgcggatgccatccgcgacgcagaggccgaattgggcgcccatggccgcgtgctggtacgcgccagcggcacggagccactgttgcgcgtgatggtggaggcacgtgaggccgagcaggcgaaccgctgcgcacaacgcatggcagacgcggcgcgtgcgggctga

SEQ ID NO: 5938 - protein, 444 aa, Acidovorax sp
MTRKYFGTDGIRGTVGQSPITPDFALRLAHAVGRVLRRTQERPTVLIGKDTRISGYMLESALESGFNSAGVDVVLLGPLPTPGVAYLTRAQRASLGVVISASHNPYPDNGIKFFSAQGTKLPDAWEEEVEAALEQPPVWADSASLGKTRRLDDAAGRYIEFCKSTFANDLTLRGLKIVVDAAHGAAYHIAPKVFHELGAEVMAIGCAPDGLNINHQVGATHPDALVRAVRANHADYGIALDGDADRVQMVDAAGRLFNGDELLYVMVAARLARDEHVPGVVGTLMTNMAVEEALQRRGVKFMRAKVGDRYVLEELQRQHWLLGGEGSGHLLALDRHTTGDGLISALQVLQACVRSGKTLAQLLADVPLFPQVLLNVRLNPGQDWKTNPVLADAIRDAEAELGAHGRVLVRASGTEPLLRVMVEAREAEQANRCAQRMADAARAG

SEQ ID NO: 5939 - DNA, 1353 bp, Agrobacterium tumefaciens
  CDS (1)..(1353): transl_table=11
atggcacgccgttatttcggaaccgatggtatccgcggacaatcgaacgtctttcccatgacacctgacctagcgatgcgcgtaggtatcgccgtcggaacgattttccgccgcggccatcatcgccatcgtgtcgtgatcggcaaggatacgcgcctttccggttatatgctggaaaacgcgctggttgccggtttcactgcagccggtctcgatgtcttcctgctcggccctatcccaacgccggccgttgccatgctcacccgctcgctgcgcgcggatatcggtgtgatgatctccgcctcgcacaacccattctccgataacgggattaagcttttcggtcccgatggctataagctctccgatgagctggagctggagatcgaggatcttctcgacaaggatatttatgcccagctggccaagccggccgaaatcggccgcgccaagcgtgtcgatggcgacatctaccggtatatcgaattcgtcaaacgcaccctgccgcgcgatgtgacgctgagcgggttgaggatcgccatcgactgcgccaatggtgccgcctacaaggtggcacccgcagcactctgggaactgggtgctgaagtcgtcaccatcggcaatgagccgaatggcatcaatatcaatctcgaatgtggctccacccatcctgaagcactgcagaaaaagctgcatgaggtccgcgccgatatcggcatcgcgctcgatggcgatgcggaccgcgtcatcatcgttgatgagcgcggcgagatcgtcgatggcgaccagttgatggctgtcatcgccgatagctgggccgccgacaacacattgcgcggcggtggcatcgtggcgaccgtcatgtccaatctcggtctggaacgtttcctcggcgataagggcctcacccttgcccgcaccaaggttggcgaccgctatgtcgtcgagcatatgcgcaaccacaatttcaacgtcggcggtgagcagtccggccatatcgtgctttcggattacggtacgacgggagatggtctggtggcggccttgcaggttctcgccaaggtcaagcgctccggcctcacggtcagcgaagtgtgtcgcaagttcgagcccgtgccgcagcttctgaagaatgtgcgtatttccggcggtaaaccgctggaaaatcccatcgtgctgcaggcgattgccgatgcggaaagcgcgctggccaataatggccgcctcgtcatccgcccttccggcacggagccgctgatccgcgtcatggcggagggcgacgatagcgcaaaggtggaaaagatcgtcaacgatctcgtcggcgtcatctccagtgcccgctcggccgcgtga

SEQ ID NO: 5940 - protein, 450 aa, Agrobacterium tumefaciens
MARRYFGTDGIRGQSNVFPMTPDLAMRVGIAVGTIFRRGHHRHRVVIGKDTRLSGYMLENALVAGFTAAGLDVFLLGPIPTPAVAMLTRSLRADIGVMISASHNPFSDNGIKLFGPDGYKLSDELELEIEDLLDKDIYAQLAKPAEIGRAKRVDGDIYRYIEFVKRTLPRDVTLSGLRIAIDCANGAAYKVAPAALWELGAEVVTIGNEPNGININLECGSTHPEALQKKLHEVRADIGIALDGDADRVIIVDERGEIVDGDQLMAVIADSWAADNTLRGGGIVATVMSNLGLERFLGDKGLTLARTKVGDRYVVEHMRNHNFNVGGEQSGHIVLSDYGTTGDGLVAALQVLAKVKRSGLTVSEVCRKFEPVPQLLKNVRISGGKPLENPIVLQAIADAESALANNGRLVIRPSGTEPLIRVMAEGDDSAKVEKIVNDLVGVISSARSAA

SEQ ID NO: 5941 - DNA, 1356 bp, Alkalilimnicola ehrlichei
  CDS (1)..(1356): transl_table=11
gtgaaaaaggaatactttggcaccgacggcattcgcggcaccgtcggggagccgcccatcaccccggatttcatgctgcatctgggctgggcggccgggcgggttttggcgcgcgccgggcagtcctcggtgttggtcggcaaggacacccggatctccggctacatgctggagtccgccctggagtccggctttgcggccgccggggtcaacgtcaaactgctcgggcccatgcccaccccggccatagcctacctgacacgcactctgcgggccgccgccggggtggtgatcagcgcctcacacaacccccacgaagacaacgggatcaagttcttctccgatgatggggagaagctcgacgatgccaccgagctggccattgaggccgaactgcggcaacccctcaagccggcgccctccgcgcggctggggaaggcctcccggatcaacgacgccccggggcgttatatcgagttctgtaaacgcagctttccctacgaactgagcctgcggggcctgcgcctggtggtcgactgtgccaatggcgccacctaccacgtggcccccgcggtcttccacgagctgggcgccgaggtcatcccgttggccgatgacccggatggtctgaatatcaacgccgactgcggctcgttgcacccgaagggcctccaggccgccgtgcgtgagcacgatgcggacgccggcatcgcctttgacggggatggcgaccgcgtgattatggtggatcaccggggcgaggtggtggacggcgacggtctgctctacatcatcgcccggcagcggatggccaacggcgggcttgccggtccggtggtgggtaccgtcatgagcaacctgggtctggagcagggcatcggccgcttggggctgcccttcctgcgcgccaaggtgggcgaccgttacgtgatggagatgctccgccgtgaaggcggcatcctcggtggtgaatcctccggccacttgatctgcctggaccggaccaccaccggcgacggtattgtctcggcgctgcaggtgctggaggccatggcggcgcaggagcggacgctggcggagctggcggacggtatggaccggctgccgcagatcatggtcaacgtgcccatcagccgcggcgtgccggtccaggaccatgccaccgtcaccgacgccgtgcgcgatgcggaaacccggctcgccggccgcgggcgggtgctgctgaggccctccgggacggagccggtgctgcgggtgatggtcgaggggccggatcaggccgaggtttcagccaccgccgaggccatcgccggcgccgtgcgtgaggcgcacgccaccctgaccgccccccgttaa

SEQ ID NO: 5942 - protein, 451 aa, Alkalilimnicola ehrlichei
MKKEYFGTDGIRGTVGEPPITPDFMLHLGWAAGRVLARAGQSSVLVGKDTRISGYMLESALESGFAAAGVNVKLLGPMPTPAIAYLTRTLRAAAGVVISASHNPHEDNGIKFFSDDGEKLDDATELAIEAELRQPLKPAPSARLGKASRINDAPGRYIEFCKRSFPYELSLRGLRLVVDCANGATYHVAPAVFHELGAEVIPLADDPDGLNINADCGSLHPKGLQAAVREHDADAGIAFDGDGDRVIMVDHRGEVVDGDGLLYIIARQRMANGGLAGPVVGTVMSNLGLEQGIGRLGLPFLRAKVGDRYVMEMLRREGGILGGESSGHLICLDRTTTGDGIVSALQVLEAMAAQERTLAELADGMDRLPQIMVNVPISRGVPVQDHATVTDAVRDAETRLAGRGRVLLRPSGTEPVLRVMVEGPDQAEVSATAEAIAGAVREAHATLTAPR

SEQ ID NO: 5943 - DNA, 1359 bp, Anaplasma marginale
  CDS (1)..(1359): transl_table=11
gtgaatatttttggtacagacggggttagaggtagggctaatgtataccccatggacccaataaccgtacttaggcttgggatggccatagggcttgaagccagaaaggttggaactcaagtggttttgggcaaggatactagaatttcgggatatatggtagagtccgcattggtttctgggctggttgccatgggcgtcaacgtgggcctattggggccaatgcccactgcggccatagctacgcttgtcagaaacctacgtgccagcatgggcgttgtgatttccgcttcacacaactcgtatttggataatggagtgaagatattcgacagcgaggggataaaaatacccctggagctggaagaagtgctcgaatctaacgtgcgtgccgagctgagcagcgaccttgcccaagtacgtggtatgggtaaggtgtataggatagctggtgcggttgggagatacatagagtttgtgaaaggcacatttcctaaaaggctgaagctgtccggcatgaagatagtggtagattgcgcgaacggcgccgcataccacataggtggcgaagtattctgggaattaggggcagatgtggtggttattggaaacaagcctgatgggctaaacataaaccacaattgtgggtctttacatcctgagggtatggtacaaaaagtattggaagagggggcagatattggcattgccctggacggagacgctgatcgcgttgttgtgtgtgatgaaaagggcagactcgttgatggagatcaggtaatagcgtcaatcatgcggcacttgcgcgcgaccaagtctattaccgacgcagcggtgactactatgtcgagtaagtcaatagatagctatgctagagagctgggcgtgaggctgcacaggtcggaagtgggtgatcgtcaccttgtggacacaatgcgacgacactcgtgtagcgttggaggagagaagtctggacacattattttgtgggagcattccacaactagcgacagcctggtcgccgcgctgcaaattttgtcaataatgcttttggagaataaaagcgcgagttcaatatttggtgattttgttccaatgcctagagtgcatagggacataccctatagtatggagtttgatcacatagcgcggctgatagggcctactttgtcagatgtagaacaagcgctggggagagtaaatggcagggtaatatttagaaggtctggaactgagcggcttataagatgtgtgatcgagggagaagatcccaagttggtggcattggttgcggacgagctttccataaaactgcgcgagttgggcgtggaaaacggtgttgagccagaaatgcagtaa

SEQ ID NO: 5944 - protein, 452 aa, Anaplasma marginale
MNIFGTDGVRGRANVYPMDPITVLRLGMAIGLEARKVGTQVVLGKDTRISGYMVESALVSGLVAMGVNVGLLGPMPTAAIATLVRNLRASMGVVISASHNSYLDNGVKIFDSEGIKIPLELEEVLESNVRAELSSDLAQVRGMGKVYRIAGAVGRYIEFVKGTFPKRLKLSGMKIVVDCANGAAYHIGGEVFWELGADVVVIGNKPDGLNINHNCGSLHPEGMVQKVLEEGADIGIALDGDADRVVVCDEKGRLVDGDQVIASIMRHLRATKSITDAAVTTMSSKSIDSYARELGVRLHRSEVGDRHLVDTMRRHSCSVGGEKSGHIILWEHSTTSDSLVAALQILSIMLLENKSASSIFGDFVPMPRVHRDIPYSMEFDHIARLIGPTLSDVEQALGRVNGRVIFRRSGTERLIRCVIEGEDPKLVALVADELSIKLRELGVENGVEPEMQ

SEQ ID NO: 5945 - DNA, 1473 bp, Anabaena variabilis
  CDS (1)..(1473): transl_table=11
atggtttcatctataactcggattcagaactacgtaatagatggtgcagctacatctgatggattagcaacagtccttgagagcaactttgcacctagtttaatatctctaccagcaacgcctctttttggtacagatggtattcgtggcaaggtgggggaattacttagtgcgccgttagcgttgcaaattggtttttgggcaggcgtagttttacgtagtcacgctggtcaattaagaccagtaatcttagggcaggattcccgtaactctagcgatatgttggcgatggctttaagtgcagggttaaccgccgccgggctagaagtttggtatttagggttatgtcctactccttgcgtggcttatttaactagtgtgagtgaagccataggtggtgtgatgatttctgctagtcacaaccctcccgaagataacgggattaaaatttttggtgctaatggtgggaagttatcccaggctttgcaggcagaaattgaaaaaggtttgcggggaaatctgccaattaccagtaatgtcagtaattgtggacggcattactcacgccgggaattggtgaaagattacggcgaagctttaaaacgaccctggcaaaataaagtgaatcttcagggaatgaaggttgtactggatttagcttggggtgcagccgttgggttagcaccgtcggtatttgcagagatgggggcagaagttatttccctgcataatgccgcagatggcgatcgcatcaacgttaactgcggttccacccacctagaaatgttgcaagcggctgttcaagaacataacgccgatttaggttttgcctttgatggcgatgccgatcgcgttttggctgtagatcctaccggccgtcctgtaaatggggactatatcttgtacctgtggggattgcacctcaaacaacaaaaccaactcccagacaacttgattgtttccaccgtcatggcaaacctgggctttgagaaagcttggcagcaacagggtggtaaattaattcgcaccgccgttggtgatcaatatgtgcaagcagaaatgatcaaaactggggcaatgttggggggtgaacaatcaggacacattctttgtagtcattatgggatgactggggatggcttgttaacagccttacacttggcaagtttggtcaaacaatctggtgtttccttagccgaattgatagaccaaagcttccagacctatcctcaattattgcggaacgtgcgagttgtagaccgcgatcgccgcctgaattggcaaaactgcacaccagtacaacaggcgatcgctcttgccgagaaagcaatgggtgatactggtagaattttagttagggcatccggtacagaacccgtcatcagagtcatggtagaagccgccaacgccgaactagctaactattggacaaatgaactagtagcccaggtacaacaacacctagcgccttaa

SEQ ID NO: 5946 - protein, 490 aa, Anabaena variabilis
MVSSITRIQNYVIDGAATSDGLATVLESNFAPSLISLPATPLFGTDGIRGKVGELLSAPLALQIGFWAGVVLRSHAGQLRPVILGQDSRNSSDMLAMALSAGLTAAGLEVWYLGLCPTPCVAYLTSVSEAIGGVMISASHNPPEDNGIKIFGANGGKLSQALQAEIEKGLRGNLPITSNVSNCGRHYSRRELVKDYGEALKRPWQNKVNLQGMKVVLDLAWGAAVGLAPSVFAEMGAEVISLHNAADGDRINVNCGSTHLEMLQAAVQEHNADLGFAFDGDADRVLAVDPTGRPVNGDYILYLWGLHLKQQNQLPDNLIVSTVMANLGFEKAWQQQGGKLIRTAVGDQYVQAEMIKTGAMLGGEQSGHILCSHYGMTGDGLLTALHLASLVKQSGVSLAELIDQSFQTYPQLLRNVRVVDRDRRLNWQNCTPVQQAIALAEKAMGDTGRILVRASGTEPVIRVMVEAANAELANYWTNELVAQVQQHLAP

SEQ ID NO: 5947 - DNA, 1356 bp, Azoarcus sp
  CDS (1)..(1356): transl_table=11
atggcgcggaagtacttcgggaccgacggggtccgtggacgggttggcgagttgcccatcacgcccgagttcgtgatgcgcctcggctatgctgcgggtgtgacgctggtcgcgcgcgaacacctgccggcaggcgaacggccggcaatcctgatcggcaaagacacccgcgtgtcaggctacatgctggaggcggctttgcaggcgggattcgctgctgccggcgtggatgtcctgcttgccggcccgattccgacgccggcggtggcctatctcacacgtgcccttcgtcttcaggcgggcgtggtgatctccgcttcgcacaacccgttctacgataacgggatcaagttcttttcggcgggtggggccaagctgcccgacgccgtggaagccgaaatcgaagagcgcatcggccagcccatgggatgtgccgaatctgcgcggctcgggcgtgcgcgtcggattggcgacgccgcaggtcgttacatcgaattctgcaaaagcagttttcccaacgaactcgatctgcgcggcctgcgcattgcgctcgattgcgcacacggtgcggcctatcacattgcccccaacgtcttccacgaactgggcgcggaagtcatttctgtgggggtggacccgaacggactcaacatcaacgacggtgtgggagcaacacgtccggagaatctgcgccaggcggtcctgtcgcacggcgccgatctcggcatcgcgctggatggggatggagaccgcctgatcatggtggaccgccagggcgaaatctacgatggcgacaagctgttgtacgtcatcgcaagcgcgcgcgctgcggaaggtcggctggatggcgtggttggaacgctgatgagcaatctcggcttcgagcatgcgcttgaacgtcgcggtgttgcattcgcccgtgccaaagtgggggaccgctatgtgctcgagatgctccacgagcgcggctggaagatcggcggggagaattcgggccacatcatctgtctcgactgccacacgacgggcgacgggatcatctccgcactgcaggtgctcgcggcgctcaagcacagggagatgtcactgtccgaggcgtgcaaggatctcgtgttctacccgcagcggctgatcaacgtgcgcttgcccgccggcttcgactggaaggccgacgcacgaatcgcgcagaccgctgccgacgccgagcgcacgctgggcgacaccggccgcgtgctgttgaggccatcgggtacggaaccgttgttgcgggtgatggtggaaggccgggatgagcaactggtggaaagcctggcacggggcattgcgggtgcggtggagctggctgtggcggggtag

SEQ ID NO: 5948 - protein, 451 aa, Azoarcus sp
MARKYFGTDGVRGRVGELPITPEFVMRLGYAAGVTLVAREHLPAGERPAILIGKDTRVSGYMLEAALQAGFAAAGVDVLLAGPIPTPAVAYLTRALRLQAGVVISASHNPFYDNGIKFFSAGGAKLPDAVEAEIEERIGQPMGCAESARLGRARRIGDAAGRYIEFCKSSFPNELDLRGLRIALDCAHGAAYHIAPNVFHELGAEVISVGVDPNGLNINDGVGATRPENLRQAVLSHGADLGIALDGDGDRLIMVDRQGEIYDGDKLLYVIASARAAEGRLDGVVGTLMSNLGFEHALERRGVAFARAKVGDRYVLEMLHERGWKIGGENSGHIICLDCHTTGDGIISALQVLAALKHREMSLSEACKDLVFYPQRLINVRLPAGFDWKADARIAQTAADAERTLGDTGRVLLRPSGTEPLLRVMVEGRDEQLVESLARGIAGAVELAVAG

SEQ ID NO: 5949 - DNA, 1353 bp, Azoarcus sp
  CDS (1)..(1353): transl_table=11
atggggagaaagtatttcggcaccgacggcgtacgggggcgggtcggcgattcgacgatcacgcccgaattcgtcatgcgtctcggctatgcagccggggtgacgctggtggggcgggagcagttgcctcccggagagcggcccgcgattctcatcggcaaggacacccgcatttccggctacatgctcgaggccgctctcgaagccggatttgcagcggcgggcgtcgatgtgatgcttgccggtccggtgccgacgccagcggtggcctatctcacccgtgcgctccgtctccaggccggagtcgtcatctccgcctcgcacaacccttacgacgataacggcatcaagttcttttcggcgaacggcaccaagttgccggatgcgctcgaggaagaaatcgagttccgggtcgatcagccgatggtctgcgccgaggcatcgcgcctgggcaaggcgcgacggatcgtcgatgcggcgggacgttacgtcgagttctgcaagagcgcgtttccgaacgagttcgacctgcgtggttaccggatcgtcctcgactgcgctcacggcgcggcctatcacatcggaccgagcgtgtttcacgaactgggcgcggaagtgatcccgctgggagtcgaacccaacggattgaacatcaacgaccaggtcggcgccacgcatccgcagacgctgcgttcggcagtactggcgaacaaggcggacttcggcatcgccctcgacggcgacggcgatcgcgtcgtcatggtcgatggagacggcgagctttacgatggtgacaagctgctgtacgtgattgcagcgtcgcggcaggccgaagggcgcctggaaggcgtcgtcggcacgctgatgagcaatctcggcctcgagcgcgcgatcggccgcctcggccttgccttcgcgcgagccaaggtcggtgaccgctacgtgctggaaaccatgcatgaacggggctggaggctcggcggggaaaactccggccatatcatctgcctcgatcgtcataccacgggcgacggcatcgtctccgcgctccaggttatcgcggcgctgatcaagggccagtgcacgctggctaccgcgtgtgcggacctcgtcttctatccgcagaaactcatcaacgtgcctctggccgcaggattcgactggcggtccgacgagcgcatcgaccaagcgcgcagcgacgccgaactggaactcggcgagcagggccgggtgctgctgcgcccttcaggaaccgagccgttgctccgggtcatggtggaaggaaaggacggttcccaagtcgagagactggcgcgacatatcgccgactgcgttcggcacgccagcgtctga

SEQ ID NO: 5950 - protein, 450 aa, Azoarcus sp
MGRKYFGTDGVRGRVGDSTITPEFVMRLGYAAGVTLVGREQLPPGERPAILIGKDTRISGYMLEAALEAGFAAAGVDVMLAGPVPTPAVAYLTRALRLQAGVVISASHNPYDDNGIKFFSANGTKLPDALEEEIEFRVDQPMVCAEASRLGKARRIVDAAGRYVEFCKSAFPNEFDLRGYRIVLDCAHGAAYHIGPSVFHELGAEVIPLGVEPNGLNINDQVGATHPQTLRSAVLANKADFGIALDGDGDRVVMVDGDGELYDGDKLLYVIAASRQAEGRLEGVVGTLMSNLGLERAIGRLGLAFARAKVGDRYVLETMHERGWRLGGENSGHIICLDRHTTGDGIVSALQVIAALIKGQCTLATACADLVFYPQKLINVPLAAGFDWRSDERIDQARSDAELELGEQGRVLLRPSGTEPLLRVMVEGKDGSQVERLARHIADCVRHASV

SEQ ID NO: 5951 - DNA, 1347 bp, Bacillus anthracis
  CDS (1)..(1347): transl_table=11
atgggtaaatattttggtacagatggagtacgcggggttgcgaataaggagttaacacctgaattagcgttcaaaattggacgtttcggtggttatgtattaacaaaggatacagatcgcccaaaagtaattattggccgtgatacacgtatatcaggacatatgctagaaggagctttagtagcaggtctattatcaactggagcagaagtaatgcgtcttggtgttatttctacaccaggtgttgcttatttaacaaaagcgttagatgcacaagcaggtgttatgatttctgcatctcataatccagtacaagataacggaattaaattcttcggttcagacggtttcaaattaacagatgagcaagaagcagaaattgaagctttattagacaaagaagttgatgaattaccacgtccaacgggtactaaccttggacaagtgagtgattattttgaaggtggacaaaaatatttacaatacattaaacaaactgtagaggaagatttctctggtttacatatcgctttagattgtgcgcatggtgctacgtcttctttagctccgtacttatttgctgatttagaagctgatatctcaacaatgggaacttcaccaaacggtatgaacattaacgatggagtaggttctacacatccagaagtattagctgaattagtaaaagaaaaaggtgctgatattggtcttgctttcgatggtgatggtgaccgtttaatcgctgtagatgaaaaaggaaacatcgttgatggcgatcaaattatgtttatttgtgcaaagtacatgaaagaaactggtcaactaaagcacaatacagttgtttcaacagttatgagtaacttaggtttctacaaagcacttgaagctaacggtattacaagtgataaaacagcagttggtgaccgctacgtaatggaagagatgaaacgcgggggatataacctaggcggagaacaatcaggtcacattatcttacttgattacattacaactggtgatggaatgttaagtgcacttcaacttgtaaacatcatgaaaatgacgaaaaaaccattatctgagcttgcaggagaaatgacaaaattcccacaattactagtaaacgttcgtgtaacagataaaaaactagcattagaaaacgaaaaaattaaagaaattattcgtgttgtagaggaagaaatgaacggtgatggccgcattcttgttcgtccatctggaacagaaccacttattcgtgtaatggcagaagcaccaacacaagaagtttgtgatgcatatgtgcatcgcattgtagaagttgtgaaagcggaagttggcgctgaataa

SEQ ID NO: 5952 - protein, 448 aa, Bacillus anthracis
MGKYFGTDGVRGVANKELTPELAFKIGRFGGYVLTKDTDRPKVIIGRDTRISGHMLEGALVAGLLSTGAEVMRLGVISTPGVAYLTKALDAQAGVMISASHNPVQDNGIKFFGSDGFKLTDEQEAEIEALLDKEVDELPRPTGTNLGQVSDYFEGGQKYLQYIKQTVEEDFSGLHIALDCAHGATSSLAPYLFADLEADISTMGTSPNGMNINDGVGSTHPEVLAELVKEKGADIGLAFDGDGDRLIAVDEKGNIVDGDQIMFICAKYMKETGQLKHNTVVSTVMSNLGFYKALEANGITSDKTAVGDRYVMEEMKRGGYNLGGEQSGHIILLDYITTGDGMLSALQLVNIMKMTKKPLSELAGEMTKFPQLLVNVRVTDKKLALENEKIKEIIRVVEEEMNGDGRILVRPSGTEPLIRVMAEAPTQEVCDAYVHRIVEVVKAEVGAE

SEQ ID NO: 5953 - DNA, 1347 bp, Bacillus cereus
  CDS (1)..(1347): transl_table=11
atgggtaaatattttggtacagatggagtacgcggggttgcgaatcaggagttaacacctgagttagcgttcaaaattggacgttttggtggttatgtattaacaaaagatacagaccgtccaaaagtaattatcggccgtgatacacgtatatcaggacatatgttagaaggagctttagtagcaggtctattatcaactggagcagaagtaatgcgtcttggtgttatttctacaccaggtgttgcttatttaacgaaagcgttagatgcacaagctggtgttatgatttctgcatctcataatccagtacaagataacggaattaaattcttcggttcagacggttttaaattaacagatgagcaagaagcagaaatcgaagctttattagacaaagaagtggatgaattaccacgtccaacaggtacgaaccttgggcaagtgagtgattattttgaaggtggacaaaagtatttacaatacattaaacaaactgtagaggaagatttctcaggtttgcatatcgctttagattgtgcgcatggtgctacatcttctttagctccgtacttatttgctgatttagaagctgatatttcaacaatgggaacttcaccaaatggtatgaacattaacgatggagtaggttctacgcatccagaagtattagctgaattagtaaaagaaaaaggtgctgatattggtcttgctttcgatggtgatggtgaccgtttaatcgctgtagatgaaaaaggaaacattgttgatggcgatcaaattatgtttatttgtgcaaagtacatgaaagaaactggtcaactaaagcacaatacagttgtttcaacagttatgagtaacttaggtttctacaaagcacttgaagctaacggtattacaagtgataaaacagcagttggtgaccgctacgtaatggaagaaatgaagcgcggaggttacaacttaggtggagaacaatcaggacatattatcttacttgattacattacaactggtgatggaatgttaagtgcacttcaacttgtaaacattatgaaaatgacgaaaaaaccattatctgagcttgcaggagaaatgacaaaattcccgcaattactagtaaacgttcgtgtaacagataaaaaactagcactagaaaacgaaaaaattaaagaaattattcgtgttgtagaggaagaaatgaacggtgatggccgcattcttgttcgtccatctggaacagaaccacttattcgtgtaatggcagaagcaccaacacaagaagtttgtgatgcatatgtacatcgcattgtagaagttgtgaaagcggaagttggcgctgaataa

SEQ ID NO: 5954 - protein, 448 aa, Bacillus cereus
MGKYFGTDGVRGVANQELTPELAFKIGRFGGYVLTKDTDRPKVIIGRDTRISGHMLEGALVAGLLSTGAEVMRLGVISTPGVAYLTKALDAQAGVMISASHNPVQDNGIKFFGSDGFKLTDEQEAEIEALLDKEVDELPRPTGTNLGQVSDYFEGGQKYLQYIKQTVEEDFSGLHIALDCAHGATSSLAPYLFADLEADISTMGTSPNGMNINDGVGSTHPEVLAELVKEKGADIGLAFDGDGDRLIAVDEKGNIVDGDQIMFICAKYMKETGQLKHNTVVSTVMSNLGFYKALEANGITSDKTAVGDRYVMEEMKRGGYNLGGEQSGHIILLDYITTGDGMLSALQLVNIMKMTKKPLSELAGEMTKFPQLLVNVRVTDKKLALENEKIKEIIRVVEEEMNGDGRILVRPSGTEPLIRVMAEAPTQEVCDAYVHRIVEVVKAEVGAE

SEQ ID NO: 5955 - DNA, 1347 bp, Bacillus cereus
  CDS (1)..(1347): transl_table=11
atgggtaaatattttggtacagatggagtacgcggagttgcaaataaggagttaacacctgaattagctttcaaaattggacgttttggtggttatgtattaacaaaagatacagatcgtccaaaagtaattatcggtcgtgatacacgtgtatctggtcatatgttagaaggagctttagtagcaggtctattatcaactggagcagaagtaatgcgccttggcgttatttctacaccgggcgttgcttatttaacaaaagcactagatgcacaagcgggtgttatgatttctgcatctcataatccagtacaagataacggtattaaattctttggttcagacggctttaaattaacagatgagcaagaagctgagattgaagctttattagacaaagaagttgatgaactaccacgtccgacaggtactaatcttggacaagtgagcgattactttgaaggtggacaaaaatatttacagtacattaaacaaactgttgaagaagatttctctggcctacatatcgctttagattgtgcacatggtgcaacttcttctctagctccatacttatttgcagacctagaagctgatatttcaacaatgggaacttctccaaacggtatgaatattaatgagggtgtaggatctacacatccagaaggcttagctgaattggtaaaagaaaaaggtgcggatatcggacttgcttttgatggcgatggcgaccgtttaattgctgtagacgaaaaaggaaacatcgttgacggtgatcaaattatgttcatttgtgcgaaatatatgaaagaaactggtcaattaaaacataatacagttgtttcaactgttatgagtaacttaggtttctacaaggcacttgaagcaaataatattacaagtgataaaacagcagttggtgaccgctacgtaatggaagaaatgaagcgtggaggttacaacctaggtggagaacaatcaggccatattatcttacttgattacattacaactggtgatggaatgttaagtgcacttcaacttgtaaacatcatgaaaatgacgaaaaagccattatctgagcttgcaggagaaatgacgaaattcccacaattgttagtaaacgttcgtgtaacagataaaaaattagcattagaaaatgaaaaaattaaagaaattattcgtgttgtagaggaagaaatgaacggtgatggccgtattcttgttcgtccatctggaacagagccacttattcgtgtaatggcagaagcaccaacacaagaagtttgtgatgcatatgtacatcgcattgtagaagttgtgaaagctgaagttggcgctgaataa

SEQ ID NO: 5956 - protein, 448 aa, Bacillus cereus
MGKYFGTDGVRGVANKELTPELAFKIGRFGGYVLTKDTDRPKVIIGRDTRVSGHMLEGALVAGLLSTGAEVMRLGVISTPGVAYLTKALDAQAGVMISASHNPVQDNGIKFFGSDGFKLTDEQEAEIEALLDKEVDELPRPTGTNLGQVSDYFEGGQKYLQYIKQTVEEDFSGLHIALDCAHGATSSLAPYLFADLEADISTMGTSPNGMNINEGVGSTHPEGLAELVKEKGADIGLAFDGDGDRLIAVDEKGNIVDGDQIMFICAKYMKETGQLKHNTVVSTVMSNLGFYKALEANNITSDKTAVGDRYVMEEMKRGGYNLGGEQSGHIILLDYITTGDGMLSALQLVNIMKMTKKPLSELAGEMTKFPQLLVNVRVTDKKLALENEKIKEIIRVVEEEMNGDGRILVRPSGTEPLIRVMAEAPTQEVCDAYVHRIVEVVKAEVGAE

SEQ ID NO: 5957 - DNA, 1341 bp, Bacillus clausii
  CDS (1)..(1341): transl_table=11
atgggtaaatattttgggacagatggcgtcaggggggtagccaattcagagcttacgcctgaactcgcgtttaagttagggcgcgctggcggttatgtgctaacgaaagaggcggcgcaacctaaggtgttgattggccgggatacgcgtatttctggagaaatgcttgaggcttccttagtggcaggtttgctttccattggcgccgaagttatgcgccttggggtcatttcaacccctggcgttgcgttcctgaccaaacaactaagcgcaactgcgggaattatgatttctgcttctcataatccggttgaagacaatggcattaaatttttcggttctgacggatttaagctgcttgattcacaagaagaggaaatagaagcactcattgatggcgaagatacgatgcctcgtccgattggtggcgatgtcggccagttaaatgactattttgagggctctcagaaatacatgcagtttttaaaacaaacggttgaaggcggttttgaaggaatccacgtcgccattgactgtgccaacggtgctgcctcatcgttagctacgcacgtactggctgatcttgatgctgatatatcgtcgatgggctcttcgccaaacggaaccaatattaatgcatgctgcggctcgacccatcctgaagagctggcaaagctagttgtggaaaaacaggcagatgtcggcctggcgtttgacggcgatgccgatcgtttgatcgcagtcgatgaaaagggcgaaattgtggacggcgacaagattatgtatattatcgcttcctacttgaaagaacaagggcgcctgaacaacaatacgattgtcactactgtaatgagcaatctcggtttttacaaagcactcgaggagaaacagatcgaaacgaagcaaacggctgtaggcgaccgttatgtgatggaggaaatgcgtaaaggaaattacaaccttggcggcgaacagtctggccacattattttccttgactacaacacgacaggcgatggcttgcttacaggcgtgcagctattaaacattatgaaacaaacagggaagcctttgtccgaactggcggcaggcatgaaaacatttccgcaatgcttaatcaacgtccgcgttacggataaagatgcagttaaaaacaatgccctcgtccaacaagaaatcaaacgtgtggaagaggcaatggctggagagggacggatccttgtacgcccatctggcaccgaaccacttgtgcgtgtgatggtcgaagccaaaaccgacgagttgtgccaacagtacgcaaaccaaattgttgatgtcgtaaaagaacagcttggagcttga

SEQ ID NO: 5958 - protein, 446 aa, Bacillus clausii
MGKYFGTDGVRGVANSELTPELAFKLGRAGGYVLTKEAAQPKVLIGRDTRISGEMLEASLVAGLLSIGAEVMRLGVISTPGVAFLTKQLSATAGIMISASHNPVEDNGIKFFGSDGFKLLDSQEEEIEALIDGEDTMPRPIGGDVGQLNDYFEGSQKYMQFLKQTVEGGFEGIHVAIDCANGAASSLATHVLADLDADISSMGSSPNGTNINACCGSTHPEELAKLVVEKQADVGLAFDGDADRLIAVDEKGEIVDGDKIMYIIASYLKEQGRLNNNTIVTTVMSNLGFYKALEEKQIETKQTAVGDRYVMEEMRKGNYNLGGEQSGHIIFLDYNTTGDGLLTGVQLLNIMKQTGKPLSELAAGMKTFPQCLINVRVTDKDAVKNNALVQQEIKRVEEAMAGEGRILVRPSGTEPLVRVMVEAKTDELCQQYANQIVDVVKEQLGA

SEQ ID NO: 5959 - DNA, 1347 bp, Bacillus subtilis
  CDS (1)..(1347): transl_table=11
atgggcaagtattttggaacagacggtgtaagaggtgtcgccaatagtgagcttacacctgagctggcctttaaagtcggacgtttcggcggttatgtgctgacaaaagacaaacaacgtccaaaagtgctgataggccgcgatacacgcatctccggccatatgctggagggagcccttgtcgccggacttttatccattggcgcagaagtcatgcgcctgggtgtcatttctacaccaggtgtatcttatttgacaaaagcgatggatgcagaggcgggcgtcatgatttccgcttctcataacccagtgcaggataacggcatcaaattctttgggggagatggatttaagctttctgatgaacaggaggctgaaattgagcgcctgatggacgaacctgaggataagctgccaagacctgtcggagcagaccttggacttgtaaacgattattttgaaggcggacaaaaatatctgcaattcttaaaacagacagctgatgaagatttcacaggcattcatgtggcattggactgtgccaatggcgcaacgtcatccttggcgacgcacctgtttgctgatttagatgcagatgtttctacaatggggacttccccgaacggattaaacattaatgacggcgtcggttcgactcatcccgaagcgctcagcgcgtttgtcaaagagaaaaacgcggatctcggtcttgcgttcgacggtgacggcgaccgcctgattgctgtcgatgaaaaaggaaatattgtagacggcgaccaaatcatgtacatatgctcaaaacatctgaaatcagagggccgtttaaaggatgatacagtggtttcaaccgtgatgagcaacctcggcttctataaggcgctcgaaaaagaaggcatcaaaagcgtgcagacagctgtcggcgaccgctacgtagtagaagcaatgaaaaaagacggctacaacgtcggcggagagcagtcaggacatcttattttccttgattacaacacgacaggggacggattattgtctgctattatgctgatgaacactttaaaagcaacaggcaagccgctgtcagagcttgcagctgaaatgcagaagttcccgcagctgttagtcaatgtgagagtgactgataaatataaagttgaagaaaatgaaaaagtaaaagcagttatttctgaagttgaaaaagaaatgaacggcgacggccggattttggtgcgcccttcaggaactgaaccgctcgtccgtgtcatggctgaagcgaagacgaaagagctgtgcgatgagtatgtcaatcgcattgttgaagtcgtccggtcagaaatgggattagagtaa

SEQ ID NO: 5960 - protein, 448 aa, Bacillus subtilis
MGKYFGTDGVRGVANSELTPELAFKVGRFGGYVLTKDKQRPKVLIGRDTRISGHMLEGALVAGLLSIGAEVMRLGVISTPGVSYLTKAMDAEAGVMISASHNPVQDNGIKFFGGDGFKLSDEQEAEIERLMDEPEDKLPRPVGADLGLVNDYFEGGQKYLQFLKQTADEDFTGIHVALDCANGATSSLATHLFADLDADVSTMGTSPNGLNINDGVGSTHPEALSAFVKEKNADLGLAFDGDGDRLIAVDEKGNIVDGDQIMYICSKHLKSEGRLKDDTVVSTVMSNLGFYKALEKEGIKSVQTAVGDRYVVEAMKKDGYNVGGEQSGHLIFLDYNTTGDGLLSAIMLMNTLKATGKPLSELAAEMQKFPQLLVNVRVTDKYKVEENEKVKAVISEVEKEMNGDGRILVRPSGTEPLVRVMAEAKTKELCDEYVNRIVEVVRSEMGLE

SEQ ID NO: 5961 - DNA, 1380 bp, Bartonella henselae
  CDS (1)..(1380): transl_table=11
atgccacaaaaatattttggtacagatggaattcgcggcaaagccaatgtttttcccatgacaccagattttgctatgaaagtggggatggctgtgggaattttgtttcggtcacaaaatcagtcgcgtcgtgtggtaattggtaaagatacccgtttgtctggttatatgctcgaaaatgctttggtttcaggatttaccgctgctggaatggaggcgttcttattaggaccggtgccaacacctgctgttgctatgctttgtcgctcattgcgtgctgatctgggggtgatgatttcggcctctcataatcccttctatgataatggtattaaactttttggtcctgatggctttaagctttcagatgagatagaagaaaaaattgaacaattgatcgatacagatctttcaaaatctttagccagttgtgccgaaattggctatgcaaaacgggtcgagggtgatatttaccgctatatcgaatatgccaaaagaactttgccgcgcgatgttcgtttggataatttgcgtatcgttgtcgattgcgctaatggtgctgcttataaggcggctccgcgtgctttatgggaattgggagctgaggtctttgcgattaatgatacaccaaatggtaccaatattaatcacaaatgcggttcaaccgatttggcctctttaaaacaaaaagttcatgaagtgcgcgctgatgtgggtattgctctcgatggggatggagatcgtgttcttcttgtggatgaaaaagctcaaaccgttgatggggatcagttgatcgctgttattgctgaacattggcataaaaacggacgtttgcagtctaagggtgttgttacaactattatgtcaaatcttggactcgagcgcttcttaaacagcaaagggttagatcttgttcggacaaaggtaggggatcgctatgtggtcgatgcgatgcgcaagaagggatataatgttgggggtgaagcttctgggcatattgtgctgagtgattttggtacaacgggtgatggtttagtagctgctttgcagattttagcttgtatgcaagaaatccaaattcctatgagtcacttgtgtcagcgctttgaacctgtgccacaaattttcaaaaacgtaatgattaaaaacaaaaatgtgctgaaaaaaaatccggtcaaaacagcaatagagcaagcaacacagcgtttaggaaaaaaagcaagactggtgattcgtgcttctggaaccgagcccgtaattcgtattatgggggaaggcgatgagagagaaatgcttgatgctgttgtgacagagatggtagatattattacacatcatgataccctttcaaaagcgtgtgcttctctggaaagatcgtga

SEQ ID NO: 5962 - protein, 459 aa, Bartonella henselae
MPQKYFGTDGIRGKANVFPMTPDFAMKVGMAVGILFRSQNQSRRVVIGKDTRLSGYMLENALVSGFTAAGMEAFLLGPVPTPAVAMLCRSLRADLGVMISASHNPFYDNGIKLFGPDGFKLSDEIEEKIEQLIDTDLSKSLASCAEIGYAKRVEGDIYRYIEYAKRTLPRDVRLDNLRIVVDCANGAAYKAAPRALWELGAEVFAINDTPNGTNINHKCGSTDLASLKQKVHEVRADVGIALDGDGDRVLLVDEKAQTVDGDQLIAVIAEHWHKNGRLQSKGVVTTIMSNLGLERFLNSKGLDLVRTKVGDRYVVDAMRKKGYNVGGEASGHIVLSDFGTTGDGLVAALQILACMQEIQIPMSHLCQRFEPVPQIFKNVMIKNKNVLKKNPVKTAIEQATQRLGKKARLVIRASGTEPVIRIMGEGDEREMLDAVVTEMVDIITHHDTLSKACASLERS

SEQ ID NO: 5963 - DNA, 1380 bp, Bartonella quintana
  CDS (1)..(1380): transl_table=11
atggcacaaaaatattttggtacagacggaattcgtggcaaggccaatgtttttcccatgacaccagattttgccatgaaagtagggatggctgtaggggttttgtttcgatcacaacgtcagtcgcgtcgtgtggtgattggtaaagatacccgtttatctggttatatgttggaaaatgctttggtttcaggatttactgctgctgggatggaagcttttttgttggggcctgtgccaacgcctgctgttgctatgctttgccgttcgttgcgtgctgatcttggagtgatgatttctgcttctcataatcccttttatgataatggtattaaactttttggtcctgatggttttaagctttcagatgagatagaaaaaaaaattgaacaattgatagatacagatctttcaaaatccttagccagttgcgccgaaatcggctatgcaaaacgggttgagggtgatatttaccgttatatcgaatatgctaaacgaactttgccacgtgatgttcgcttggatgctctccgtattgttgtggattgcgctaatggtgctgcttataaagctgcaccgcgtgctttgtgggaattgggagctgaggtctttgctattaatgatgcgccaaacggtaccaatattaatcagaaatgtggatcaaccgatttggcttctttaaaacaaaaagttcatgaagtacgtgctgatgtaggaattgctctcgatggcgatggagatcgtgttctcattgtcgatgaaaaagcgcaaaccgttgatggagatcagttgattgctgtcattgctgaacattggcataaaactgggcggttgcagggcaatggtgttgtcacaaccattatgtcaaatcttggactcgagcgctttttgaataggaaggggttggagcttgttcgaacaaatgttggggatcgctatgttgtcgatgccatgcgccaaaagggatataatattgggggcgaggcgtctggacatattgtactgagtgattttgggacaaccggcgatgggttggtggctgctttacagattttagcttgtatgcaagaaagtcaaagctctatgagtcacttgtgtaagcgctttgaacctgtgccacaaattttaaaaaatgtaacgattaaaaacaaaaatgtgctgaaaaagaatcaggtcaaaacggcaatagatcaagcaacgcagcgtttgggaaacgaagcacgattggtgatccgtgcttctggaactgagccggtgatccgtattatgggggaaggcgatgagcgagaagttcttgacgctgtcgtggcagagatggtggatgttatcgcacatcatgatgccctttcaaaagtaggtgcttctcttgagggatcgtga

SEQ ID NO: 5964 - protein, 459 aa, Bartonella quintana
MAQKYFGTDGIRGKANVFPMTPDFAMKVGMAVGVLFRSQRQSRRVVIGKDTRLSGYMLENALVSGFTAAGMEAFLLGPVPTPAVAMLCRSLRADLGVMISASHNPFYDNGIKLFGPDGFKLSDEIEKKIEQLIDTDLSKSLASCAEIGYAKRVEGDIYRYIEYAKRTLPRDVRLDALRIVVDCANGAAYKAAPRALWELGAEVFAINDAPNGTNINQKCGSTDLASLKQKVHEVRADVGIALDGDGDRVLIVDEKAQTVDGDQLIAVIAEHWHKTGRLQGNGVVTTIMSNLGLERFLNRKGLELVRTNVGDRYVVDAMRQKGYNIGGEASGHIVLSDFGTTGDGLVAALQILACMQESQSSMSHLCKRFEPVPQILKNVTIKNKNVLKKNQVKTAIDQATQRLGNEARLVIRASGTEPVIRIMGEGDEREVLDAVVAEMVDVIAHHDALSKVGASLEGS

SEQ ID NO: 5965 - DNA, 1374 bp, Bdellovibrio bacteriovorus
  CDS (1)..(1374): transl_table=11
gtggaaaagaaaacaagactgtttggaactgatggtattcgcgggactgcgaatcagtatccgatgactccggatatggttgtgaagatcggtcaagccattggttatcttttgcgtaaagaagctgaagaaaaatcctccagcgtgcgcaaagtggttattggaaaagacacgcgtttgtccggttatatgatcgagcaggccttggcttctggtttgaactccatgggtgtgttcgtgcaactggtgggaccactgccgactccgggtatcggttacttgaccagaacgatgcgtgcggcggcggggatcgtgatctcggcgtctcacaatccattccatgataatgggatcaaagtgtttggttctgatggttttaaaatctctgaagagatggagcgtgaaatcgagcgtctggtgcttgaagaagacctgacgccacttctgcctccaagcaaagaaatcggccgcactcgccgtatcgaagactcccagggtcgttatatcgtttacgtgaaaggcacattccctctggagtatactctggatggtatgcgtatcgtattggatacggccaacggggcttcatacaaagttgctccatccatcttccaggagctgggtgcggaagtcatccagctgggtgatgatcccaatggcacaaacatcaatgacaaagtcggtgctttgtatccacaaaagctggctgaatccgttttgcactatcgtgcggacgtgggcatcagtttggatggggatgcggaccgtgtgatcatggtggatgaaaagggcgagatcgtaaacggagaccgtattttggcgatctgtgctttgcacatgaaagagcgtggcttgctgaaaggtgacactctggtggcaactcagatgtcaaacttcggtcttgaaaagcgcatgaatgaagcgggcatcaagcttgtgaaaaccggcgtaggtgacaagtacgtggtcgaagaaatgcgtaaacacggttacaacctgggtggcgagcagtctggccacatcatcttcctggatcacaccacaacgggggatggctgtatcgcggcgttgagtgttctggcggtgatgaaacaaactggcaagaagatgagcgatctgaatcacgtctttgaggacgttccgcaaatcctgatcaactgccgtgtaaaacgccgtgccgagctttctgagcttgccggctacaatgacatgattcgcaatattgaaaagaaactggctggcaatggccgcgtcttcgttcgtttctctggcaccgagccggtgattcgtgtgttggtcgagggaactgaaaaagctcagatcactcaattcgcggaagaaatcgcctctttcctggaaaaagaactgtcttaa

SEQ ID NO: 5966 - protein, 457 aa, Bdellovibrio bacteriovorus
MEKKTRLFGTDGIRGTANQYPMTPDMVVKIGQAIGYLLRKEAEEKSSSVRKVVIGKDTRLSGYMIEQALASGLNSMGVFVQLVGPLPTPGIGYLTRTMRAAAGIVISASHNPFHDNGIKVFGSDGFKISEEMEREIERLVLEEDLTPLLPPSKEIGRTRRIEDSQGRYIVYVKGTFPLEYTLDGMRIVLDTANGASYKVAPSIFQELGAEVIQLGDDPNGTNINDKVGALYPQKLAESVLHYRADVGISLDGDADRVIMVDEKGEIVNGDRILAICALHMKERGLLKGDTLVATQMSNFGLEKRMNEAGIKLVKTGVGDKYVVEEMRKHGYNLGGEQSGHIIFLDHTTTGDGCIAALSVLAVMKQTGKKMSDLNHVFEDVPQILINCRVKRRAELSELAGYNDMIRNIEKKLAGNGRVFVRFSGTEPVIRVLVEGTEKAQITQFAEEIASFLEKELS

SEQ ID NO: 5967 - DNA, 1386 bp, Bifidobacterium longum
  CDS (1)..(1386): transl_table=11
atgccgaagatgtttggaaccgatggtgttcgaggactggccaatagggatttgaccgcacgtctggcgttggatttgggcgatgccgccgtgcgtgtgctcggcgacgccggcacccaagacgatcagcctgaggggcgccgccgcgcgctcgtgggtcgtgacacccgtgtgtccggcgattttctggcttccgccctgtctgcgggcatggccgccggcggattcgacgtgatcgacgcaggcatcatcccgaccccgggcatcgcgttcctgaccagcgtgctcaacgttgagatgggtgccgtgatctccgcctcccacaacccgatgcccgacaacggcatcaagttcttcgcacgcggcggcttcaagctgcccgaccagaaggaagacgacatcgaggccgtgctcggccaggactgggaccgcccgaccggtgccggcgtgggccgcgtgagccacgaccagaccactgccaccaacctgtacatcgatcatctggtggccaccatcgctccgctgaacgatgacaaaacccagcccaagccgctcaagggactgaagatcgtggccgactgcgccaacggcgccacttccgtggtggctcccgaagccctgcgccgtgccggtgcggatgtaatcgtgatcaacgcctcgccggacggctacaacatcaacaagaacgccggttccacccaccccgagcagctgcaggccatggtcaaggccaccgatgccgtgatgggcgtggccttcgacggcgacgccgaccgttgtctcgccgtggacgaagacggcaacatgatcaacggcgaccagatcatgggcattctggcccgcgccaagcagcgcgaaggcaagctcaaccacgacaccctcgtggtcaccgtgatgagcaacctcggtctgaagctcgccctgaaagatatgggcatcaagaccgtggaaaccgccgtgggcgatcgttacgtgcttgaggaaatgctcaagggcgattactcgctcggcggcgagcagtccggccacgtgatcaaccgcgaattcgccaccaccggcgacggcaccctgaccgcactgaccctgtgcaacgaggtcgtcaagtccggcaagagcctgaaggagctcgccgccgacttcccgcagctgccgcagaccctcatcaacgtgccgaacgtggacaagaaggccgcctccaccaacaagcgcatccaggatgccgtggcccgtgaggaggaactgctgggagacaccggccgtgtgctgctgcgcccctccggcaccgaaccgctcgtgcgcgtgatggccgaggccgccacccaagcctacgccgacgaagtctgcacccgcctcgccaagatcgtcgccgaagaactcgcgctgtag

SEQ ID NO: 5968 - protein, 461 aa, Bifidobacterium longum
MPKMFGTDGVRGLANRDLTARLALDLGDAAVRVLGDAGTQDDQPEGRRRALVGRDTRVSGDFLASALSAGMAAGGFDVIDAGIIPTPGIAFLTSVLNVEMGAVISASHNPMPDNGIKFFARGGFKLPDQKEDDIEAVLGQDWDRPTGAGVGRVSHDQTTATNLYIDHLVATIAPLNDDKTQPKPLKGLKIVADCANGATSVVAPEALRRAGADVIVINASPDGYNINKNAGSTHPEQLQAMVKATDAVMGVAFDGDADRCLAVDEDGNMINGDQIMGILARAKQREGKLNHDTLVVTVMSNLGLKLALKDMGIKTVETAVGDRYVLEEMLKGDYSLGGEQSGHVINREFATTGDGTLTALTLCNEVVKSGKSLKELAADFPQLPQTLINVPNVDKKAASTNKRIQDAVAREEELLGDTGRVLLRPSGTEPLVRVMAEAATQAYADEVCTRLAKIVAEELAL

SEQ ID NO: 5969 - DNA, 1359 bp, Blochmannia floridanus
  CDS (1)..(1359): transl_table=11
atgaagcggagtaagtattttggaactgatggtattagaggtagagtaggtttatctcctattactccagattttatacttaagttaggttgggctgctggaaaggtattaagtaattatggtagtggtagatctaagcaggtgattattggaaaggatactcgtatttctggatatatgttagaatcagctttagaagctggtttagctgcttctggtttatctgcagcattaacagggcctatgcctactccagctatagcatatttaactcgtacttttagagctgaggctggaattgttatttctgcttctcataatcctttttatgataatggtattaagtttttttctattaaaggtactaaattagatactcaagtagagtattttattgaaacagaattaaataaatgcttaaaatgtattcaaccgaagttattaggaaaagccaaacgaattattgatgctgctggtcgttatattgaattttgtaaaggaacatttccggcacatttaagtttaaagaaactaagaattgttgtagattgtgctaatggggctacttatcatatcgctccaaatgtactaagagagttaggagcagatgttattgcaatttcttgtaatccgaatggaataaatattaataataaatgtggatcgacagatattcgtcgtttaaggactcaagtattgttaaaaaaagcagatttaggtattgcttatgatggagatggggatagagtgattatggtagatcatattggtaataaagttgatggagatcagatgttatatattcttgctaaagagtatttatatcaaagaaaattacatggaggtatagttggtacttggatgagtaatatgggtttagcattagcattgagagaattaaatattccttttgttagagctaatgttggagatcgtagtgtgttattaatgttaagggaaaaaggctggtatattggtggagagaattcagggcatatcgttttgttagataagacaactacaggggatggtattattgtagcgttacagatattatctactatggtgtctaatagtgtgagtttatatgaattatgtaataatgtgtatttattgcctcaaattttaataaatgtatattgttctggttttattaatcccttggagtctagtgtagtaaaaaaagaaatacagataattaaacaagaattgtctgatcaaggacgaatattgttgcgtcaatctggaacagagccatatattcgggttatggtagaaggaaaacattatagtaagatttcatatttagctaatagaattgtttcagtgattaaaggtgaaatgcggtcagtaaattaa

SEQ ID NO: 5970 - protein, 452 aa, Blochmannia floridanus
MKRSKYFGTDGIRGRVGLSPITPDFILKLGWAAGKVLSNYGSGRSKQVIIGKDTRISGYMLESALEAGLAASGLSAALTGPMPTPAIAYLTRTFRAEAGIVISASHNPFYDNGIKFFSIKGTKLDTQVEYFIETELNKCLKCIQPKLLGKAKRIIDAAGRYIEFCKGTFPAHLSLKKLRIVVDCANGATYHIAPNVLRELGADVIAISCNPNGININNKCGSTDIRRLRTQVLLKKADLGIAYDGDGDRVIMVDHIGNKVDGDQMLYILAKEYLYQRKLHGGIVGTWMSNMGLALALRELNIPFVRANVGDRSVLLMLREKGWYIGGENSGHIVLLDKTTTGDGIIVALQILSTMVSNSVSLYELCNNVYLLPQILINVYCSGFINPLESSVVKKEIQIIKQELSDQGRILLRQSGTEPYIRVMVEGKHYSKISYLANRIVSVIKGEMRSVN

SEQ ID NO: 5971 - DNA, 1359 bp, Bordetella bronchiseptica
  CDS (1)..(1359): transl_table=11
atgagtcaacgcaaatattttggtaccgacggcgtgcgcggcgaagtcggcggcccggtgatcaacgccgccttcgcgctgcgcctgggctatgccgccggccgggtgctggcgcgcgagcatcgcgagcacgccagcgggcgcggccgcaaccggccccaggtcgtgatcggcaaggacacccgcatttccggctacatgctggaatccgccctggaagccggcctgtcggccgccggcatcgacgtgctgctggccgggcccgtcccgacgccggccgtggcctacctgacgcgcacgctgcgcctggccgccggtatcgtgatcagcgcctcgcacaatccgtaccaggacaacggcatcaagttcttctccgcccatggcatgaagctgcccgacgacatcgaggccgccatcgagcaggcgctggacgagccgctgggctgcgtcggctcggaagaactgggccgcgcgcgccgcatggccgacgcccagggccgctacatcgaattctgcaagagcaccttcccgcacgacctggatctcaacgggctgaagctggtggtcgacgccgcccacggcgccgcctacaacgtcgctccgcatgtgttccgcgaactgggcgccgaggtgcatgccatcggcgtctcgcccgacggcttcaacatcaacaagggcgtgggcgcgctgcatccggaatcgctggccgaggaagtgcgcgcgcgcggcgccgacctgggcatcgcgctggacggcgacgccgaccgcctgcagatggtcgacggcaccggccgcatctacaacggcgacgaactgctctacgccatcgtgcgcgagcgcatgcagcgcggtccggtggccggggtggtcggcaccctgatgaccaactacggcctggagcgccagctgcagcagatcggcgtgggcttcgagcgggccaacgtcggcgaccgctacgtgctggagcagatgcaggcgcgcggctggctgtacggcggcgaaagctcgggccacctgctgtgcctggattgccataccacgggcgacggcacgatcgccgcgctgcaggtgctgacggcgctgcgtcgcgccgacgccacactggctgaatgggtggccgacctgcgcatgtatccgcagaagatgatcaacgtgccgctggcccccggcctggactggaaaacccacgacggcctggcgcgcgcgcgcggcgccgtcgaggccgagctggccggccggggccgggtgctgatccgcgcctcgggcaccgagcccaagctgcgcctgatggtcgaggccgaggacgaagcgctggcgcaggccagcgcccagaagctggccgacagcctgggcgcctga

SEQ ID NO: 5972 - protein, 452 aa, Bordetella bronchiseptica
MSQRKYFGTDGVRGEVGGPVINAAFALRLGYAAGRVLAREHREHASGRGRNRPQVVIGKDTRISGYMLESALEAGLSAAGIDVLLAGPVPTPAVAYLTRTLRLAAGIVISASHNPYQDNGIKFFSAHGMKLPDDIEAAIEQALDEPLGCVGSEELGRARRMADAQGRYIEFCKSTFPHDLDLNGLKLVVDAAHGAAYNVAPHVFRELGAEVHAIGVSPDGFNINKGVGALHPESLAEEVRARGADLGIALDGDADRLQMVDGTGRIYNGDELLYAIVRERMQRGPVAGVVGTLMTNYGLERQLQQIGVGFERANVGDRYVLEQMQARGWLYGGESSGHLLCLDCHTTGDGTIAALQVLTALRRADATLAEWVADLRMYPQKMINVPLAPGLDWKTHDGLARARGAVEAELAGRGRVLIRASGTEPKLRLMVEAEDEALAQASAQKLADSLGA

SEQ ID NO: 5973 - DNA, 1359 bp, Bordetella pertussis
  CDS (1)..(1359): transl_table=11
atgagtcaacgcaaatattttggtaccgacggcgtgcgcggcgaagtcggcggcccggtgatcaacgccgccttcgcgctgcgtctgggctatgccgccggccgggtgctggcgcgcgaacatcgcgagcacgccagcgggcgcggccgcaaccggccccaggtcgtgatcggcaaggacacccgcatttccggctacatgctggaatccgccctggaagccggcctgtcggccgccggtatcgacgtgctgctggccgggcccgtcccgacgccggccgtggcctacctgacgcgcacgctgcgcctggccgccggtatcgtgatcagcgcctcgcacaatccgtaccaggacaacggcatcaagttcttctccgcccatggcatgaagctgcccgacgacatcgaggccgccatcgagcaggcggtggacgagccgctgggctgcgtcggctcggaagaactgggccgcgcgcgccgcatggccgacgcccagggccgctacatcgaattctgcaagagcaccttcccgcacgacctggatctcaacgggctgaagctggtggtcgacgccgcccacggcgccgcctacaacgtcgctccgcatgtgttccgcgaactgggcgccgaggtgcatgccatcggcgtctcgcccgacggcttcaacatcaacaagggcgtgggcgcgctgcatccggaatcgctggccgaggaagtgcgcgcgcgcggcgccgacctgggcatcgcgctggacggcgacgccgaccgcctgcagatggtcgacggcaccggccgcatctacaacggcgacgaactgctctacgccatcgtgcgcgagcgcatgcagcgcggtccggtggccggggtggtcggcaccctgatgaccaactacggcctggagcgccagctgcagcagatcggcgtgggtttcgagcgggccaacgtcggcgaccgctacgtgctggagcagatgcaggcgcgcggctggctgtacggcggcgaaagctcgggccacctgctgtgcctggattgccataccacgggcgacggcacgatcgccgcgctgcaggtgctgacggcgctgcgtcgcgccgacgccacactggctgaatgggtggccgacctgcgcatgtatccgcagaggatgatcaacgtgccgctggctcccggcctggactggaaaacccacgacggcctggcgcgcgcgcgcggcgccgtcgaggccgagctggccggccggggccgggtgctgatccgcgcctcgggtaccgagcccaagctgcgcctgatggtcgaggccgaggacgaagcgctggcgcaggccagcgcccagaagctggccgacagcctgggcgcctga

SEQ ID NO: 5974 - protein, 452 aa, Bordetella pertussis
MSQRKYFGTDGVRGEVGGPVINAAFALRLGYAAGRVLAREHREHASGRGRNRPQVVIGKDTRISGYMLESALEAGLSAAGIDVLLAGPVPTPAVAYLTRTLRLAAGIVISASHNPYQDNGIKFFSAHGMKLPDDIEAAIEQAVDEPLGCVGSEELGRARRMADAQGRYIEFCKSTFPHDLDLNGLKLVVDAAHGAAYNVAPHVFRELGAEVHAIGVSPDGFNINKGVGALHPESLAEEVRARGADLGIALDGDADRLQMVDGTGRIYNGDELLYAIVRERMQRGPVAGVVGTLMTNYGLERQLQQIGVGFERANVGDRYVLEQMQARGWLYGGESSGHLLCLDCHTTGDGTIAALQVLTALRRADATLAEWVADLRMYPQRMINVPLAPGLDWKTHDGLARARGAVEAELAGRGRVLIRASGTEPKLRLMVEAEDEALAQASAQKLADSLGA

SEQ ID NO: 5975 - DNA, 1356 bp, Bradyrhizobium japonicum; identical to SEQ ID NO: 5819
  CDS (13)..(1356): transl_table=11

SEQ ID NO: 5976 - protein, 447 aa, Bradyrhizobium japonicum
MSRKYFGTDGIRGRANGLITPELALKVGQAAGLAFQRGDHRHRVVIGKDTRLSGYMIEYAMVAGFTSVGMDVLLVGPMPTPAVAMLTKSMRADLGVMISASHNLFEDNGIKLFGPQGFKLSDDVEKQIEQLLDEPIDKRLAQSASLGRARRIDGVHDRYIEFAKRTLPRDLSLDGLRVVVDCANGAAYKVVPEALWELGADVVPIGVEPDGFNINKDCGSTSPEALSKKVREMRADIGIALDGDADRVILVDERGHVVDGDQLLAVIAQSWKEDGRLSRPGIVATVMSNLGLERFLKGQGLDLVRTPVGDRYVLEQMLSGGYNLGGEQSGHIILSDYATTGDGFVAALQVLAVVQKSRRPVSEVCHRFDPLPQILKNVRHKGGKPLDDSDVKSAISDGEKRLNGHGRLLIRSSGTEPVIRVMGEGEDRILVEDVVDTIVSALGQAAA

SEQ ID NO: 5977 - DNA, 1350 bp, Bradyrhizobium sp
  CDS (1)..(1350): transl_table=11
atgagccgtaactatttcgggaccgatgggatacgtggccgagccaatggcctgatcacgccggaactcgcgctcaaggtcggtcaggccgcgggtcttctgttccagcgcggcgagcaccgccatcgggtggtgatcggcaaggacacacgcctgtccggctacatgatcgagtacgcgatggtcgccggcttcacctcggtcggcatggatgtgctgctggtcggcccgatgccgacgccggcggtcgcaatgctgaccaagtcgatgcgcgccgatctcggcgtgatgatctcggcctcgcacaacctgttcgaggacaacggcatcaagctgttcgggccgcagggattcaagctgtccgacgacgtcgagaagcagatcgagcagctgctcgatgaatcgctcgacaagaagctggcgcagagcgcgagcctcggccgcgcccgccgcatcgacggcgtgcacgatcgctacatcgaattcgccaagcgcaccttgccgcgcgacctctcgctcgacggcttgcgcgtggtggtcgattgcgccaatggcgcggcgtacaaggtcgtgcccgaggcgctgtgggagctcggggccgacgtgatctcgatcggcgtggagcccgacggcttcaacatcaacaaggaatgcggctcgacttcgcccgaggcgctatgtcgcaaggttcgcgaaatgcgcgccgatatcggcatcgcgctcgacggcgacgccgaccgcgtgatcctggtcgacgagcgcggccacatcgtcgacggcgaccagctgctcgccgtgatcgcgcagagctggaaggaagacggacgcctgtcgcgtcccggcatcgtcgcgaccgtgatgtccaatctcggtctcgagcgcttcctgcaggggcaggggctcgaactggtgcgcacaccggtcggcgatcgctacgtgctcgagcgaatgctcgccgacggctacaatctcggcggcgagcagtcgggccacatcatcctgtcggactacgcgacgaccggcgacggcttcgtcgcggcgcttcaggtgctcgccacggtgcagaagctgcgtcgtccggtctccgaggtttgccacaagttcgacccgctgccgcagatcctcaagaacgtgcgctaccgcagcggcaagccgctcgacaccgacgccgtgaagtcggcgatcgacaccggccagaaacgcctcaacggccatggccgcctgctcgtacggtcctcgggcaccgagcctgtcatccgggtgatgggcgagggcgatgaccgcaacctggtcgaggaggtcgtcgacgacatcgtcaccgcggtcggcaacgccgcagcggccgcctga

SEQ ID NO: 5978 - protein, 449 aa, Bradyrhizobium sp
MSRNYFGTDGIRGRANGLITPELALKVGQAAGLLFQRGEHRHRVVIGKDTRLSGYMIEYAMVAGFTSVGMDVLLVGPMPTPAVAMLTKSMRADLGVMISASHNLFEDNGIKLFGPQGFKLSDDVEKQIEQLLDESLDKKLAQSASLGRARRIDGVHDRYIEFAKRTLPRDLSLDGLRVVVDCANGAAYKVVPEALWELGADVISIGVEPDGFNINKECGSTSPEALCRKVREMRADIGIALDGDADRVILVDERGHIVDGDQLLAVIAQSWKEDGRLSRPGIVATVMSNLGLERFLQGQGLELVRTPVGDRYVLERMLADGYNLGGEQSGHIILSDYATTGDGFVAALQVLATVQKLRRPVSEVCHKFDPLPQILKNVRYRSGKPLDTDAVKSAIDTGQKRLNGHGRLLVRSSGTEPVIRVMGEGDDRNLVEEVVDDIVTAVGNAAAAA

SEQ ID NO: 5979 - DNA, 1428 bp, Brucella melitensis; identical to SEQ ID NO: 5815
  CDS (73)..(1428): transl_table=11

SEQ ID NO: 5980 - protein, 451 aa, Brucella melitensis
MTRKFFGTDGIRGQANSFPMTPEIAMKVGMAVGYIFRRKGQASRAVIGKDTRRSGYMLENALVAGFTAAGMDVFLLGPIPTPAVAMLCRSLRADIGVMISASHNPFYDNGIKLFGPDGFKLSDQIELQIEAMIEGDMTPFLASHGDVGRAKRVDGDIYRYIEFAKRTLPRNISLNGLRVVVDCANGAGYKVAPAALWELGAEVITINNEPNGININEDCGSTHPIGLMKKVHGVRADVGIALDGDADRVLLVDENGTVIDGDQLMAVIAESWAASNRLEGGGIVATVMSNLGLERFLADRNLTLARTKVGDRYVVEHMREHGFNVGGEQSGHIVLSDFATTGDGLISALQILAVAQEQNKPISDVCRKFQPVPQLLKNVRTTGGKPLENKRVKSAIDEAKERLGGQGRLVIRPSGTEPLIRVMAEGDDRGLVEKVVNDIIDVISSESSAAA

SEQ ID NO: 5981 - DNA, 1335 bp, Buchnera aphidicola subsp
  CDS (1)..(1335): transl_table=11
atgacttttttgcaatattttaaaacagatggtatacgtggaaaagtaggagtaaatccaataacacctgattttttattaaaattaggatggtctattggaatagttttaggtaaaaataaaacacaaaaaattattattggaagagatactcgtatttctggaaccatgttacagtctattttagaatttggtattttgtctacaggagtatctactttactagctggttgtatgcccacatcagccatctcttattttactaaatctttaaatgcttctgctggaattgttatttcgggttcccacaatcctttttatgacaatggaataaaaatcttctataaaaatggggttaaattaactaaagaaatagagttttctattgagcaaaaagtacaacatacttttttatatcctgattatgtaaattttggtcattctaataatattttagatcctgaaagtctgtatattgacttttgcaaaaaaaattttccaaaagatttaaatttatcaaaatttactattattttagattgcgctaatggtgcaacttttaagatagcacctaaaatttttgaagatttaggagcaagggtaatcactgttgctattaatcctaatggagttaatataaatcaaaattcaggatctactaatatcttgatgttaaaaaaaatagttttatcagaatcagctgatcttggtttagcatttgatggagatggagatcgtgtcattatggtagatcatttaggaaatcaagtagatggagatcaaataatttatattattgcaaaagaatatttaaaagaaaataaattaaaaggtggtgttgtaggtacttcaatgactaatatgggtgtaattctaggtttaaaaaaacttggaattcctttttgtcccgcacaaataggggatcgaaatgtatacgaaaaaattaaagaaaaaaagtggatactaggagcagaaaaatcaggacatattgttttgttagataagcattctactggtgatggaattatagctagtttacaagttttgttaactatgattaataatcatatgactttatatgatttatcaaatcaaataaaactttttcctcaagtttttcttaatatttttttaaaacaagataaagattttgaaaaagatataaaaatacaaaatattctcactcaatataaaaatattttaggtcaaaatagtcgtgttttagtacgacgatctggtacagaaccatgtattagaattatggtagaaggtgaagattatttaaaagtttatgaattagctcaatatattggaaaaactattaaattactttaa

SEQ ID NO: 5982 - protein, 444 aa, Buchnera aphidicola subsp
MTFLQYFKTDGIRGKVGVNPITPDFLLKLGWSIGIVLGKNKTQKIIIGRDTRISGTMLQSILEFGILSTGVSTLLAGCMPTSAISYFTKSLNASAGIVISGSHNPFYDNGIKIFYKNGVKLTKEIEFSIEQKVQHTFLYPDYVNFGHSNNILDPESLYIDFCKKNFPKDLNLSKFTIILDCANGATFKIAPKIFEDLGARVITVAINPNGVNINQNSGSTNILMLKKIVLSESADLGLAFDGDGDRVIMVDHLGNQVDGDQIIYIIAKEYLKENKLKGGVVGTSMTNMGVILGLKKLGIPFCPAQIGDRNVYEKIKEKKWILGAEKSGHIVLLDKHSTGDGIIASLQVLLTMINNHMTLYDLSNQIKLFPQVFLNIFLKQDKDFEKDIKIQNILTQYKNILGQNSRVLVRRSGTEPCIRIMVEGEDYLKVYELAQYIGKTIKLL

SEQ ID NO: 5983 - DNA, 1362 bp, Buchnera aphidicola subsp
  CDS (1)..(1362): transl_table=11
gtgataaaatattttggcacagatggtatccgaggagtagtaggtaaaactcctattactgctgattttttttttaaattaggtgcggttattggaaagatcttatatttttacgatgtaaaaaaaataattataggtagagatactcgtctttctagttatatgttggaagaagcattacaatttggtttatctttagttggtgtttcagttatttctgtaggtgttcttcctactccagcaatttcgtattttacgaaattatttaatttagaagttggcgtagttatatcagcatctcataatcagtttagagataatggtattaaattttttgtaaaaaatggtgtaaaattatccgctaaatttgaaagacgaatagaaaaacaattaaataagactataatattaaaacagtttgtagatttaggtcatattagttataaacgagcattacagcaaaaatatataaatttttgtatttctacgttaccgaataattttcgtttaaacaattttaagattgtgttagattgtgctaatggatcaacatatgaattagctccaattatttttagagagttaggagcaaatgttgttttgatgtctgctgctcctaatggattgaatataaatgataaatgcggaactaccgatttacaagaaatacaaagattagttttatcggaaaaagctgatttaggtatatcttttgatggtgatggtgatcgtgtgataatgatagaccattttggaaattcagttaatggagatcaaattttatatattttggcaaaaaattacaaaaaaaataaaaaattaaggggaggagtagttggaactaaaatgagtaatggcggtttatcgctggcattgtcaaaaattggtattccctttattactgttaatataggagataggtatatatttaaaaaattgaaagaaaagcaatggagattaggtgcagaaagttcggggcatgttattttgttagactatgcaccagtaggtgatggtattattactagtttacagattttaaaaattatttttgacgagaattctactttaaaatctttatgtagtgatatacacatgttacctcagataattataaatataaaaaacaatatcgatattagttttttaaaaaattttaaaattcagtcagtgttgtctaaatataaggattttttaggaaaatatagtcgtataatgttaagattatcaggaacagaaaaatgtatacgaataatgattgagggatgttgttctaaaaagattaatattttttcgaaaatgttaattaatgtcataaattcggttaagaaatctagattttctataataacgatgttttaa

SEQ ID NO: 5984 - protein, 453 aa, Buchnera aphidicola subsp
MIKYFGTDGIRGVVGKTPITADFFFKLGAVIGKILYFYDVKKIIIGRDTRLSSYMLEEALQFGLSLVGVSVISVGVLPTPAISYFTKLFNLEVGVVISASHNQFRDNGIKFFVKNGVKLSAKFERRIEKQLNKTIILKQFVDLGHISYKRALQQKYINFCISTLPNNFRLNNFKIVLDCANGSTYELAPIIFRELGANVVLMSAAPNGLNINDKCGTTDLQEIQRLVLSEKADLGISFDGDGDRVIMIDHFGNSVNGDQILYILAKNYKKNKKLRGGVVGTKMSNGGLSLALSKIGIPFITVNIGDRYIFKKLKEKQWRLGAESSGHVILLDYAPVGDGIITSLQILKIIFDENSTLKSLCSDIHMLPQIIINIKNNIDISFLKNFKIQSVLSKYKDFLGKYSRIMLRLSGTEKCIRIMIEGCCSKKINIFSKMLINVINSVKKSRFSIITMF

SEQ ID NO: 5985 - DNA, 1359 bp, Burkholderia pseudomallei
  CDS (1)..(1359): transl_table=11
atgggacgtcgttatttcggcacggacggcattcgcggcaaggtcggcgacgcgccgatcacgcccgatttcgtgttgcggctcggctacgcggcgggcaaggtgctcgcgagcgcgcccgggcgcgcggcgtcgggcgcgcgcccgacggtgctgatcggcaaggacacgcgggtatcgggctatatgctcgaggccgcgctcgaagccggtttttccgccgcgggcgtcgacgtgatgctcgcggggccgatgccgacgccgggcgtcgcgtatctgacgcgcgcgttgcggctgtcggcgggcgtcgtgatcagcgcgtcgcacaatccgtatcacgacaacggcatcaagttcttctcggccgacggcaacaagctgccggacgagatcgaggccgagatcgaggcgtggctcgacaagccgctcgactgcgcggcatcggacgggctcggcaaggcgcggcgcctcgacgacgcggccggccgctacatcgagttctgcaagagcacgttcccggccgcgttcgatctgcgcgggatgaagctcgtcgtcgactgcgcgcacggcgccgcgtatcaggtcgcgccgcacgtgtttcacgagctcggtgcggacgtgatcccgatcggcgtcgcgccgaacggcttcaacatcaacgatggtgtcggcgcgacggcgcctgatgcgctgatgcgcgccgtgcgcgcgaatcatgccgatctcggcatcgcgctcgacggcgacgcggaccgcctgctcgtcgtcgaccataccggccggctatataacggcgacgaactgctgtacgtgctcgtcaaggatcgcattgcaactaacggccaagtcgagggggcggtgggcacgctgatgacgaatttcgccgtcgaagtcgcgctgaaagaagcgggcgtgcaattcgtgcgggcggcggtcggcgaccgttacgtgctcgagcagttgcgcgagcatggctggcagctcggcgcggaaggttcgggccacatcctgtcgctcgaccggcattcgacgggcgacgggatcgtctcggcgctgctcgtgctcgcggcgctcaagcgcagcggcaagacgctcgcgcagatgctcgaaggcgtcacgctgtttccgcagaagctgatcaacgtccggatgaagccgggcgccgactggaagggcagcgacgcgattcgccgcgcgatcgattcggccgaacaggcgctgtcgggcagcggccgcgtgctgattcgcgcgtcggggacggaacccgtgttgcgcgtgatggtcgaggcgcggcaggcgacggacgcgaaccgtcatgcggaggcgatcgccgacgcggtcaagcaggccaccgcttga

SEQ ID NO: 5986 - protein, 452 aa, Burkholderia pseudomallei
MGRRYFGTDGIRGKVGDAPITPDFVLRLGYAAGKVLASAPGRAASGARPTVLIGKDTRVSGYMLEAALEAGFSAAGVDVMLAGPMPTPGVAYLTRALRLSAGVVISASHNPYHDNGIKFFSADGNKLPDEIEAEIEAWLDKPLDCAASDGLGKARRLDDAAGRYIEFCKSTFPAAFDLRGMKLVVDCAHGAAYQVAPHVFHELGADVIPIGVAPNGFNINDGVGATAPDALMRAVRANHADLGIALDGDADRLLVVDHTGRLYNGDELLYVLVKDRIATNGQVEGAVGTLMTNFAVEVALKEAGVQFVRAAVGDRYVLEQLREHGWQLGAEGSGHILSLDRHSTGDGIVSALLVLAALKRSGKTLAQMLEGVTLFPQKLINVRMKPGADWKGSDAIRRAIDSAEQALSGSGRVLIRASGTEPVLRVMVEARQATDANRHAEAIADAVKQATA

SEQ ID NO: 5987 - DNA, 1356 bp, Burkholderia sp
  CDS (1)..(1356): transl_table=11
atgggacgtcgatatttcggcacggacggtattcgcggcacggtgggcgaggggcccatcacaccggatttcgtgttgcgcctcggctacgcggcgggcaaggtactggccagctcggccgaggtcgcggcgggctcgcgtccgaccgtgctgatcggcaaggacacgcgcgtgtcgggctacatgctcgaagccgcgctcgaggccgggttttcggcggcgggcgtcgacgtgatgctggccggcccgatgccgacgccgggcgtcgcgtacctgacgcgtgcgctgcgcctgtcggcgggcgtcgtgatcagcgcatcgcacaacccgtatcacgacaacgggatcaagtttttctccgctgacggcaacaagctgccggacgacaccgaagccgcgatcgaagcgtggctcgacaagccgctcgaatgcgcatcgtccgacggtctcggcaaggcgcgtcgcctcgacgacgcggccggccgctacatcgagttctgcaagagcacgttcccggccgcgttcaacctgcgcgggctgaagctcgtgatcgactgtgcgcacggtgccgcgtaccagatcgcaccgcacgtgttccacgaactcggcgcggacgtgatcccgatcggcgtcgcgccgaacggcttcaacatcaacgacggcgtcggtgcgaccgcgcctgacgcgctggtgcgcgcggtgcgtgccaaccacgccgatctcggcattgcgctcgacggcgatgcagaccgcctgcaggtcgtggactcgaccggccgcctgtacaacggcgacgagcttctctacgtgctcgtgaaggaccggatcgcgaccgacgggaaggtcgaaggtgcggtcggcacgttgatgacgaacctcgcggtcgaagtcgcgctgcagcgcgagggcgtgaagttcgtccgtgcggcggtcggcgatcgctacgtgctcgaacagttgcgcgagcacggctggcagctcggcgcggaaggttcgggccacatcctgtcgctcgatcgccattcaaccggcgacggcatcgtgtcggcgctgctcgtgctggccgcgctgaagcgcagcggccagaccctcgcgcagatgctcgacggcgtcacgctgttcccgcagaagctgatcaacgtgcggatgaagccgggcgccgactggaagggcagcacgtcgattcgcgccgcgatcgacacagccgaagccgcgctcgccggcagcggccgcgtgctgatccgcgcatcgggcaccgagcccgtgctgcgcgtaatggtcgaagcgcagcaggctgctgacgcggtccgccatgcggagacgatcgccgacgcggtgcgcgcggcgacgacctga

SEQ ID NO: 5988 - protein, 451 aa, Burkholderia sp
MGRRYFGTDGIRGTVGEGPITPDFVLRLGYAAGKVLASSAEVAAGSRPTVLIGKDTRVSGYMLEAALEAGFSAAGVDVMLAGPMPTPGVAYLTRALRLSAGVVISASHNPYHDNGIKFFSADGNKLPDDTEAAIEAWLDKPLECASSDGLGKARRLDDAAGRYIEFCKSTFPAAFNLRGLKLVIDCAHGAAYQIAPHVFHELGADVIPIGVAPNGFNINDGVGATAPDALVRAVRANHADLGIALDGDADRLQVVDSTGRLYNGDELLYVLVKDRIATDGKVEGAVGTLMTNLAVEVALQREGVKFVRAAVGDRYVLEQLREHGWQLGAEGSGHILSLDRHSTGDGIVSALLVLAALKRSGQTLAQMLDGVTLFPQKLINVRMKPGADWKGSTSIRAAIDTAEAALAGSGRVLIRASGTEPVLRVMVEAQQAADAVRHAETIADAVRAATT

SEQ ID NO: 5989 - DNA, 1359 bp, Burkholderia thailandensis
  CDS (1)..(1359): transl_table=11
atgggacgtcgttatttcggcacggacggcattcgcggcaaggtcggcgacgcgccgatcacccccgatttcgtgttgcggctcggttacgcggcgggcaaggtgctcgcgagcgcgcctggccgcgcggcgtcgggcgcgcggccgacggtgctgatcggcaaggacacgcgcgtgtcgggctacatgctcgaagccgcacttgaagcaggtttttccgcggcgggcgtcgacgtgatgctcgcgggcccgatgccgacgccgggcgtcgcgtatctgacgcgcgcgctgcggctgtcggcgggcgtcgtgatcagcgcgtcgcacaatccgtatcacgacaacggcatcaagttcttctcggccgacggcaacaaactgccggacgaaaccgaagccgagatcgaggcgtggctcgacaagtcgctcgattgcgcgccgtcggatgggctcggtaaggcgcggcgtctcgacgacgcggccggccgctacatcgagttctgcaagagcacgttcccggctgcgttcgacctgcgcgggatgaagcttgtcgtcgattgcgcgcacggcgccgcgtatcaggtcgcgccgcatgtatttcacgaacttggcgcggatgtgatcccgatcggcgtggcgccgaacggcttcaacatcaacgacggcgtcggcgcgacggcgcccgacgcgctgatgcgcgcggtgcgcgcgaaccatgccgatctgggcattgccctcgacggcgatgcggatcgcctgctcgtcgtcgaccatactgggcggctgtataacggcgatgagttgctgtacgtgctcgtcaaggatcgcattgcaactaacggccaggttgagggggcggtgggcacgctgatgacgaatctcgccgtcgaagtcgcgctgaaagacgcgggcgtgcagttcgtgcgggcggcggttggcgatcgctacgtgctcgagcagttgcgcgagcgcggctggcaactcggcgccgagggctcgggccacattctgtcgctcgatcggcattcgacgggcgacgggatcgtctcggcgctgctcgtgctcgccgcgctcaagcgcagcggcaagacgctcgcgcagatgctcgaaggcgtcacgctgttcccgcagaagctgatcaacgtgcggatgaagcctggcgccgactggaagggcagtgatgcgatccgccgcgcgatcggttcggccgagcaggcgcttgccggcagcggccgcgtgctgatccgcgcgtcggggacggaacccgtgttgcgggtgatggtcgaggcgcggcacgcggcggatgcgaaccatcatgcggaggcgattgccgacgcggtcaagcaggcgacggcgtaa

SEQ ID NO: 5990 - protein, 452 aa, Burkholderia thailandensis
MGRRYFGTDGIRGKVGDAPITPDFVLRLGYAAGKVLASAPGRAASGARPTVLIGKDTRVSGYMLEAALEAGFSAAGVDVMLAGPMPTPGVAYLTRALRLSAGVVISASHNPYHDNGIKFFSADGNKLPDETEAEIEAWLDKSLDCAPSDGLGKARRLDDAAGRYIEFCKSTFPAAFDLRGMKLVVDCAHGAAYQVAPHVFHELGADVIPIGVAPNGFNINDGVGATAPDALMRAVRANHADLGIALDGDADRLLVVDHTGRLYNGDELLYVLVKDRIATNGQVEGAVGTLMTNLAVEVALKDAGVQFVRAAVGDRYVLEQLRERGWQLGAEGSGHILSLDRHSTGDGIVSALLVLAALKRSGKTLAQMLEGVTLFPQKLINVRMKPGADWKGSDAIRRAIGSAEQALAGSGRVLIRASGTEPVLRVMVEARHAADANHHAEAIADAVKQATA

SEQ ID NO: 5991 - DNA, 1356 bp, Burkholderia vietnamiensis
  CDS (1)..(1356): transl_table=11
atgggacgtcgatatttcggcacggacggcattcgtgggacggtcggcgatacgccgatcacgcccgatttcgtgttgcgtctcggctatgccgcgggcaaggtgctggccggtgccgcggacggcgcgacgggcgcgcgaccgacggtgctgatcggcaaggacacgcgcgtgtcgggctacatgctcgaggcggcgctcgaggccggcttctcggcggcgggcgtcgacgtgatgctggccggcccgatgccgacgccgggtgtcgcatatctgacgcgcgcgctgcggctgtcggccggcgtcgtgatcagcgcttcgcacaacccgtatcaggacaacggcatcaagttcttctcggccgacggcaacaagctgcccgacgaaaccgaggccgagatcgaagcctggctcgacaagccgctcgaatgcgcatcgtcggaccggctcggcaaggcgcgccggctcgacgacgcggccggccgctacatcgagttctgcaagagcacgttcccggccgcctacgatctgcgcgggctgaagctcgtgatcgactgcgcgcacggcgccgcctaccagatcgcgccgcacgtgttccacgaactcggcgcggacgtgatcccgatcggcgtcgcgccgaacggcttcaacatcaacgacggcgtcggcgcgacggcgcccgacgcgctggtgcgcgcggtgcgcgcgaaccatgccgatctcggcatcgcgctcgacggcgatgcggaccgcctgcaggtcgtcgattcgagcggccggctgttcaacggcgacgagctgctctacgtgctcgtgaaggaccgcatcgcgacggccggcaaggtcgagggcgcggtcggcacgctgatgacgaacctcgcggtcgaggtcgcgctgcagcgcgaaggcgtcgaattcgtgcgggcggcggtcggcgaccgctatgtgctcgaacagctgcgcgagcgcggctggcagctcggcgcagaaggctccggccacatcctgtcgctcgaccgtcattcgaccggcgacggcatcgtgtcggcgctgctggtgctggccgcgctcaagcgcagcggccgcacgctcgcgcagatgctcgacggcgtcacgctgttcccgcagaagctgatcaacgtgcggatgaagccgggcgccgactggaagggcagcgcatcgattcgcgccgcgatcgacgcggccgagagcgcgctggcgggccacggccgcgtgctgatccgcgcctcgggcaccgagccggtgctgcgcgtgatggtcgaggcgcagcaggcggccgacgcgacgcgccacgcggaagcgatcgcggacgccgtgcgcgaagcgacgagctga

SEQ ID NO: 5992 - protein, 451 aa, Burkholderia vietnamiensis
MGRRYFGTDGIRGTVGDTPITPDFVLRLGYAAGKVLAGAADGATGARPTVLIGKDTRVSGYMLEAALEAGFSAAGVDVMLAGPMPTPGVAYLTRALRLSAGVVISASHNPYQDNGIKFFSADGNKLPDETEAEIEAWLDKPLECASSDRLGKARRLDDAAGRYIEFCKSTFPAAYDLRGLKLVIDCAHGAAYQIAPHVFHELGADVIPIGVAPNGFNINDGVGATAPDALVRAVRANHADLGIALDGDADRLQVVDSSGRLFNGDELLYVLVKDRIATAGKVEGAVGTLMTNLAVEVALQREGVEFVRAAVGDRYVLEQLRERGWQLGAEGSGHILSLDRHSTGDGIVSALLVLAALKRSGRTLAQMLDGVTLFPQKLINVRMKPGADWKGSASIRAAIDAAESALAGHGRVLIRASGTEPVLRVMVEAQQAADATRHAEAIADAVREATS

SEQ ID NO: 5993 - DNA, 1359 bp, Burkholderia xenovorans
  CDS (1)..(1359): transl_table=11
atggcacgtcgttatttcggaacggacggcattcgcggcaaagtcggcgaagggcctatcacgccggaatttgtattgaggctcggctacgcggccggcaaggtgctggcgggcgcggaccgctgggcgaagacgggcacgcggccaactgtgctgatcggtaaagacacgcgggtgtcgggctatatgctcgaagcggcgctcgaagcgggcttctccgccgcgggcgtggatgtgatgctggccggcccgatgccgacccctggtatcgcctatctgacgcgcgcgctgcggctcgccgcgggcgtggtcatcagtgcgtcgcacaacccctactacgacaacggcatcaaatttttctccgccgacggcaacaagctgccggacgaagtggaagcgcagatcgaagagcagctcgaccagccgctcgcctgcgcggcatccgagcaactcggcaaggcgcggcgtctcgacgacgcagcgggccgctatatcgagttctgcaagagcacctttccggccgcgttcgatctgcgcggtctgaagctggtcgtcgactgcgcgcacggtgccgcgtatgacgtcgcgccgcacgtgttccatgagctcggcgccgacgtgattccgatcggcgtcgcgccgaacggtttcaatatcaacgacggagtcggtgcgaccgcaccggatgcgctggtgcgcgccgtgcgggcgaatcatgccgatctcggcattgcgctcgacggcgacgccgaccgcctgcaggtggtcgacgccgcaggccgtctctataacggcgacgagttgctgtacatcctcgtcaaggatcgcatcgcgaccgagggcaaggtggagggcgcggtcggcaccctgatgacgaatatggcggtggaggtggcgctgcaggaagccggcgtgaagttcgtccgcgcggcggtcggcgaccgttacgtgctcgagcagctgcgcgaacacggctggcagctcggggccgaaggctccggccatattctctctcttgaccgccattccacgggcgacggcatcgtctccgcgctgctggtgctggcggccatgaagcgcagcgacaagacgctcgccgagttgctcggcggcgtcacgctgttcccgcaaaagctgatcaacgtgcgtatgaagcccgacgcggactggaagggcagcgacgtgatccgccgcgccatcgccaaggctgaggacgcgctgaacgggcgcggccgcgtgctgatccgcgcgtccggcaccgagccggtgctgcgcgtgatggtggaagctgaaaatgtcgccgacgcagttcagtatgcggagtcgatcgccagcgcggtgaagcaggccacggcgtaa

SEQ ID NO: 5994 - protein, 452 aa, Burkholderia xenovorans
MARRYFGTDGIRGKVGEGPITPEFVLRLGYAAGKVLAGADRWAKTGTRPTVLIGKDTRVSGYMLEAALEAGFSAAGVDVMLAGPMPTPGIAYLTRALRLAAGVVISASHNPYYDNGIKFFSADGNKLPDEVEAQIEEQLDQPLACAASEQLGKARRLDDAAGRYIEFCKSTFPAAFDLRGLKLVVDCAHGAAYDVAPHVFHELGADVIPIGVAPNGFNINDGVGATAPDALVRAVRANHADLGIALDGDADRLQVVDAAGRLYNGDELLYILVKDRIATEGKVEGAVGTLMTNMAVEVALQEAGVKFVRAAVGDRYVLEQLREHGWQLGAEGSGHILSLDRHSTGDGIVSALLVLAAMKRSDKTLAELLGGVTLFPQKLINVRMKPDADWKGSDVIRRAIAKAEDALNGRGRVLIRASGTEPVLRVMVEAENVADAVQYAESIASAVKQATA

SEQ ID NO: 5995 - DNA, 1338 bp, Campylobacter jejuni
  CDS (1)..(1338): transl_table=11
atgaaactttttggaactgatggagttcgtggaaaagcgggtgaatttttagatagttttttggctatgcgtttagcaatggctgcgggtatttattttaaagataaaagtattactaataatatcttagtaggaaaagatacaagaagaagcggctatatgatagaaaatgctattgtttcagggcttacttctataggatataatgttatacaaattggtcctatgccaactcctgcgattgcattcttaactgaagatatgcgttgtgatgcagggattatgatttcagcttctcacaatccttattatgataatggtattaaattttttgatgctcatggaaacaaactcagtgaagatatagagaaaaaaatagaagaaatttattttgatgataagcttatacaagcctctaaggtagatatggagaaaattggtcaagcgaaaagaattgatgatgttataggaaggtatattgtttctattaaaaattcttttccaaaagatcttactttaaagtctttgcgtgtggttttagatgtggctcatggggcagcttataaggtagcacctactgtttttaaggaattaggtgctgaagttatagtaatgagcgataaacctaatggacttaatatcaatgaaaattgtggagctttacatcctgcaaatttagctgctgaggtaaagcgtttgcgtgcagatgtgggctttgcttttgatggtgatgcagatcgtttggtggttgtagatgaaaaaggcgaagtggctaatggggatagtttattgggcgtattggcactttatcttaaagaacaaggtaaattacaatcaagtgttgtggctactataatgagtaatggtgctttaaaagagtttttaaataaacatggtatagaacttgatacttgtaatgttggcgataaatatgtgcttgaaaaactaaaagccaatggtggaaattttggtggagaacaaagtgggcatattatttttagcgattatgcaaaaactggagatggtttgatagccgccttgcaatttagtgctttaatgctttctaagaaaaaatctgcaagttctattttgggtcaagttaaaccttatcctcagcttttaaccaatcttaaaattgcagaaaaaaaagatttagataaaattaaaggtttaaaagaattaaaaaaagatttagaaaataaaaatattaataccttatttcgctattctggaacagaaaatttgataagacttttactagaagccagagatattaagctcttagaaaaagaaatgaaaaatgttgtggagttttttaagaaagctttaaatggctaa

SEQ ID NO: 5996 - protein, 445 aa, Campylobacter jejuni
MKLFGTDGVRGKAGEFLDSFLAMRLAMAAGIYFKDKSITNNILVGKDTRRSGYMIENAIVSGLTSIGYNVIQIGPMPTPAIAFLTEDMRCDAGIMISASHNPYYDNGIKFFDAHGNKLSEDIEKKIEEIYFDDKLIQASKVDMEKIGQAKRIDDVIGRYIVSIKNSFPKDLTLKSLRVVLDVAHGAAYKVAPTVFKELGAEVIVMSDKPNGLNINENCGALHPANLAAEVKRLRADVGFAFDGDADRLVVVDEKGEVANGDSLLGVLALYLKEQGKLQSSVVATIMSNGALKEFLNKHGIELDTCNVGDKYVLEKLKANGGNFGGEQSGHIIFSDYAKTGDGLIAALQFSALMLSKKKSASSILGQVKPYPQLLTNLKIAEKKDLDKIKGLKELKKDLENKNINTLFRYSGTENLIRLLLEARDIKLLEKEMKNVVEFFKKALNG

SEQ ID NO: 5997 - DNA, 1338 bp, Campylobacter jejuni
  CDS (1)..(1338): transl_table=11
atgagactttttggaactgatggagttcgtggaaaagcgggtgaatttttagatagttttttggctatgcgtttagcaatggctgcgggtatttattttaaagataaaagtattactaataatatcttagtaggaaaagatacaagaagaagtggctatatgatagaaaatgctattgtttcagggcttacttctataggatataatgttatacaaattggtcctatgccaactcctgcgattgcattcttaactgaagatatgcgttgtgacgcagggattatgatttcagcttctcacaatccttattatgataacggtattaaattttttgatgctcatggaaataaactcagtgaagatatagagaaaaaaatagaagaaatttattttgatgataagcttatacaagcctctaaggtagatatggaaaaaattggtcaagcaaaaagaattgatgatgttataggaagatatattgtttctattaaaaattcttttccaaaagatcttactttaaagtctttgcgtgttgttttagatgtggctcatggggcagcttataaggtagcacctactgtttttaaggaattaggcgctgaagttatagtaatgagtgataaacctaatggacttaatatcaatgaaaattgtggagctttgcatcctgtaaacttagctgctgaggtaaagcgtttgcgtgcagatgtgggctttgcttttgatggtgatgcagatcgtttggtggttgtagatgaaaaaggcgaagtggctaatggggatagtttattgggcgtattggcactttatcttaaagaacaaggtaaattacaatcaagtgttgtggctactataatgagtaatggtgctttaaaagagtttttaaataaacatggtatagaacttgatacttgtaatgttggcgataaatatgtgcttgaaaaactaaaagccaatggtggaaattttggtggagaacaaagtgggcatattatttttagcgattatgcaaaaactggagatggtttgatagctgccttgcaatttagtgctttaatgctttctaagaaaaaatctgcaagttctattttgggtcaagttaaaccttatcctcagcttttaatcaatcttaaaattgcagaaaaaaaagatttagataaaattaaaggtttaaaagaattaaaaaaagatttagaaaataaaaatattaataccttatttcgctattctggaacagaaaatttgataagacttttactagaagccagagatattaagctcttagaaaaagaaatgaaaaatgttgtggagttttttaagaaagctttaaatggctaa

SEQ ID NO: 5998 - protein, 445 aa, Campylobacter jejuni
MRLFGTDGVRGKAGEFLDSFLAMRLAMAAGIYFKDKSITNNILVGKDTRRSGYMIENAIVSGLTSIGYNVIQIGPMPTPAIAFLTEDMRCDAGIMISASHNPYYDNGIKFFDAHGNKLSEDIEKKIEEIYFDDKLIQASKVDMEKIGQAKRIDDVIGRYIVSIKNSFPKDLTLKSLRVVLDVAHGAAYKVAPTVFKELGAEVIVMSDKPNGLNINENCGALHPVNLAAEVKRLRADVGFAFDGDADRLVVVDEKGEVANGDSLLGVLALYLKEQGKLQSSVVATIMSNGALKEFLNKHGIELDTCNVGDKYVLEKLKANGGNFGGEQSGHIIFSDYAKTGDGLIAALQFSALMLSKKKSASSILGQVKPYPQLLINLKIAEKKDLDKIKGLKELKKDLENKNINTLFRYSGTENLIRLLLEARDIKLLEKEMKNVVEFFKKALNG

SEQ ID NO: 5999 - DNA, 1332 bp, Carboxydothermus hydrogenoformans
  CDS (1)..(1332): transl_table=11
atgggtaagctttttggtaccgatggggtgcggggtgttgctaaccgcgatttaactcccgaactggcttataaactcggtagagctgcagcctatgtgttaaagaaaaaatataatggacagggaatagtggtagggaaggacacccgcatttccggagacatgttggaaacagccttggctgccggaattctttccgttggccttaatgttttaagagttggggttatgcctaccccggctattgcttatttaacccgggaattaaaagctactgccggggcagtaatttctgcttcgcacaatcccatggaagataacggtattaaattctttagcggttcgggttttaaacttcccgatgaagtggaagaagaaattgaaaagtatgttttaggagaaaaggaaatacccatccggccaattggtgcagaaataggcagggtacgggaaatttccgatgcggtattactttataaatcttttgctaaaaatacggtagaacttccctttagcggccttagggtagtggtggattgtgccaacggagctgcttcatacgttgctcccaaaatttatgaagaacttggggcggaggttattcctattttcaacactcccgatggtaccaatattaatgctaactgcggttcgacccacccggaagctttaatgcgggcggtggtggaggaaggggcccatctgggtcttgcccatgatggtgatgctgaccgggtgctggcggtggatgaaaaggggaatttagttgacggcgatcagattatggtgattattggtaagtacttaaagaaaaagggtttattaaaaaataaccggatagtggtaacggtaatgagcaatttggggttgaaaaaagcttttgcccgggagggtattgaagttttagagacgaaagttggtgataggtacgttttagaagaaatgttaaaaaatggagcgattatcggtggcgaacagtccgggcacattatccttttagaccataataccaccggtgatggaattattaccgctttacagctaatgcaggtaatagtggctgaagggaaaaagctatcggaacttgctcaggaaatgcccaaattcccgcaggtcttaaaaaacgtgcgggttttggataaagaaaagattatggcatcagaggaacttgccaaagccattgcccggggtgaaaaaaagctcggggaaggaaggattttggttcgaccttcgggaaccgagccactaattcgggttatggcggaaggagctgatgcaaaacttaccgaggaggtggtggatgagattatagcggttatcgaaaaattatag

SEQ ID NO: 6000 - protein, 443 aa, Carboxydothermus hydrogenoformans
MGKLFGTDGVRGVANRDLTPELAYKLGRAAAYVLKKKYNGQGIVVGKDTRISGDMLETALAAGILSVGLNVLRVGVMPTPAIAYLTRELKATAGAVISASHNPMEDNGIKFFSGSGFKLPDEVEEEIEKYVLGEKEIPIRPIGAEIGRVREISDAVLLYKSFAKNTVELPFSGLRVVVDCANGAASYVAPKIYEELGAEVIPIFNTPDGTNINANCGSTHPEALMRAVVEEGAHLGLAHDGDADRVLAVDEKGNLVDGDQIMVIIGKYLKKKGLLKNNRIVVTVMSNLGLKKAFAREGIEVLETKVGDRYVLEEMLKNGAIIGGEQSGHIILLDHNTTGDGIITALQLMQVIVAEGKKLSELAQEMPKFPQVLKNVRVLDKEKIMASEELAKAIARGEKKLGEGRILVRPSGTEPLIRVMAEGADAKLTEEVVDEIIAVIEKL

SEQ ID NO: 6001 - DNA, 1347 bp, Caulobacter crescentus
  CDS (1)..(1347): transl_table=11
atgagcaagcgcgcctatttcggcaccgacggcatccggggccaggccaacaagcatccgatgacggctgaggtggccctgcgcgtcggtctggcggccggcaagctgttccgctcgcaggacgaacgccgccatctggtggtgatcggcaaggacacgcgcctgtcgggctacatgatcgagccggccctggtggcgggcctgaccagcgtgggcctggacgttcgcctgttcggcccgctgcccaccccggccgtggccatgatgacccgctcgatgcgcgccgacctcgggatcatgatcagcgccagtcacaacagcttcgccgacaacggcatcaagctgttcgggcccgacggctacaagctgtcggacgcccaggagctgggcatcgaggcgctgatggaccagggcctgcaggaaggcctggccgccccccgcgagctgggccgcgtcaagcggatcgacgacgcccaggcccgctatgtcgagatcgtcaaggcgaccttcccgcgccacctgaacctgtcgggcctgcgcatcgtcatcgattgcgccaatggcgcggcctacaaggtggctcccaccgccctctacgagctgggcgcggaggtgatcacgctgggtgtctcgcccgacggcaccaacatcaacgaggagtgcggctcgacccatcccgaggctatggccaagatggtgcgcgagtaccgcgccgacatcggcatcgccctggacggcgacgccgaccgcctggtgatctgcgatgagaagggcgtggtcgtcgacggcgaccagatcatggcgatcatcgcggcggcctcgcacaaggccgggaccctgaagggcggcggcgtcgtggccacggtcatgtcgaacctgggcctcgagcgccagttgaacactatgggtctctcgctggaacgcaccgctgtgggcgaccgctatgtaatgcagcgcatgcgcgaaggcggcttcaatgtgggcggcgaacagtcgggccacctgatcctgtcggacttctcgaccacgggcgatggcctgatcgcggccctgcaggtgctggccgtcatggtcgagaccgacaagccgatgagcgcgctgggccgtcagttcgagccggtgccgcagctgctggaaaacgtccgcttcgtcggcggcaagccgctggaggcggcggcggtgaaggaagccatcgccgacggcgaggcccagctgaacggcgcgggccgcatcgtcgtgcgcgcctcaggcaccgagccgctgatccgcatcatggccgaaggcgacgacccggccctggtgaagaaggtcgtcaagtcgatcgcctcggcggtgaaggcggcctaa

SEQ ID NO: 6002 - protein, 448 aa, Caulobacter crescentus
MSKRAYFGTDGIRGQANKHPMTAEVALRVGLAAGKLFRSQDERRHLVVIGKDTRLSGYMIEPALVAGLTSVGLDVRLFGPLPTPAVAMMTRSMRADLGIMISASHNSFADNGIKLFGPDGYKLSDAQELGIEALMDQGLQEGLAAPRELGRVKRIDDAQARYVEIVKATFPRHLNLSGLRIVIDCANGAAYKVAPTALYELGAEVITLGVSPDGTNINEECGSTHPEAMAKMVREYRADIGIALDGDADRLVICDEKGVVVDGDQIMAIIAAASHKAGTLKGGGVVATVMSNLGLERQLNTMGLSLERTAVGDRYVMQRMREGGFNVGGEQSGHLILSDFSTTGDGLIAALQVLAVMVETDKPMSALGRQFEPVPQLLENVRFVGGKPLEAAAVKEAIADGEAQLNGAGRIVVRASGTEPLIRIMAEGDDPALVKKVVKSIASAVKAA

SEQ ID NO: 6003 - DNA, 1377 bp, Chlamydophila abortus
  CDS (1)..(1377): transl_table=11
atgactaaggaagtaaagcaactttttggcacggatggggtgcgggggaaagcaaattatgaacctatgaccgtagagctttctgtattattaggaaaagctgttgcaggtgttctacaagaaagtaaatccgggaaacatcgtgttgtcgtaggtaaggatacgcgtttgtcgggatatatgtttgagaatgcccttgttgccggtttgacttctatggggatagaaaccttagtgttgggccccattcctactccaggagtggcgtttattacccgtgcttatcgcgcagatgccggaattatgatttccgcatcgcataatccttattgggataatgggatcaagattttctcatctgaaggatttaaaatcagtgatgtcatagaacggcgtattgagcaaatggtagctcttaaagagtttggaaattttcccgatgattgtgctgtagggaagaataaacgtgtcgttgatgctatggggaggtacatagagttcgctaaagcaactttcccaagaggaagaacactaaagggattgaaaatagttttagattgtgctcacggggcagcctacaaagtcgctccttctgtttttgaagaacttgatgccgaagtgatctgttatggttgtgaacctacggggagcaatatcaacgataactgtggggctcttttcccttcagtgattcaaaaagctgtgattgagcataaggcagatgtcggtattgccttagacggtgacggtgatcgcgttatcatggtggatgagaagggacatattgttgacggagatatgattttaagtatctgcgctaatgatttgaagaaaaaggatcttttacgaggtaatcgtgttattgctaccgtcatgaccaattttggcgtattgaaatatcttgaaagtgtaggaatagaagcactcatttctcccgtcggcgatcgccatgtcttgcagaatatgttggagtatgaggtcaaccttggtggtgagcaaagtggccatatgatctttctagattataatactacaggagatggtattgtttctgctttgcaggttttgcggattatgattgaaagcgaatctacattatccgatttaacttccctgattgtaaaaagccctcaagcactgatcaatgttgcagtgaaagaaaaaatccctctagataccttgcctttagttcaagaagcacttagagatgttagatcgtccttaggcgattctggtcgcgttttgttaagatattctggaactgaaaatatttgtagggttatggttgagggtttaaagaagcatcaagtggactctctcgctaagactatagcggatatcgtggattctgagttgggagtgggcatggtagagtaa

SEQ ID NO: 6004 - protein, 458 aa, Chlamydophila abortus
MTKEVKQLFGTDGVRGKANYEPMTVELSVLLGKAVAGVLQESKSGKHRVVVGKDTRLSGYMFENALVAGLTSMGIETLVLGPIPTPGVAFITRAYRADAGIMISASHNPYWDNGIKIFSSEGFKISDVIERRIEQMVALKEFGNFPDDCAVGKNKRVVDAMGRYIEFAKATFPRGRTLKGLKIVLDCAHGAAYKVAPSVFEELDAEVICYGCEPTGSNINDNCGALFPSVIQKAVIEHKADVGIALDGDGDRVIMVDEKGHIVDGDMILSICANDLKKKDLLRGNRVIATVMTNFGVLKYLESVGIEALISPVGDRHVLQNMLEYEVNLGGEQSGHMIFLDYNTTGDGIVSALQVLRIMIESESTLSDLTSLIVKSPQALINVAVKEKIPLDTLPLVQEALRDVRSSLGDSGRVLLRYSGTENICRVMVEGLKKHQVDSLAKTIADIVDSELGVGMVE

SEQ ID NO: 6005 - DNA, 1377 bp, Chlamydophila caviae
  CDS (1)..(1377): transl_table=11
atgacaagggaagaaaaacaactttttggtacggatgggattcgaggaagagctaattatgagcctatgactgtagagctttctgtattgcttggcaaggctgttgcaggggttttacaggaaagaaaacctgggaaacaccgtgttgttgtaggtaaggacacacgtttgtcaggatatatgtttgagaatgcacttgttgcaggtttaacttctatggggatagaaaccctagtattaggtcccatacctactccaggagttgcttttattacccgagcttatcgtgcagatgcgggaattatgatttctgcatcccataatccttattgggataatgggataaagattttctcttctgaggggtttaaaattagcgatgttatagagcgccgtattgagcaaatggtcgcttgtagagattttggaaatttccctgaagactatgctgtggggaagaataagcgtgtcgtagatgctatgggccgttacatagaatttgccaaagctactttccctaaaggaagaacattaaaggggttgaagatagttttagattgtgctcacggtgctgcttataaagtggccccttctgtatttgaagagttggatgctgaagtgatttgttatggttgtgagcctacaggcagtaatatcaacgataactgtggagctctttttccttcggtaattcagaaagcggtaatagagcacaaggcagatgtgggaattgctttagacggtgatggtgaccgtattatcatggtaaatgaaaaaggtcatattgttgatggtgatatgattttgagtatttgcgctagtgatctaaagaaaaaggctcttttaaacgggaatcgtgttgttgctactgtgatgactaacttcggagtattaaaatatctcgaaagtttaggaatagagacattgatttcttctgtaggagatcgtcatgttcttcagaatatgttagagcatgaggcaaatctcggtggtgagcaaagcggccatatgatctttttagattataacactactggagatggtattgtttctgctttacaagtgcttcgcattatgattgaaagtgaatctacgctttcagacttaacttctctaattgtaaaaagccctcaagcacttatcaacgtatctgttaaggagaaaattcccttagatactttgcctatagttcaagaggctcttagagatgtaagatcgtctttaggtgattctggacgtgttttattaagatattctggaactgaaaatatttgcagagttatggttgagggtttaaagaagcatcaagtcgactccctagctaagactatagctgatattgttgattctgagttgggggccggcattatagagtag

SEQ ID NO: 6006 - protein, 458 aa, Chlamydophila caviae
MTREEKQLFGTDGIRGRANYEPMTVELSVLLGKAVAGVLQERKPGKHRVVVGKDTRLSGYMFENALVAGLTSMGIETLVLGPIPTPGVAFITRAYRADAGIMISASHNPYWDNGIKIFSSEGFKISDVIERRIEQMVACRDFGNFPEDYAVGKNKRVVDAMGRYIEFAKATFPKGRTLKGLKIVLDCAHGAAYKVAPSVFEELDAEVICYGCEPTGSNINDNCGALFPSVIQKAVIEHKADVGIALDGDGDRIIMVNEKGHIVDGDMILSICASDLKKKALLNGNRVVATVMTNFGVLKYLESLGIETLISSVGDRHVLQNMLEHEANLGGEQSGHMIFLDYNTTGDGIVSALQVLRIMIESESTLSDLTSLIVKSPQALINVSVKEKIPLDTLPIVQEALRDVRSSLGDSGRVLLRYSGTENICRVMVEGLKKHQVDSLAKTIADIVDSELGAGIIE

SEQ ID NO: 6007 - DNA, 1380 bp, Chlamydia muridarum
  CDS (1)..(1380): transl_table=11
atgacatgtgatgtaagcccgttatttggaactgatggcataaggggaagagcgaactttgagcctatgacagtagaaacttcagttcttcttggtaaagctgttgcaggggttttattggaaagacattctggtaaacatcgtgtagttgtaggtaaagatacccgtctttctggatatatgtttgaaaatgctcttatagcaggacttacttccatggggatagagactctcatgttaggccccattcctactccgggtgttgcttttattacccgagcctatcgtgcggatgctgggatcatgatttctgcatcccataatccttatcgagataatgggattaagattttctcttccgatggattcaaaattggacaggctgtagaagagcgtatagaggctatgatagcctcaaaatcttttgggggccttcctgaagatcatgcggttggtaaaaataaacgtgttaaagatgctatgggaaggtacatcgaatatgcaaaagccaccttccctaagggacgaactttaaagggattacgcatcgttttagactgtgctcacggggcagcttatagagtagctccttctgtttttgaagaattagatgcagaagtgatttgttatggttgtgagccatctggatgtaatatcaacgaaggatgtggtgctttgtggccttcgattattcagaaagctgttatcgagcatgaagctgatgtagggattgctttggatggggacggtgatcgtttaattatggttgatgaaaaggggcatatagtggatggagatatgcttctgagcatttgcgcaagtgatttaaagagaagacaggctttgcctgagaatcgcgttgtggcaaccgtaatgaccaattttggagtgttgcgttatttagaaagcctgggaatacaagtaacgatctctcctgtaggagatcgacatgtgttacaacatatgttggaaacgaaagctattttaggtggcgaacaaagtgggcatatgatttttctggattacaatacaactggagacggaatcgtttctgctctccaggtattgcgtattatgattgaaagcgagtcaacgctatcagatcttactgcttgtattgtaaaaagccctcaatcactaattaatgttcctgtggctaaaaaagtgccgctagattctttaagtaatgtgcaagtggttctccaagaggtaaaagagattctgggtgattctgggcgtattctgttaagatattctgggacagaaaatatttgtagagttatggtcgaagggacaaagaagcatcaggtagactctcttgctaaaacaattgtggatgttgtagaagcagaaattggaggagcagagatttctgaatag

SEQ ID NO: 6008 - protein, 459 aa, Chlamydia muridarum
MTCDVSPLFGTDGIRGRANFEPMTVETSVLLGKAVAGVLLERHSGKHRVVVGKDTRLSGYMFENALIAGLTSMGIETLMLGPIPTPGVAFITRAYRADAGIMISASHNPYRDNGIKIFSSDGFKIGQAVEERIEAMIASKSFGGLPEDHAVGKNKRVKDAMGRYIEYAKATFPKGRTLKGLRIVLDCAHGAAYRVAPSVFEELDAEVICYGCEPSGCNINEGCGALWPSIIQKAVIEHEADVGIALDGDGDRLIMVDEKGHIVDGDMLLSICASDLKRRQALPENRVVATVMTNFGVLRYLESLGIQVTISPVGDRHVLQHMLETKAILGGEQSGHMIFLDYNTTGDGIVSALQVLRIMIESESTLSDLTACIVKSPQSLINVPVAKKVPLDSLSNVQVVLQEVKEILGDSGRILLRYSGTENICRVMVEGTKKHQVDSLAKTIVDVVEAEIGGAEISE

SEQ ID NO: 6009 - DNA, 1377 bp, Chlamydia pneumoniae
  CDS (1)..(1377): transl_table=11
atgcaacaaagtgtcagaaaactttttggtacagatggtgtgcgaggacgagcaaattttgaacctatgacagtggaaacgactgttttattagggaaagctgtagctagagtacttcgtgagggtagatcgggcaaacatcgtgttgtagtaggcaaagatactaggctatcgggatatatgtttgagaacgcattgattgctgggctcaattctatggggatagaaactttggttcttggtcctatccctacgccaggagttgcgtttattacacgggcctatcgagcggacgcagggattatgatttctgcttcacataatccttacagggataatggaattaagattttctctttagaaggatttaaaatttctgatgttcttgagcagcgtattgaaaccatggtgagtgaagctgactttggtccattacccgaagatcacgcagttgggaagaacaaacgtgtgatagatgctatgggacgctatgtagagtttgtgaaagcaacatttcctaagggacgcactttaaaggggttaaagattgttctagactgcgctcacggagcttcttataaggtagcaccttctgtatttgaagagctggatgcagaggtcatttgttatggttgcgaacctacaggaatcaacatcaatgaacactgcggagctcttttccctcaagtcattcaaaaagctgtaatcgaacatcaagcacatcttgggattgcgctagatggggatggagatcggattatcatggtggatgagaaggggcatattgtcgatggagatatgatcctcagtatatgtgctggtgatcttaaaaaaagatccgcattacctcataaccgtgttgttgccacgattatgacaaatttcggagtcttgaaatatttggaaggattaggcctacaggtattcacctctccagtaggggaccgtcatgttttgcacgccatgttagaacatgaagtgaccttgggaggtgaacagagcggacatatgattttcttggactacaataccactggagatggaattgtctcagcgctacaagttttgcgcattatgatagaaagtgaatctatgctctcagatttgacagccccaattgtaaaaagtccccaaacattgatcaacgttgctgtaagagagaaaattcctcttgaaaccatccctttaattgaaagaaccttgagagatgttcaagatgccttaggcccctctggacgcatattattaagatattctggaaccgaaaatatatgcagagttatggttgaaggtcataaaaaacatcaagtagactgccttgccaaggctcttgcggatgttattgatgcagaattaggtacaggtagtagagagtag

SEQ ID NO: 6010 - protein, 458 aa, Chlamydia pneumoniae
MQQSVRKLFGTDGVRGRANFEPMTVETTVLLGKAVARVLREGRSGKHRVVVGKDTRLSGYMFENALIAGLNSMGIETLVLGPIPTPGVAFITRAYRADAGIMISASHNPYRDNGIKIFSLEGFKISDVLEQRIETMVSEADFGPLPEDHAVGKNKRVIDAMGRYVEFVKATFPKGRTLKGLKIVLDCAHGASYKVAPSVFEELDAEVICYGCEPTGININEHCGALFPQVIQKAVIEHQAHLGIALDGDGDRIIMVDEKGHIVDGDMILSICAGDLKKRSALPHNRVVATIMTNFGVLKYLEGLGLQVFTSPVGDRHVLHAMLEHEVTLGGEQSGHMIFLDYNTTGDGIVSALQVLRIMIESESMLSDLTAPIVKSPQTLINVAVREKIPLETIPLIERTLRDVQDALGPSGRILLRYSGTENICRVMVEGHKKHQVDCLAKALADVIDAELGTGSRE

SEQ ID NO: 6011 - DNA, 1377 bp, Chlamydia trachomatis
  CDS (1)..(1377): transl_table=11
atgacacgtgatgtgagacagctattcggaactgacggagtgcgaggacgggcaaactttgagcctatgacggtggaaacttctgttctccttggtaaggccattgcaggggtgttattagagaaacatgccggtaagcatcgcgtagttgttggtaaagatacccgactctctggatatatgtttgaaaatgctctgatagcaggtcttacttctatggggatagaaaccctgatgttgggacctatccctaccccaggagtggcatttattactcgagcttatcgtgcagatgctgggattatgatttcagcatcgcacaatccttatcgagataatggaattaagattttctcttcggatggattcaaaattggccaggcagtggaagagcgtatcgaagccatggttgcttcgaaagattttgggaaacttcctgatgatcatgctgttggtaaaaataaacgagtcaaagatgcaacaggaagatatattgagtatgcgaaggctaccttcccgaaagggagaacgttaaaaggtttgcgtattgttttagattgtgctcatggagccacttatcgagtagctccttccgtatttgaagaattagacgcagaagtgatctgttatgggtgtgaaccttcgggatgtaatatcaatgcagggtgcggagctttatggccttctaccattcagaaagcagttattgaacacaaagcagatgtaggaattgcattagatggagacggggatcgtctgatcatggttgatgagaaggggcatattgtagatggagatatgctgttaagcatctgtgcaagtgatttaaaacgacgacaggctctatctgataatcgtgtagtggcaacagtgatgaccaattttggtgtattgcgttatttagaaagtctggggatacaagttacaatttctcctgtaggagatcgacatgtattgcagcatatgttggaaaatcaagctgtgcttggaggagaacaaagcgggcatatgatttttctcgattacaatacaacaggggatgggatcgtatctgctcttcaagtgttgcgtattatgatcgaaagtgaatcgacattatccgatcttacagcatgtatcgcaaagagtcctcaagcgctaatcaatgtccctgtgacgaaaaaggtgcctctagagtccttagctaatgtacaaggggtgctcaaagaagtaaaagaggtcttgggggattctggacgtattttgttaagatattctggtacagaaaatatttgcagagttatggtcgaggggactaaaaagcatcaagtggactcccttgctaagacaattgttgatgttgtagaagccgaaattggagccgagatttccgaataa

SEQ ID NO: 6012 - protein, 458 aa, Chlamydia trachomatis
MTRDVRQLFGTDGVRGRANFEPMTVETSVLLGKAIAGVLLEKHAGKHRVVVGKDTRLSGYMFENALIAGLTSMGIETLMLGPIPTPGVAFITRAYRADAGIMISASHNPYRDNGIKIFSSDGFKIGQAVEERIEAMVASKDFGKLPDDHAVGKNKRVKDATGRYIEYAKATFPKGRTLKGLRIVLDCAHGATYRVAPSVFEELDAEVICYGCEPSGCNINAGCGALWPSTIQKAVIEHKADVGIALDGDGDRLIMVDEKGHIVDGDMLLSICASDLKRRQALSDNRVVATVMTNFGVLRYLESLGIQVTISPVGDRHVLQHMLENQAVLGGEQSGHMIFLDYNTTGDGIVSALQVLRIMIESESTLSDLTACIAKSPQALINVPVTKKVPLESLANVQGVLKEVKEVLGDSGRILLRYSGTENICRVMVEGTKKHQVDSLAKTIVDVVEAEIGAEISE

SEQ ID NO: 6013 - DNA, 1338 bp, Chromobacterium violaceum
  CDS (1)..(1338): transl_table=11
atgagtcgcaaatatttcggcaccgatggcgtgcgcggcgaggtcggcaaatttccgatcacgcccgaattcgtgatgaagctgggttacgcggccggccgcgtgctggtcaaccatgaccaggacagccgtcccaccgtgctgatcggcaaggacacccgtatttccggttatatgctggaagcggcgctgcaagctggttttaccgccgccggcgtcaacgtgctgttgaccggcccgttgccgacgcccggcatcgcctacctgacccgcgcgctgcggctggaggccggcgtggtgatctccgcctcgcacaatccattccaggataacggcatcaagttcttcgccgaaggcggcaacaagctggacgacgcgttggagctggagatcgaggcgatgctggaccagcccatggccaccaatccgtcgctggagctgggccgtgcccgccgcatcgacggcgccgccgagcgctacatcgaattctgcaagagcaccttccccaacgagctcagcctgaagggcttgaagttggtggtcgactgcgccaacggcgccacttaccacatcgcccccaaggtgtttcacgagctgggggccgagctggtggagatcggctgcgaacccaacggctacaacatcaacgacaaggtgggcgccacctatcccaagaccttgcagatggcggtgctggagcaccaggccgacttcggcatcgcgctggacggcgacggcgaccgcctgatcatggtggacgccgccggccgcgtctacgatggcgaccagctgatctacgtgatcgccaaggcgcgcgccgcgcgcggcgaattgaagggcggcgtggtcggcaccgtgatgaccaatatggcgatggagctggcgctgcaaaagcagggcgtgccctttggccgcgccaaggtaggcgaccgctacgtgctggaaatgctgcatgcggacggctggcaggtgggcggcgaggcgtccggccatattctttgcctggacaagcacagcaccggcgacggcatcatttccagcctgcaggtgctggccagcctgaagcagctgggcttgagcctggccgagatctgcgccgactggcggccattcccgcagacgctgatcaatgtgcgccacaacggctgcgactggaaggccgcctcggcggcgccgctggccgaggccgaggccgcgctgcagggccgcggccgcgtggtgttgcgcccatccggcaccgagccggtggtgcgggtgatggtggaggccgacgacaaggccctggccgacacctgggcgaaagccattgccgcggcgatcgagaaagtctctgcctga

SEQ ID NO: 6014 - protein, 445 aa, Chromobacterium violaceum
MSRKYFGTDGVRGEVGKFPITPEFVMKLGYAAGRVLVNHDQDSRPTVLIGKDTRISGYMLEAALQAGFTAAGVNVLLTGPLPTPGIAYLTRALRLEAGVVISASHNPFQDNGIKFFAEGGNKLDDALELEIEAMLDQPMATNPSLELGRARRIDGAAERYIEFCKSTFPNELSLKGLKLVVDCANGATYHIAPKVFHELGAELVEIGCEPNGYNINDKVGATYPKTLQMAVLEHQADFGIALDGDGDRLIMVDAAGRVYDGDQLIYVIAKARAARGELKGGVVGTVMTNMAMELALQKQGVPFGRAKVGDRYVLEMLHADGWQVGGEASGHILCLDKHSTGDGIISSLQVLASLKQLGLSLAEICADWRPFPQTLINVRHNGCDWKAASAAPLAEAEAALQGRGRVVLRPSGTEPVVRVMVEADDKALADTWAKAIAAAIEKVSA

SEQ ID NO: 6015 - DNA, 1350 bp, Clavibacter michiganensis subsp
  CDS (1)..(1350): transl_table=11
atgccccggctcttcggcacggacggcgtccgcggactcgccaacggcgagaccatcaccgcggacctcgccctgcgcctggcccaggccgccgcgcatgtgctcggccaggacgcccgggatgccggacgacgacctgtcgcggtcgtcgcccgggatccccgggtgtccggcgagttcatcgcggcggccgtggccgccggcctcgcgagctccggcgtcgacgtgttcgacgccggggtcatcccgacgccggccacggcgtacctcatcgcggacttcgacgccgacttcggcgtgatgatctccgcatcgcacaaccccgctcccgacaacgggatcaagttcttcgccgcgggcggacggaagctcgccgacgagctcgaggaccgcatcgaggcgcagctgagccagcccgtcctgctccccacgggagctgacgtcggccgcatccgccgcttcgccgacgccgaggaccgctacgtcctccacctgctcggcacgctgcagcaccggctcgacgggatccacgtggtcctcgactgcgcgcacggcgccgcggcgggcatcagccccgaggtctccaccgacgccggcgcgcgcgtgaccgtcatcggcaacgaccccgacggcatgaacatcaacgaccgggtgggatccacgcacctcgacctcctggccgaggccgtcctcgggcacggcgccgacgtgggcatcgcctacgacggcgacgccgaccgctgcctcgccgtcgaccacaccggcgcgatcatcgacggcgaccagatcatggcggtcctcgcgctctccatggcccgccgcggcctgctggtggagcgcaccctggtcgcgacggtcatgagcaacctcggcctccgcatcgcgatggccgagaacgacatcacggtgctgcagacccgggtcggcgaccgttacgtgctcgaggccatgaacgagggcggctactccctcggcggcgagcagtccggccacctcgtcatcgcggagcacgccaccacgggcgacgggatcctcaccgggatccagctgctcggcgagatggcggcgacgggcaggagcctgcacgagctcgcctcggtgatgaccgtctacccgcaggtgatgatcaacgtgcgcggcgtcgaccgcgagcgcgtgtccgacgacgccgagctgaacgcggccgtcgcgcgcgcggaggccgagctgggcgacaccgggcggatcctcatgcgcgcctcgggcaccgagcccatgatccgcgtgatggtggaggccgccgaccaggcgaccgccgagcggcacgcgcaggagctggcggcgctcgtcaccgagcgcctcgcgatctag

SEQ ID NO: 6016 - protein, 449 aa, Clavibacter michiganensis subsp
MPRLFGTDGVRGLANGETITADLALRLAQAAAHVLGQDARDAGRRPVAVVARDPRVSGEFIAAAVAAGLASSGVDVFDAGVIPTPATAYLIADFDADFGVMISASHNPAPDNGIKFFAAGGRKLADELEDRIEAQLSQPVLLPTGADVGRIRRFADAEDRYVLHLLGTLQHRLDGIHVVLDCAHGAAAGISPEVSTDAGARVTVIGNDPDGMNINDRVGSTHLDLLAEAVLGHGADVGIAYDGDADRCLAVDHTGAIIDGDQIMAVLALSMARRGLLVERTLVATVMSNLGLRIAMAENDITVLQTRVGDRYVLEAMNEGGYSLGGEQSGHLVIAEHATTGDGILTGIQLLGEMAATGRSLHELASVMTVYPQVMINVRGVDRERVSDDAELNAAVARAEAELGDTGRILMRASGTEPMIRVMVEAADQATAERHAQELAALVTERLAI

SEQ ID NO: 6017 - DNA, 1347 bp, Clostridium acetobutylicum
  CDS (1)..(1347): transl_table=11
atgggtagaatgtttggaactgatggagtaagaggaatagccaataaagaacttacagcagagcttgcatatagacttggaagagcaggagcgtatgttttaacaaatgaaactcataaacctaaaatattggttggtatggatactagaatttcaggcgatatgcttgaagctgcgcttgtttcaggtatactttctgttggagctgaagctgtatgtgttggtatagtgcctactcctgcggttgcttatttgactagaaaatacaaagcagatgctggtgtagtaatatctgcatcccataatccggtagaatacaatggaataaagttttttgatgcaaaaggttacaagctatcagataatcttgaggacgaaattcagaaaattatagaaagtgactttgagggagtaccgcttcctactggtgaaagtgttggaagaaaggttgtagaggaatctgcagaagaagattatattaagtttgccaaaagcactataggaacagatttaaagggaatgaaaatagctcttgactgtgcaaatggagctgcgtataaaactgcggtaaaaacctttagagaacttggtgcccaggtaactgttataaacaatgatccagatggaataaatataaactgtaactgtggttctacacatcctgaggaattgatggattatgttgttaagaaaaattgtgatttaggtcttgcttttgatggtgatgctgatagatgtcttgctgttgatgaaaagggaaacctgatagatggtgactttataatggctatctgtggtaagtacttaaaggataaaggtgaattacataaggatgtagttgttgttactgttatgagtaatatgggattatttttagcattagataaagcaaatattaaaacagtaaaaactaaggttggagacagatacgttcttgaagagatgttaaaagaaggatacaagcttggtggagaacaatctggtcatataatattcttagactataatacaacaggagacggacttgtaacggctcttaagatatgttcaatagtaaaagagagtagaaaaacactgtcaaagcttgcatctataatgcataagcttccacaggtacttgcaaatgcaaaggtgcctaataataaaaaggatatataccttgaagataaggagatatctgatgaaattaagaagattgaggaagaactgcatggtaaaggtagagtattaataaggccttctggtactgagcctttagttagagttatgcttgagggagaagatcaagatagacttaatactttagctcatggtttagcagagttaattgaaaagaaagcaaactag

SEQ ID NO: 6018 - protein, 448 aa, Clostridium acetobutylicum
MGRMFGTDGVRGIANKELTAELAYRLGRAGAYVLTNETHKPKILVGMDTRISGDMLEAALVSGILSVGAEAVCVGIVPTPAVAYLTRKYKADAGVVISASHNPVEYNGIKFFDAKGYKLSDNLEDEIQKIIESDFEGVPLPTGESVGRKVVEESAEEDYIKFAKSTIGTDLKGMKIALDCANGAAYKTAVKTFRELGAQVTVINNDPDGININCNCGSTHPEELMDYVVKKNCDLGLAFDGDADRCLAVDEKGNLIDGDFIMAICGKYLKDKGELHKDVVVVTVMSNMGLFLALDKANIKTVKTKVGDRYVLEEMLKEGYKLGGEQSGHIIFLDYNTTGDGLVTALKICSIVKESRKTLSKLASIMHKLPQVLANAKVPNNKKDIYLEDKEISDEIKKIEEELHGKGRVLIRPSGTEPLVRVMLEGEDQDRLNTLAHGLAELIEKKAN

SEQ ID NO: 6019 - DNA, 1347 bp, Clostridium perfringens
  CDS (1)..(1347): transl_table=11
ttgtcaagattatttggaacagatggagttagaggaatagcaaatactgaattaacagcagaattagcatataacttaggtagagctggagcttatgttttaacagagggaactcataaacctaagatattagtagcaaaagatactagaatatcaggagatatgctagaggctgctttagttgcaggtatattatcagttggagcagaggcagtatgcttaggagtagttccaacaccagcggtagctcacttaacaagagtatatggagcagatgctggagttatgatatcagcttcacacaatccagttgaatataatggaataaaattctttgatgataagggatataaattatcagatgatttagaagatgaaatacaaagagttatagaaagtggttttgaaaatgtaccttcaccaacaggagctaatttaggaagagaaataatagaaaaagctgctttagaagattatataagctttgctaaagatacaataggaatatctttagaaggattaagagtagctttagattgtgcaaatggtgcatctcacgaagctgctgttagagctttcagagaattaggagcagaaatatttgtaataaatgataatccagatggaactaatataaatgaaaattgtggatcaactcatccagaagaattaatggaatatgttgttaagaaaaaatgtcatatgggatttgcttttgatggagatgcagatagatgcttagctgttgatgagcaaggaaacttagttgatggagatttcatcttaacaatatgtgctaaatacttaaaagaattaggtagattaaaagatgatactctagttgtaactgtaatgagtaacttaggactaatgatagcttgtaagaatgaaaaaataaatactgcagttacaaaagttggggatagatatgtattagaagaaatgttagctaaaggatattctttaggtggagaacaatccggtcatatcatattcttagatcataactcaactggagatggacttgttactgcacttcaagtagctagcatagttaagagaactggaaaatctttatttgaattaaaaaatgtaatgaaggtattaccacaagttttagttaacgcaaaagtacctaataacatgaaaaatattcatgaagaagatgaagaaataatagctgaaattaagaaaatggaagctgctttagatggttgcggaagagtattaataagaccatcaggtacagaaccattagtaagagttatgcttgaaggtgaaaatcaagctgaaatagatgaaatggctcataacttagcaaaaatgatagaagcaaaatgtaattaa

SEQ ID NO: 6020 - protein, 448 aa, Clostridium perfringens
MSRLFGTDGVRGIANTELTAELAYNLGRAGAYVLTEGTHKPKILVAKDTRISGDMLEAALVAGILSVGAEAVCLGVVPTPAVAHLTRVYGADAGVMISASHNPVEYNGIKFFDDKGYKLSDDLEDEIQRVIESGFENVPSPTGANLGREIIEKAALEDYISFAKDTIGISLEGLRVALDCANGASHEAAVRAFRELGAEIFVINDNPDGTNINENCGSTHPEELMEYVVKKKCHMGFAFDGDADRCLAVDEQGNLVDGDFILTICAKYLKELGRLKDDTLVVTVMSNLGLMIACKNEKINTAVTKVGDRYVLEEMLAKGYSLGGEQSGHIIFLDHNSTGDGLVTALQVASIVKRTGKSLFELKNVMKVLPQVLVNAKVPNNMKNIHEEDEEIIAEIKKMEAALDGCGRVLIRPSGTEPLVRVMLEGENQAEIDEMAHNLAKMIEAKCN

SEQ ID NO: 6021 - DNA, 1347 bp, Clostridium tetani
  CDS (1)..(1347): transl_table=11
atgagtagaatgtttgggactgatggtgttagaggcattgctaatgaagaattaacagcagaagttgcctataatttaggtaaggcaggtgcctatgttctaacagaaggaacccataaacctaaaatagttgtggggatggatactagaatatctggacatatgcttgaaagtgctttagtagcgggaatactttcaatgggtggagaagctatttgtttaggaattgttccaactccagcggtagcacatttaactagaaagtatggagcagatgcaggagtagtaatatcagcttcacataatccagttgaatataatggaataaagttttttgataaaggtggatataaattaccagatgagctagaagatagaattcaaagtgtaatagagaataattttgaaggtgttccttgccctacaggcgaagatataggagaaaagacaataatagatgatgcaataaaggattacatagaatttgccaaaggaactataaaaggagatctaaaaggattaagagttgctttagactgtgcaaatggggcaagctataaggcatcagtagagacttttaaagatttaggtgcagaagtttatgtaattaataatgaacctaatgggaagaatataaataaagattgtggctctacacatatggaatctttaagaaaatatgtagttgaaaagggctgtgattttggattagcctttgatggagatgctgatagatgcctagcagtagatgaaaaagggaatattgttaatggagatttcatgatggcaatatgtgctaaatatatgaaagaccacaaaaaattagataagaataccatggtagttactgtaatgagtaatatcggattgtttattgctatggaaagagaaaaaatagatttaattaaaacaaaagttggagatagatatgtactagaagaaatgcttaaagagggatataaaataggtggagaacaatccggacatattatatttttagattataacactacaggagatggattggtaactgcattgcaactttcttctattataaaggatagcaataaaaaattatcagaattagcctctattatgaaagagttacctcaagtgcttttaaatgctaaggtgaccaataatatgaagaatatatatatagaagatgaagaaatagcaggagaaataaaaaaaatagaagaacaaatggaaggtaagggtagagtacttataagaccttcaggaacagaacctttagtaagagttatgctagaaggtgaaaatcaagaagaaatagataaaatagctcatgatttagtaaaattaattgaaaagaaaacaaaataa

SEQ ID NO: 6022 - protein, 448 aa, Clostridium tetani
MSRMFGTDGVRGIANEELTAEVAYNLGKAGAYVLTEGTHKPKIVVGMDTRISGHMLESALVAGILSMGGEAICLGIVPTPAVAHLTRKYGADAGVVISASHNPVEYNGIKFFDKGGYKLPDELEDRIQSVIENNFEGVPCPTGEDIGEKTIIDDAIKDYIEFAKGTIKGDLKGLRVALDCANGASYKASVETFKDLGAEVYVINNEPNGKNINKDCGSTHMESLRKYVVEKGCDFGLAFDGDADRCLAVDEKGNIVNGDFMMAICAKYMKDHKKLDKNTMVVTVMSNIGLFIAMEREKIDLIKTKVGDRYVLEEMLKEGYKIGGEQSGHIIFLDYNTTGDGLVTALQLSSIIKDSNKKLSELASIMKELPQVLLNAKVTNNMKNIYIEDEEIAGEIKKIEEQMEGKGRVLIRPSGTEPLVRVMLEGENQEEIDKIAHDLVKLIEKKTK

SEQ ID NO: 6023 - DNA, 1350 bp, Clostridium thermocellum
  CDS (1)..(1350): transl_table=11
ttgggacgtctgtttggtactgatggagtaagaggagtggcaaatctggaattaaccgccgagcttgcatataaattggggcaggcaggagcgtatgtgttgacttctgagacaaagcacacacctaaaattttggtgggcatggatacaagaatatcgggagatatgctggaggcttcccttgttgcaggattatgttcggtgggagcggaagtggcttgtctgggaatagctcctactccgacggttgcttatcttaccaggtactataatgcagatgccggtgtggtaatttctgcttcccacaatccttacgagtttaacggaataaaattcttcaacagcaaaggatataaactttccgatgccctggaagaaagaatagaatccataattcttgacaattcggagaaaattcaacttcccacaggtgagaaaataggaaggaaaattgaaattgagtcaccgttggacgactatgtaaattttattaaaagcactatcaagggagatttaaaagggcttaaagttgcaattgactgtgcaaacggagcatcataccaggtggcacccgttactttctttgaacttggtgcggatgtctgtgttattaacaacgagcctgacggtgtaaatattaacaaagactgcggctccactcatattgagcagttgcagaaatttgtaattgaaagcggagctgatgtcgggcttgcttttgacggggatgctgacagggttcttgcggttgacgagaacggcaacatggttgacggtgaccaaatcatggccataatcggccttgagctaaaaaaacagggaaagcttacaaacaataccattgtagctactgttatgagcaatcttggacttgatataatggcgaaaagagaaggaattaacatagttaaaacaaaagtgggagacagatatgtactggaaaacatgcttgaaaacgggcatgttttgggaggcgagcagtcgggacatattatttttcttgaacatagtactacaggagacggcattcttacgggagcacagcttcttaatgttgtgaaatcttccggtaaaaagctttccgaactggcctcaataatgcaggtgcttcctcaggtattaatgaatgcccgggtaagcaatcaaaataaggaaaaatatcttgaagatgaagtaatatgcgaaatgtgcaaagagcttgagaatgagttccgggatgaaggaagggtgcttatcaggccttcaggaacggaacctcttgtcagggttatgatagagggtaaggacagggattatatagaaaaaagagctcttgagcttgtaaaagttattgaagagagacttggttag

SEQ ID NO: 6024 - protein, 449 aa, Clostridium thermocellum
MGRLFGTDGVRGVANLELTAELAYKLGQAGAYVLTSETKHTPKILVGMDTRISGDMLEASLVAGLCSVGAEVACLGIAPTPTVAYLTRYYNADAGVVISASHNPYEFNGIKFFNSKGYKLSDALEERIESIILDNSEKIQLPTGEKIGRKIEIESPLDDYVNFIKSTIKGDLKGLKVAIDCANGASYQVAPVTFFELGADVCVINNEPDGVNINKDCGSTHIEQLQKFVIESGADVGLAFDGDADRVLAVDENGNMVDGDQIMAIIGLELKKQGKLTNNTIVATVMSNLGLDIMAKREGINIVKTKVGDRYVLENMLENGHVLGGEQSGHIIFLEHSTTGDGILTGAQLLNVVKSSGKKLSELASIMQVLPQVLMNARVSNQNKEKYLEDEVICEMCKELENEFRDEGRVLIRPSGTEPLVRVMIEGKDRDYIEKRALELVKVIEERLG

SEQ ID NO: 6025 - DNA, 1338 bp, Colwellia psychrerythraea
  CDS (1)..(1338): transl_table=11
atgtcagatcgtaaatattttggtaccgatggtatccgtggtttagtgggtcaatatcctataacaccagaattcgtgatgaaactaggttatgccgcgggtaaagtactcgctggtcaaggcactaaaaaagtgcttattggtaaagatacgcgtatctctggttacatgcttgaatccgcacttgaagctggattttcagcggcaggtatcgatgtaggccttcttggacctatgccaacgccaggtattgcttaccttactaaaacattcagagccgaagccggcattgttattagtgcgtcgcataatcctttctacgataatggcatcaaatttttctctaatacaggggaaaaactccctgatgcggtggagttagctattgaagctgaattagataatccaatgggttgtgttgaatcagcaaaactcggtaaagcgagtcgtgttaatgatgcagcggggcgctatatcgaattttgtaaaagtaatttccctagcaaaatttcattaaaagatttaactattgtggttgattgtgcccatggtgcaacctaccacatagcgccgaatgtatttcgtgaattaggcgcaacggttattgaaatcggcactgcgcctaacggaaccaatataaatcaagggtgtggtgcaacatctatggcagcaatcagcaaagctgttgttgaacataaggctgatttaggtatcgcccttgatggtgatggcgatcgtattatgatggttgaccacactggttatgttattgatggtgatgaaattatttatatcatcgcctgtaatgatttaaaaacgggtcgaaaagagggtggcgttgttggtaccctgatgagcaatatgggtttagagttagctttaaaagagttagatatcgaatttgctcgcagtaatgttggtgaccgccatgtaatggagttattaagagaaaaaggttggcagctaggcgccgaaaactcaggtcatgtcattaatcttaatcatacatctacgggtgatggtattattgctgcgcttaacgtacttactgcggtaactaaacaagaaaaatcgttatttgagttacgccaaggcctaacaatgcttccgcaattactggtcaatgttcgtttttcgggacaaaataatcctttaaatgatgctgatgtattagctgctgttgatgaagttaatgaaacactaacgggtcgcggtagagtgttacttcgtaaatcaggtactgaaccacttattcgtgtaatggttgaaggtccagatatggatgaagtgactttattagctaacaaaattgctgatttagtgaaacttgttaagtaa

SEQ ID NO: 6026 - protein, 445 aa, Colwellia psychrerythraea
MSDRKYFGTDGIRGLVGQYPITPEFVMKLGYAAGKVLAGQGTKKVLIGKDTRISGYMLESALEAGFSAAGIDVGLLGPMPTPGIAYLTKTFRAEAGIVISASHNPFYDNGIKFFSNTGEKLPDAVELAIEAELDNPMGCVESAKLGKASRVNDAAGRYIEFCKSNFPSKISLKDLTIVVDCAHGATYHIAPNVFRELGATVIEIGTAPNGTNINQGCGATSMAAISKAVVEHKADLGIALDGDGDRIMMVDHTGYVIDGDEIIYIIACNDLKTGRKEGGVVGTLMSNMGLELALKELDIEFARSNVGDRHVMELLREKGWQLGAENSGHVINLNHTSTGDGIIAALNVLTAVTKQEKSLFELRQGLTMLPQLLVNVRFSGQNNPLNDADVLAAVDEVNETLTGRGRVLLRKSGTEPLIRVMVEGPDMDEVTLLANKIADLVKLVK

SEQ ID NO: 6027 - DNA, 1344 bp, Corynebacterium diphtheriae
  CDS (1)..(1344): transl_table=11
atgactcgactttttggtactgatggtgttcgtggtttggccaaccggaaattgacggcgttgctcgcactgaagctaggcgcggcagcagcggaagtgttgaccaaagataacaggagcacgagtcgtcgtccggtggcagtagtgggccgtgacccccgcgtatccggcgaaatgctggccgccgcgctgtctgcaggcatggccagccgtggcgtggacgttttgcgtgttggcgtgctgcccacgcctgcagtggcttatctgacggacttctacggtgctgatatgggtgtggtgatttctgcgagccacaaccctatgccagataacggaatcaagttcttttctaaaggcggtcacaagttacccgattcggtcgaggacgagatcgaaaaggttatggaaaccatcccagatggcggtccgaccggacacggtattggtcgtgtgattgaagaggctgtcgatgcccaagaaacgtacctcaagcatctcaaaggtgcggtaccgcgcagcctcgagggcattacagtagtggtggactgcgctaatggtgcagctagtgaggttgccccactagcttatgctgccgcgggcgccaaggttattccaatccacaatcaccccaatgcgtacaacatcaacgattcttgcggctcaacgcatatcgaccaggtacaagccgccgtgctcgagcacggtgctgatctgggacttgctcatgatggcgacgcggatcgctgcctggcggtagatgctgaaggcaacgtggttgatggcgaccaaatcatggcgatcctagctcttgctatgaaagaaaacggtgagctgcacaagtctacgctggtagctactgtgatgagcaaccttgggctgcggttggctatgaaagaagccggtattgaattgcgcactacaaaagtgggtgaccgctatgttcttgaagaactcaacgctggtggctttagcctcggtggtgagcaatccggccacatcgtgctgccagaccacggtacgaccggtgatggcacattgacagggctgtccctcatgtcgcgtatggcagaaactggtttgtcgttgaaggtattggcctctgcgatgactgtgctgccacaggtgctgatcaacgttccagtttcagataagaccattatccaaacgcaccctgatgtcgttgcagcgatggaacgcgctagtgacgagctgggcgaggatggtcgcgtactgctgcgcccatccggtacagaagaactgttccgcgtgatggttgaggccccaagtaaggagacggctcgtcggatagccgcagatctggcttcggtggtggccaagatttaa

SEQ ID NO: 6028 - protein, 447 aa, Corynebacterium diphtheriae
MTRLFGTDGVRGLANRKLTALLALKLGAAAAEVLTKDNRSTSRRPVAVVGRDPRVSGEMLAAALSAGMASRGVDVLRVGVLPTPAVAYLTDFYGADMGVVISASHNPMPDNGIKFFSKGGHKLPDSVEDEIEKVMETIPDGGPTGHGIGRVIEEAVDAQETYLKHLKGAVPRSLEGITVVVDCANGAASEVAPLAYAAAGAKVIPIHNHPNAYNINDSCGSTHIDQVQAAVLEHGADLGLAHDGDADRCLAVDAEGNVVDGDQIMAILALAMKENGELHKSTLVATVMSNLGLRLAMKEAGIELRTTKVGDRYVLEELNAGGFSLGGEQSGHIVLPDHGTTGDGTLTGLSLMSRMAETGLSLKVLASAMTVLPQVLINVPVSDKTIIQTHPDVVAAMERASDELGEDGRVLLRPSGTEELFRVMVEAPSKETARRIAADLASVVAKI

SEQ ID NO: 6029 - DNA, 1389 bp, Corynebacterium efficiens; identical to SEQ ID NO: 5817
  CDS (46)..(1389): transl_table=11

SEQ ID NO: 6030 - protein, 447 aa, Corynebacterium efficiens
MTRLFGTDGVRGLANKTLTAPLALKLGAAAAHVLTAGTRPHGRRPVAIVGRDPRVSGEMLAAALAAGMASRGVDVLRVGVIPTPGVAFLTDDYGADMGVMISASHNPMPDNGIKFFSAGGHKLPDEVEDEIERVMDDLPEEGPTGHGIGRVIEEAPDARGRYLQHLADAVPTDLSGITVVVDAANGAASVIAPQAYEAAGAKVIAIHNTPNAYNINEKCGSTHMDQIQAAVLEHGADLGLAHDGDADRCLAVDSDGNIVDGDQIMAILAIAMKENSELRKNTLVATVMSNLGLKLAMEKADIQLRTTKVGDRYVLEELNAGGFALGGEQSGHIVLPDHGTTGDGTLTGLSLMARMAATGKPLSELAAAMTVLPQVLINVPVADKSSIMKSANVQAAVAAAEEELGGTGRVLLRPSGTEELFRVMVEAAEQEQARRVAGRLAAVVAEA

SEQ ID NO: 6031 - DNA, 1344 bp, Corynebacterium glutamicum
  CDS (1)..(1344): transl_table=11
atgactcgactatttggaactgatggcgtccgcggactagccaatgaagtactcaccgcacctttggccttgaagctgggggccgctgcagctcacgtacttaccgcagagaaacgggtagatggacgtcgcccggttgcgatcgttggtagggatcctcgagtctctggagagatgctcgcggcagcactttcagcaggcatggccagccagggtgttgatgtcattcgtgttggtgtcatcccaacccctgctgttgcattcctcaccgatgattatggcgctgacatgggcgtgatgatttctgcatcccacaacccaatgccggacaacggaatcaagttcttctctgcaggtggacacaagcttccagaccatgtggaagacgagattgagcgtgttatggacagcttgccagcagaaggcccaacagggcatggagttggccgtgtcatcgaagaagcaaccgatgcacaggaccgttacctagagcacctgaaggaagctgttcctacgtcacttgaaggcatcaagattgttgtggatgcagccaatggtgcggcaagtgttgtagctccaacggcttatgaggctgcgggtgcaactgtaattgctattcataacaagccagactcatacaacatcaacatggactgcggttccacccacattgatcaggtgcaggcggcagtcctgaagcacggtgctgaccttggactcgcgcatgacggtgatgctgaccgttgtttggctgtggacaaggatggcaaccttgttgatggtgaccaaatcatggcgctgttagccattgcgatgaaagaaaacggcgagctgcgcaagaacaccctcgtgggcactgtcatgagcaacctgggattgaagattgctatggatgaagccggaattacactgcgtaccaccaaggtaggagaccgctacgtgctggaagacctcaatgcaggtggattcagcctgggcggcgagcaatctggccacattgttcttccagatcatggcaccactggcgatggaactttgactggtctttccatcatggcgcgcatggctgaaaccggaaagtccttgggcgagttggcacaagctatgacggtgctgccacaggttctgatcaatgtgccagtttcggataagtccaccatcgtgagccacccaagcgttgtggctgcgatcgcggaagcagaagctgagttgggcgccaccggtcgcgttcttcttcgtgcttctggcaccgaagagcttttccgcgtgatggttgaggctggagacaaggaacaagctcgtcgtatcgcgggacgtcttgctgcagtggttgcagaagtctaa

SEQ ID NO: 6032 - protein, 447 aa, Corynebacterium glutamicum
MTRLFGTDGVRGLANEVLTAPLALKLGAAAAHVLTAEKRVDGRRPVAIVGRDPRVSGEMLAAALSAGMASQGVDVIRVGVIPTPAVAFLTDDYGADMGVMISASHNPMPDNGIKFFSAGGHKLPDHVEDEIERVMDSLPAEGPTGHGVGRVIEEATDAQDRYLEHLKEAVPTSLEGIKIVVDAANGAASVVAPTAYEAAGATVIAIHNKPDSYNINMDCGSTHIDQVQAAVLKHGADLGLAHDGDADRCLAVDKDGNLVDGDQIMALLAIAMKENGELRKNTLVGTVMSNLGLKIAMDEAGITLRTTKVGDRYVLEDLNAGGFSLGGEQSGHIVLPDHGTTGDGTLTGLSIMARMAETGKSLGELAQAMTVLPQVLINVPVSDKSTIVSHPSVVAAIAEAEAELGATGRVLLRASGTEELFRVMVEAGDKEQARRIAGRLAAVVAEV

SEQ ID NO: 6033 - DNA, 1353 bp, Dechloromonas aromatica
  CDS (1)..(1353): transl_table=11
gtgactagaaaatattttggtacggatggcgttcgggggcgtgtaggtcaatcgccgatcacgccggattttgtaatgcgtctggggtattcggctgggaaggccttgcttggccgaagcgagatgccggcgggggatcgcccggctgtgctgattggcaaggacacccgtctctccgggtacatgcttgagtcggcccttgaggcgggtttttccgctgctggcgttgaagtttgtctggttggccctttgccaaccccggccgtcgcctatttgacccgtgccctgcgtttgcaggccggcattgtaatttcggcgtcgcataatccctattacgacaacggcattaaatttttctcggcgcagggtacaaagttaccggatgaggttgagcgcgcgattgaagcgggtattgatcagccgatggtttgtgcacctccagcggatttggggcgggttcggcggattgaggacgcgcgtggcaggtacattgagttctgcaagagcacctttcccaatgatctggatctgcgtggcctgaaaatcgtcatcgattgtgcccatggtgctgcttatcacatcgcaccgagcgtcttccacgagttgggggctgacgtcgtaagcattggtgtgcagccaaacggattgaacatcaatgatgcggtcggggctaccgcgccgaaagcgttatgcgaggcggttctcgccaatcgtgctgatcttggtattgccctggatggcgatgctgatcgcctgcagatggtagatgccgaaggtaatctctacgatggcgatcaactgctgtatgccattgttcgtagccgagcccgtagtgctcccgtgaaaggggttgcaggtacgctgatgagcaatcttgcgctggagcatgcgctcgccaaactgaatatcccgtttgcccgggcggcagttggtgaccgctatgtcgtagaaatgctcagcgaaaaaggctggctctttgggggggagaactcagggcatattctcgctttggatcgtcacacgaccggagatggcatcgtcgcggcgctacaggtgttggctgctttgcgtgagttgggtggaagtttgaaggagttgttggggggcttggttctctacccgcagaagctgatcaatgtgccggtgatgcgtgggttcccctggaaggagcatccggcgattacttcggctcttgctgatactgaggtcagtcttcaagggcggggcagggtgctgttgcgcgcctcgggaacggagcctttgctgagagtcatggtggagggtgaagatgcggtcgaggtgacctatgcggccgagaaactcgctgctgtggttcgcgaatcggcacaatga

SEQ ID NO: 6034 - protein, 450 aa, Dechloromonas aromatica
MTRKYFGTDGVRGRVGQSPITPDFVMRLGYSAGKALLGRSEMPAGDRPAVLIGKDTRLSGYMLESALEAGFSAAGVEVCLVGPLPTPAVAYLTRALRLQAGIVISASHNPYYDNGIKFFSAQGTKLPDEVERAIEAGIDQPMVCAPPADLGRVRRIEDARGRYIEFCKSTFPNDLDLRGLKIVIDCAHGAAYHIAPSVFHELGADVVSIGVQPNGLNINDAVGATAPKALCEAVLANRADLGIALDGDADRLQMVDAEGNLYDGDQLLYAIVRSRARSAPVKGVAGTLMSNLALEHALAKLNIPFARAAVGDRYVVEMLSEKGWLFGGENSGHILALDRHTTGDGIVAALQVLAALRELGGSLKELLGGLVLYPQKLINVPVMRGFPWKEHPAITSALADTEVSLQGRGRVLLRASGTEPLLRVMVEGEDAVEVTYAAEKLAAVVRESAQ

SEQ ID NO: 6035 - DNA, 1335 bp, Deinococcus radiodurans
  CDS (1)..(1335): transl_table=11
atgacagaacgcaagtatttcgggacggacggcgtgcgggccgtcgccggtgaatttccactgacccccgcctgggtgatggccctcggcgcggcggcgggcgaggtcttcaagcgccgcaacccgcgcgccagcgtggtcatcggcaaggacacccgccagagcggcgacatgctcgaagccgcgctcgcggcgggcctgaccagccggggcgtgaatgtcgtgcacctcggcgtgctgcccacccccggcgtcagttacctcacccggcacctcggcgccgaggcgggcgtggtcatcagcgcctcgcacaacccttacgaggacaacggcatcaagttttttggccccggcggcggcaagctcagcgacgccaccgaactcgaaatcgaagcggccattgacgaggcggccaccctcgccccggtgaccggcgtgaatctcggcagcgtgaccaactatacggaggccgagcggctctacacggcgttcctgagttcgcacgcgcccgacctctcggggatgcggattgcgctcgactgtgccaacggtgcggcgtaccgggtggcccccaaggtgtttcagcaggcgggtgccgacgtgttcgccgtctacaccacccccgacgggcgcaacatcaaccggggctgcggctccacccacatggaccacctgcgcctgatcgtgcgtgagggcgactatgacctcggcatcgccttcgacggagacgccgaccgcgccctgttcgtggactcgcgcggcaacatgattcacggcgaccacatgctgctgctcagcgcccgcgcgcgcggcgagaaagccgtggtggcgaccatcatgaccaacatggcgctcgaagtgaagctgcaagaagcgggcctgacgctggagcgcaccgctgtgggtgaccgttacgtgcacgagcgcctgcacgccaagggcctgaacctcggcggcgagcagagcggtcacgtcctctttctcgacgtttcgcccaccggcgacggcgtactgaccgcgctgctgacgctgagcagcatgaaaaagctcggcaccacgctcgacgccctgtacgacgaactggtgatgtttccgcaaacgctggtcaatgtccgggtgaaggacaagaaagccatcgccagtgaccccgccgtgcagcacgccgttgccgacgctgagaagcaacttgcgggcaagggccggatcaacctgcggccctcaggcaccgaaaacctcatccgggtgatggtcgaaggccaggacgagggcgaaatccacgacatcgccgccgccgtcgccaaagtggtggaggagcggggagcagcgggcgcctga

SEQ ID NO: 6036 - protein, 444 aa, Deinococcus radiodurans
MTERKYFGTDGVRAVAGEFPLTPAWVMALGAAAGEVFKRRNPRASVVIGKDTRQSGDMLEAALAAGLTSRGVNVVHLGVLPTPGVSYLTRHLGAEAGVVISASHNPYEDNGIKFFGPGGGKLSDATELEIEAAIDEAATLAPVTGVNLGSVTNYTEAERLYTAFLSSHAPDLSGMRIALDCANGAAYRVAPKVFQQAGADVFAVYTTPDGRNINRGCGSTHMDHLRLIVREGDYDLGIAFDGDADRALFVDSRGNMIHGDHMLLLSARARGEKAVVATIMTNMALEVKLQEAGLTLERTAVGDRYVHERLHAKGLNLGGEQSGHVLFLDVSPTGDGVLTALLTLSSMKKLGTTLDALYDELVMFPQTLVNVRVKDKKAIASDPAVQHAVADAEKQLAGKGRINLRPSGTENLIRVMVEGQDEGEIHDIAAAVAKVVEERGAAGA

SEQ ID NO: 6037 - DNA, 1353 bp, Desulfovibrio desulfuricans
  CDS (1)..(1353): transl_table=11
atgacgacacgtcttttcggaactgacggcctgcgcgggcaggtaaatatatatcccatggtgccggacatggctcttcgtctggggctggcggccggtactttttttcgcaacggcaataagcggcatcgggttgttatcggcaaagacacgcgtctttccggctatgtatttgaaatggcgctcacatcaggtctgtgcgctgccggtatggacgtttttctggtgggccccctgcctacgcccgccgtggcgtttcttacccgcaacatgcgggctgacctcggtgttgttatctcggcatcgcacaatcccttccatgacaacggcataaaattttttgataaagacggattcaagctgccggattcgcaggaagatgccataactgaaatggttctgaaccagaaccaccgctgggactacccggagccggaacgtgtgggcagagcccataagattcaggacgcacccggccggtacatagtgtacctgaagaacagctttcccagcacattgactctggacggcatgaaggtggtgcttgactgcgccaacggcgccaactaccgcgtggctcctctggctctggaagagctgggtgccgaagtcatcagaataggcaccagtcctgacgggctgaacatcaaccacaaatgcggctcgctgtaccccgaacttgccgcgcagcgcgtgcgtgaaacgggtgcggatatcggccttgcccttgatggtgacgcggacaggctgattgtggtggatgaaaaaggcaccgtgctggacggtgaccagattatggccatatgtgccatggatatgatggaaaaaggccgcctgccggaaaacagactggtggccaccgtcatgagcaatatggcgcttgaggtgtttatgaaagagcgcggtggttcgttgctgcgcactcccgtgggcgaccggcatgtggtggaagccatgcgccggacaggtgccgccatgggcggtgaacagtccggacaccttgtttttatggaatacggaaccaccggcgacggccttttggccgccttgcagctgctcagaatcatgcgcgaaaagaacaggccgctttcagagcttgcggggctgcttacaccgtttccgcaacagctcatcaacgtccacgtccagcgcaagattccctttgaacagtgccccgaaatcggcagggccgttgagcaggccgaaaaagaacttgccggccgcggccgggtgttgctgcgctattcgggtaccgaatctgtggcgcgggtgatggtggaaggtgaagatgatgctctggtgggcagactggccgccggtctggcggaaacccttcagcagcatctgcgctga

SEQ ID NO: 6038 - protein, 450 aa, Desulfovibrio desulfuricans
MTTRLFGTDGLRGQVNIYPMVPDMALRLGLAAGTFFRNGNKRHRVVIGKDTRLSGYVFEMALTSGLCAAGMDVFLVGPLPTPAVAFLTRNMRADLGVVISASHNPFHDNGIKFFDKDGFKLPDSQEDAITEMVLNQNHRWDYPEPERVGRAHKIQDAPGRYIVYLKNSFPSTLTLDGMKVVLDCANGANYRVAPLALEELGAEVIRIGTSPDGLNINHKCGSLYPELAAQRVRETGADIGLALDGDADRLIVVDEKGTVLDGDQIMAICAMDMMEKGRLPENRLVATVMSNMALEVFMKERGGSLLRTPVGDRHVVEAMRRTGAAMGGEQSGHLVFMEYGTTGDGLLAALQLLRIMREKNRPLSELAGLLTPFPQQLINVHVQRKIPFEQCPEIGRAVEQAEKELAGRGRVLLRYSGTESVARVMVEGEDDALVGRLAAGLAETLQQHLR

SEQ ID NO: 6039 - DNA, 1338 bp, Desulfitobacterium hafniense
  CDS (1)..(1338): transl_table=11
ttgggtaaattgtttggaacggatggggtacggggtgtggccaataaggagttgacacccgatttagcctttcgtttaggtcaagccggtgcctatgtgttgagcaaggaacacccccatccacgcattgtaatcggcaaagatacccggatctccggggatatgttggaagcggctttaattgccgggatatgctctgtgggagctgatgtattaagagtaggggttttacccactccagggattgcctacttaacacgaaccttaaaagccagtgctggagtcgtcatctcagcatctcataacccggttcaagataatggaataaagtttttttcctccacaggttacaagctgcctgacgcggtagaggaagagattgaagatcttgtccatagtcatgaaaaaccctgggcaatccccgttggcagtgaaatagggcgggtgatagagatccaagatgctcagcgccggtatatggattttttgaaagggacggtgggctcccttgccggaattaaggtggtttatgatggctccaatggtgccgcgtctcacgtggggccccaagttcttcgggagctgggagtggaggtgattcctctatctgttacccctgatggaatcaatatcaatgcaggttgcggctctacccacccggaggtacttcaacaagctgtaatcgagcataaggccgatttggggttggctaatgacggtgatgcggatcgtttaatagctgtagatgaaaacggagaaatcgtcgatggggatttcatcatggttatctgcgctttagcacttaaagccaaagggcagctgatggaagattctgtcgtagttactgtcatgagtaatctgggtttgcatatcgctttaaaagaagctggaattagagtttatgaaacccaggtaggagatcgttatgtcatggaagagctcctcaaaacaggagcgaggctagggggggaacaatccgggcatattatcttcctggatcataacaccaccggggatggcttgcttacagctttgcagctcttagcagtgcttaaagagcaaggaaaacctatttcgaagttggcggccaaaatgcagcgtctacctcaggtactgattaatgtccgagtcaaggataagaagaaagctatggaaaacccttatgttttccaaaaggtggaggaagttaagcgtttcctgggagaaaggggacgggtcctcgtacgctcttccggaactgagtccttggttcgtgttatggtagaaggccaggatcatgagcagctcatgggtctggctcagtccgtggtggatattattaagcgagaagagctttaa

SEQ ID NO: 6040 - protein, 445 aa, Desulfitobacterium hafniense
MGKLFGTDGVRGVANKELTPDLAFRLGQAGAYVLSKEHPHPRIVIGKDTRISGDMLEAALIAGICSVGADVLRVGVLPTPGIAYLTRTLKASAGVVISASHNPVQDNGIKFFSSTGYKLPDAVEEEIEDLVHSHEKPWAIPVGSEIGRVIEIQDAQRRYMDFLKGTVGSLAGIKVVYDGSNGAASHVGPQVLRELGVEVIPLSVTPDGININAGCGSTHPEVLQQAVIEHKADLGLANDGDADRLIAVDENGEIVDGDFIMVICALALKAKGQLMEDSVVVTVMSNLGLHIALKEAGIRVYETQVGDRYVMEELLKTGARLGGEQSGHIIFLDHNTTGDGLLTALQLLAVLKEQGKPISKLAAKMQRLPQVLINVRVKDKKKAMENPYVFQKVEEVKRFLGERGRVLVRSSGTESLVRVMVEGQDHEQLMGLAQSVVDIIKREEL

SEQ ID NO: 6041 - DNA, 1353 bp, Desulfotalea psychrophila
  CDS (1)..(1353): transl_table=11
atgcgaaagttatttggaacagatggaatccgtggggtggctaatgtccatcccatgaccatggaaattgccatgcaggttgggagggctattgcctttctggtaaagaaagaaaattatcgtcatcgtattgttatcggtaaagacaccaggctttctggttatatgatcgaaaatgccattgtggcgggtatctgctccatgggtgttgatgtgcttttagtgggccctcttcccaccccgggtattgcctttattaccacctccatgcgcgccgatgcgggagtggtcatctcggcctcccataatcccttccaggataatggtatcaagattttttttagtgatggctttaaattaccggatgccatggaactgaagatagaggatttggttctctcccagagaatgttggctctgcagccacttgcagaagaggttgggcgggcaagtagaattgatgatgccaagggacgctatattgtctttttgaaaaatacctttcctaaaaagtataccctggatggttttcatattgttattgattgtgcccacggggcgacctacggtgttgccccccatgtctttgaagagcttggggcaaaggttactgccctggggattgagcccaacgggcaaaatatcaatgcgggttgcggtgcacttcatcctgaactcatggcaggaaaggttaaagagctgggggcggatattggtcttgcctttgacggtgatggtgatcgtctcatcgtctgtgatgagcatggtgtcgttgttgatggcgatcatgttatggccatctgtgccaaggagcttcttgcccagcgaaagtccaagaagaagactctggtggcaacggtgatgtctaacatggggcttgaggttgccatgaagaaaatgggtggccatctggttcgtgcggatgtcggcgataggtatgttgtcgagtgtatgcgtaaaaatggctattcttttggcggagagcagtcagggcatctggtttttctagagcatatgaccaccggtgacggcatccttgccgccctgcagattcttgctattatgaaaaaacgtaagaaaactctgtcagagcttgcccaggttatgcagagttttcctcaggtactcaaaaatgtgcgtaccgcgaaaaaaatatccgttgattccattgtaggctttgccgatgcggtgaaaaagtatgagatgcagctaggtgatacgggtagaattcttgtccgtccttcgggcacagagcccgttattcgggtgatggtcgaggggctggatagcgctgaaataaatgacattgccgatgaactctgtgaacttattcggcgagtcagtaactcctaa

SEQ ID NO: 6042 - protein, 450 aa, Desulfotalea psychrophila
MRKLFGTDGIRGVANVHPMTMEIAMQVGRAIAFLVKKENYRHRIVIGKDTRLSGYMIENAIVAGICSMGVDVLLVGPLPTPGIAFITTSMRADAGVVISASHNPFQDNGIKIFFSDGFKLPDAMELKIEDLVLSQRMLALQPLAEEVGRASRIDDAKGRYIVFLKNTFPKKYTLDGFHIVIDCAHGATYGVAPHVFEELGAKVTALGIEPNGQNINAGCGALHPELMAGKVKELGADIGLAFDGDGDRLIVCDEHGVVVDGDHVMAICAKELLAQRKSKKKTLVATVMSNMGLEVAMKKMGGHLVRADVGDRYVVECMRKNGYSFGGEQSGHLVFLEHMTTGDGILAALQILAIMKKRKKTLSELAQVMQSFPQVLKNVRTAKKISVDSIVGFADAVKKYEMQLGDTGRILVRPSGTEPVIRVMVEGLDSAEINDIADELCELIRRVSNS

SEQ ID NO: 6043 - DNA, 1353 bp, Desulfovibrio vulgaris
  CDS (1)..(1353): transl_table=11
atgggcagaaggcttttcggcactgacggtctgcgcggacaggtcaacatataccctatgaccgccgatatggcgttgcgacttggcctcgcagcgggcacgcgtttccgcaatggcaatcgcagacatcgtgtcgtcatcggaaaggacacgcggctttcgggctacatgttcgagtcggccctcaccgctggcttgtgcgctgcgggcatggatgtctttcaggtggggccgctgcctacacccgccatctcgttcctgacccgcaatatgcgggctgacctcggagtggtcatctccgcttcgcataatcccttcatggataacggtatcaagttcttcgaccgttccggcttcaaactgcccgacgatgtcgagaaccagatgaccgacatggtcctcgacccggactggcagtgggattatcccgcgtcggagaaggtcgggcgtgcctacaagattgcagacgcacccggtcgctacatcgtctacatcaagagcagcttccccgcagacctcaccctcgacgggttgcgtgtcgtcatcgactgcgccaacggggcgaactacaaggtcgctcccctcgcgctggaggaactcggcgcagaggtgatcaaactgggcacggaaccaaacggactcaacatcaaccaccagtgcgggtcgctctatccggaagtggtcgctgcaaaagtgcgcgagacccgcgccgacatcggtctcgcactcgacggtgacgccgacaggctgattgtcgtggacgagaagggcaccattctggatggcgaccagatcatggccctttgcgcccaggacctcatggccaagggaaagcttcccggcaatatgctggtcgccaccgtcatgagcaacatggcgctcgaagtcttcatgaaggagcatggcggcaccctgctgcgtacagccgttggcgaccgctacgtggtcgaggccatgcgccagcatggagccctgctggggggagaacagtccgggcatctcatcttccgcgagtacagcaccacgggcgacggccttctggcggccctgcagattttgcgcatcatgcgcgaacgcggtaagcctctgtccgaactggctggacagttgcagcttttcccgcagcagcttatcaatgtccatgtggagcggaagatacccttcgcggagtgtcagccggttgcggacgcggttgcagccatagaaaccgaacttggcgaccgtgggcgcgtcctgctgaggtactccgggacagaatccgtatgtcgggtcatggtcgagggtgaacaccccgaacaggttgcccggcttgccgagatgcttgcagagaccgtgcagaagcatttgcgctag

SEQ ID NO: 6044 - protein, 450 aa, Desulfovibrio vulgaris
MGRRLFGTDGLRGQVNIYPMTADMALRLGLAAGTRFRNGNRRHRVVIGKDTRLSGYMFESALTAGLCAAGMDVFQVGPLPTPAISFLTRNMRADLGVVISASHNPFMDNGIKFFDRSGFKLPDDVENQMTDMVLDPDWQWDYPASEKVGRAYKIADAPGRYIVYIKSSFPADLTLDGLRVVIDCANGANYKVAPLALEELGAEVIKLGTEPNGLNINHQCGSLYPEVVAAKVRETRADIGLALDGDADRLIVVDEKGTILDGDQIMALCAQDLMAKGKLPGNMLVATVMSNMALEVFMKEHGGTLLRTAVGDRYVVEAMRQHGALLGGEQSGHLIFREYSTTGDGLLAALQILRIMRERGKPLSELAGQLQLFPQQLINVHVERKIPFAECQPVADAVAAIETELGDRGRVLLRYSGTESVCRVMVEGEHPEQVARLAEMLAETVQKHLR

SEQ ID NO: 6045 - DNA, 1356 bp, Dichelobacter nodosus
  CDS (1)..(1356): transl_table=11
atgatttctcgaaaatattttggtacagacggcgttcgtggtgaagtcggaaaagaaccgatgacaccacaatgggtcatgcatcttgcttgggcggtcggtagcgttttatgcgataacggttttgccggcgaaaaggtgctggtagggaaagatacgcgtttatcgggttatttgtttgaaaacgcgatcatcgctggattgtcagccgcgggcatggaagtgcacatgttaggcgtgatgcccacgccgggcattgcttattttacgcgcacttttaacgcggcggcaggcgtggtggtgagcgcgtcgcataacgtttttagcgataatggcgtaaaagtttttgcgcggggcggttataaactgcccgacagcgccgagcaacaaatcgaagcctatttggataaaccgatgacgctggttgcgccggcgaaaatgggaaaagtttatcgcgttgccgaagcgagagggcgttatattgaattttgtaaaaattcgattccgcttaatttgccttttcaccgtttaaaattggttttagattgtgcccacggcgcaacttatgccgtggcgcccgatgtttttcgggaactcggcgcgcaagtgatcgtgaccaatgccgcgcctaatggttgcaacattaatgatggttgcggttctacgcacccagaagcgttgcaacaacgcgtttgtcaagaacaagccgatatcggtattgcttttgatggcgatggcgaccgcgtcattatggtggatcagcgcgggcgtattatcgatggcgatgcgattttgtacattatcgctaaatatcgtgcatttaagggtgaacaactcaacaccattgttggcacgctgatgacgaatttgggattagagcaatcgttgcgcaaaatgggaattactttgcaccgcgcgcaagttggcgaccgctacgttttggaacaattgcagttattgcaagcgcgcgtaggcggcgaaaattcggggcacattatctgtcttgatcgtaattccaccggtgacggcattattgctgcgttgcaagttttggcagccattttagaaatggaaactacgctcgaggatttaattgctgatttggcgttgacgacgcaagttttaaaaagtgtgaccgttgttgaacgtgatgcggtgatcaatagtgcagcggtgcaaaccgcgattcaaaatgccgaagaaaaattgcgtaaccgcgggcggttgttattgcgtccatcgggtacggaacctaaaattcgggtgatggcagaaggcgatgatgaaacattgcttaatgatgtggtcaatgaattgatcgctacaattaaagaacaggagaaaactcatgcgtaa

SEQ ID NO: 6046 - protein, 451 aa, Dichelobacter nodosus
MISRKYFGTDGVRGEVGKEPMTPQWVMHLAWAVGSVLCDNGFAGEKVLVGKDTRLSGYLFENAIIAGLSAAGMEVHMLGVMPTPGIAYFTRTFNAAAGVVVSASHNVFSDNGVKVFARGGYKLPDSAEQQIEAYLDKPMTLVAPAKMGKVYRVAEARGRYIEFCKNSIPLNLPFHRLKLVLDCAHGATYAVAPDVFRELGAQVIVTNAAPNGCNINDGCGSTHPEALQQRVCQEQADIGIAFDGDGDRVIMVDQRGRIIDGDAILYIIAKYRAFKGEQLNTIVGTLMTNLGLEQSLRKMGITLHRAQVGDRYVLEQLQLLQARVGGENSGHIICLDRNSTGDGIIAALQVLAAILEMETTLEDLIADLALTTQVLKSVTVVERDAVINSAAVQTAIQNAEEKLRNRGRLLLRPSGTEPKIRVMAEGDDETLLNDVVNELIATIKEQEKTHA

SEQ ID NO: 6047 - DNA, 1338 bp, Escherichia coli O157
  CDS (1)..(1338): transl_table=11
atgagtaatcgtaaatatttcggtaccgatgggattcgtggtcgtgtaggggatgcgccgatcacacctgattttgtgcttaagctgggttgggccgcgggtaaagtgctggcgcgccacggctcccgtaagattattattggtaaagacacgcgtatttctggctatatgctggagtcagcactggaagcggggctggcggctgcgggcctttccgcactcttcactggcccgatgccaacaccggccgtggcttatctgacgcgtaccttccgcgcagaggccggaattgtgatatctgcatcgcataacccgttctacgataatggcattaaattcttttctattgacggtactaagctgccggatgcagttgaagaagccatcgaagcggaaatggaaaaagagatcagctgtgttgattcggcagaactgggtaaagccagccgtatcgttgatgctgcgggtcgctatatcgagttttgcaaagccacgttcccgaacgaacttagcctcagtgaactgaagattgtggtggattgcgcaaacggtgcgacttatcacatcgcgccgaacgtgctgcgcgaactgggagcgaatgttatcgctatcggttgtgagccaaacggtgtaaacatcaatgccgaagtgggggctaccgacgttcgcgcgctccaggctcgtgtgctggctgaaaaagcggatctcggtattgccttcgacggcgacggcgatcgcgtgattatggttgaccatgaaggcaataaagtcgatggcgatcagatcatgtatatcatcgcgcgtgaaggtcttcgtcagggccagctgcgtggtggcgctgtgggtacattgatgagcaacatggggcttgaactggcgctgaaacagttaggaattccatttgcgcgcgcgaaagtgggtgaccgctacgtactggaaaaaatgcaggagaaaggctggcgtatcggtgcagagaattccggtcatgtgatcctgctggataaaaccactaccggtgacggcatcgttgctggtttgcaggtgctggcggcgatggcgcgtaaccatatgagcctgcacgacctttgcagcggcatgaaaatgttcccgcaaatcctggtaaacgtgcgttacaccgcaggtagcggcgatccgctggagcatgaatcagtcaaagcggtgaccgcagaagttgaaacggcgctgggtagccgtggacgtgtgctgttgcgtaaatccggcaccgaaccgttaattcgcgtgatggtggaaggcgaagacgaagcgcaggtgactgaatttgcacaccgcatcgccgatgcagtaaaagccgtttaa

SEQ ID NO: 6048 - protein, 445 aa, Escherichia coli O157
MSNRKYFGTDGIRGRVGDAPITPDFVLKLGWAAGKVLARHGSRKIIIGKDTRISGYMLESALEAGLAAAGLSALFTGPMPTPAVAYLTRTFRAEAGIVISASHNPFYDNGIKFFSIDGTKLPDAVEEAIEAEMEKEISCVDSAELGKASRIVDAAGRYIEFCKATFPNELSLSELKIVVDCANGATYHIAPNVLRELGANVIAIGCEPNGVNINAEVGATDVRALQARVLAEKADLGIAFDGDGDRVIMVDHEGNKVDGDQIMYIIAREGLRQGQLRGGAVGTLMSNMGLELALKQLGIPFARAKVGDRYVLEKMQEKGWRIGAENSGHVILLDKTTTGDGIVAGLQVLAAMARNHMSLHDLCSGMKMFPQILVNVRYTAGSGDPLEHESVKAVTAEVETALGSRGRVLLRKSGTEPLIRVMVEGEDEAQVTEFAHRIADAVKAV

SEQ ID NO: 6049 - DNA, 1338 bp, Erwinia carotovora subsp
  CDS (1)..(1338): transl_table=11
atgagtaaccgcaaatattttggtaccgatggtatacgtggcaaggttggtgatacgccgattacacctgactttgtgcttaaactgggttgggctgctgggaaagtgctagcgcgacatggttctcgtaaaattattatcggcaaagatacccgtatttctggctatatgttggagtctgctctggaagctgggctggccgctgccggtttgtcggcttcttttaccggcccgatgcctacgcctgcggttgcttatctcactcgaacattccgtgctgaagcaggtatcgttatttctgcttctcacaatccttattatgacaacggtattaaattcttctcgattgacggcacaaagctacctgatgacgtggaggaagccattgaagctgagatggaaaaaccgctgacgtgtgttgagtcttcagagttaggtaaagcgagtcgcattgttgacgctgccgggcgctatatcgaattttgtaaggggactttcccgggcgaactgagtcttaatggcttaaagattgtcgtcgattgtgccaatggcgctacctaccatattgcgcccagtgttttgcgtgagcttggtgctaaagtcatcgcgattggctgtgagccggatggcatgaatatcaacgaagagtgcggtgcaacggatgtcagacagctacaggctcgcgtgctggctgaaaaggcggatgttgggctggcattcgacggcgatggcgatcgactcattatggtcgaccatttgggtaacaaggtcgatggcgatcagattctgtatatcatcgcccgcgaaggcttacgtcagggacaactacgcggcggtgcggtaggtaccctgatgagtaacatggggcttgaggtcgcgttaaagcaactcggtatcccgtttgctcgtgccaaggtgggcgaccgctatgtgttagaaatgatgcagacaaaagggtggcgcattggtgcggaaaactccggccatgtcatcctgttagataaaaccacgacgggcgatggtgtgattgccggtttgcaagtacttactgcgatagtgaaaaaccatatgagtctgcatgatttatgcagcggtatgaagttattcccacagattctggttaacgtgcggtttacgggtgaaaacgatccgctggaagacaaaagtgtgcagcagattacgcaggatgtagaaaaagagttggccggacgcgggcgagtattactgcgtaaatctggtactgaaccacttatccgcgtgatggttgaaggtgaacacgaagagacagtaatagcgcaggcgaatcgtattgctgatgcagtgaaagccgtcagttga

SEQ ID NO: 6050 - protein, 445 aa, Erwinia carotovora subsp
MSNRKYFGTDGIRGKVGDTPITPDFVLKLGWAAGKVLARHGSRKIIIGKDTRISGYMLESALEAGLAAAGLSASFTGPMPTPAVAYLTRTFRAEAGIVISASHNPYYDNGIKFFSIDGTKLPDDVEEAIEAEMEKPLTCVESSELGKASRIVDAAGRYIEFCKGTFPGELSLNGLKIVVDCANGATYHIAPSVLRELGAKVIAIGCEPDGMNINEECGATDVRQLQARVLAEKADVGLAFDGDGDRLIMVDHLGNKVDGDQILYIIAREGLRQGQLRGGAVGTLMSNMGLEVALKQLGIPFARAKVGDRYVLEMMQTKGWRIGAENSGHVILLDKTTTGDGVIAGLQVLTAIVKNHMSLHDLCSGMKLFPQILVNVRFTGENDPLEDKSVQQITQDVEKELAGRGRVLLRKSGTEPLIRVMVEGEHEETVIAQANRIADAVKAVS

SEQ ID NO: 6051 - DNA, 1368 bp, Frankia sp
  CDS (1)..(1368): transl_table=11
atggtgaggctctttggcaccgacggcgtccgaggtgtcgccaacatcgatctgaccgcggagcaggcgttgtcgctggcttccgcggcggtcgaggtcctcgctgggccgaaccggaccagcgggccctccggccgcggtaagccggtagtggtcgtcggccgggacacgcggccctccggggagttcctggaggccgcggtggtcgccgggctcgcggcctccggtgccgacgtggcccggatcggggtggcacccacgcccgcggtggctcacgccgtcgcggccagcggcgcgatgttcggcgtcatgctctccgccagccataacccgatgccggacaacggcatcaagctgttcgccgccggcggcctcaaactgcccgacgaggtcgaggatgccatcgagcggcggatggccctacctcccagccgccgtcccgtcggcgccgacgtcggtcgggtccgcgacgaaccggttctcctcgaccggtatgcggcgcatctgctggccacgctgccggtgccgctcgacggcctgcgggtcgtcgtcgactgtgcccagggcgccgcctccaccttggcccctcgggtgctgcgggcggccggagccgacgtcgtcgcgctgcacgccgacggcgacgggatagcgatcaacgacggcagcggtgccacccatctcgacagcctgcgtgccgcggtcgtggcgcacggcgccgacgtcggcatcgcccatgacggcgacgcggaccgttgcctcgccgtggacgcgaccggtgaggtcgtcgacggcgaccagatcctggcgatgtgtgctctggcgctggccgagcggggtgagctggtcgacgacacggtggtggtcaccgtgatgtcgaatctgggctttcaccacgcgatgcgggaggccggtatcaccgtcgtcactacacccgtcggagatcggtacgtgctggagacgatgcgcgccggaggctacgtgctcggcggtgagcagagcgggcacgtggtgttcctggaccacgcgacgaccggcgatgggttgttgacggcgttgcggatcctgggccgggtcgccgagaccggacaaccgctcggcgagctcaccaaggcgatgacccggctgccccaggtgttggtgaacgtgcgtggcgtcgaccggacacaggtggacaccaatgaggaactgctgcgggccgtcgccctggccaaggcggaactcggtgacgagggtcgggtgctgctgcggtcgtccggcaccgaacccctcgtgcgggtgatggtcgaggcgggcaccgacgccgccgcgcgggcggtcgcacagcggctcgccgccgtcgtgcgcaccgcgttgccgccggcgcgctga

SEQ ID NO: 6052 - protein, 455 aa, Frankia sp
MVRLFGTDGVRGVANIDLTAEQALSLASAAVEVLAGPNRTSGPSGRGKPVVVVGRDTRPSGEFLEAAVVAGLAASGADVARIGVAPTPAVAHAVAASGAMFGVMLSASHNPMPDNGIKLFAAGGLKLPDEVEDAIERRMALPPSRRPVGADVGRVRDEPVLLDRYAAHLLATLPVPLDGLRVVVDCAQGAASTLAPRVLRAAGADVVALHADGDGIAINDGSGATHLDSLRAAVVAHGADVGIAHDGDADRCLAVDATGEVVDGDQILAMCALALAERGELVDDTVVVTVMSNLGFHHAMREAGITVVTTPVGDRYVLETMRAGGYVLGGEQSGHVVFLDHATTGDGLLTALRILGRVAETGQPLGELTKAMTRLPQVLVNVRGVDRTQVDTNEELLRAVALAKAELGDEGRVLLRSSGTEPLVRVMVEAGTDAAARAVAQRLAAVVRTALPPAR

SEQ ID NO: 6053 - DNA, 1359 bp, Fusobacterium nucleatum subsp
  CDS (1)..(1359): transl_table=11
atgggaaggtactttggaacagacggaattagaggagaagcaaacagagaattaactgttgacaaagcattaagacttggctatgcacttggttattatttaaaaaacaataacccgaatgaggaaaaaataaaagttattatgggaagtgatactagaatatctgggtatatgcttagatctgcactaacagctggacttacttcaatgggaatttatatagattttgttggagttattcctacacctggtgttgcttatataacaaaacaaaaaaaagctaaggcagggattatgatttcagcttcacataatcctgcaaaggataatggaataaaaatatttaatttagaaggatacaaactttctgatgaaattgaaaatcaaattgaagattatatggataatttagataaaattttggctaatccattagctggagataaagtaggaaaatttaagtatgcagaagatgaatatttccaatataaaaattatcttactcaatgtgtaaaaggtaattttaaagatattaaaattgttcttgatacagctaatggtgctgcatatagagctgcaaaagatgtatttttagatttaagagcagaacttgttgttataaatgatgcacctaatggaagaaatatcaatgtaaaatgtggttcaactcatccagatattttgtctaaagttgtagtaggttatgaagcagacttaggtttagcttatgatggagatgctgatagacttatagctgttgataaatttggaaatgtcatagatggagataaaattataggaattttagctcttggtatgaaaaataaaggtactttaaaaaacaataaagttgttacaaccgttatgagtaatatcggttttgaaaaatatttaaaagaaaatagtatagagcttttaagagcaaatgttggagacagatatgttcttgaaaaaatgttggctgaagatgttgtcattggaggagaacaatctggacatattattttaaaagactatgctacaacaggagatggagtgttatcttcattaaaacttgttgaagttattagagatacaggaaaagatttacatgaattagtttcatcaataaaggatgctcctcaaactttaataaacgtaaaagttgataacattaagaaaaatacttgggataaaaatgaaataataatgtcttttattaatgaagcaaacaaaaaatataaggatgaagttagaatattagtaagaaaatctggaacagaacctttgataagagtaatgactgaaggagatgacaaacaacttgttcataaacttgcagaagatattgctcacttaatagaaaaagaattaaattaa

SEQ ID NO: 6054 - protein, 452 aa, Fusobacterium nucleatum subsp
MGRYFGTDGIRGEANRELTVDKALRLGYALGYYLKNNNPNEEKIKVIMGSDTRISGYMLRSALTAGLTSMGIYIDFVGVIPTPGVAYITKQKKAKAGIMISASHNPAKDNGIKIFNLEGYKLSDEIENQIEDYMDNLDKILANPLAGDKVGKFKYAEDEYFQYKNYLTQCVKGNFKDIKIVLDTANGAAYRAAKDVFLDLRAELVVINDAPNGRNINVKCGSTHPDILSKVVVGYEADLGLAYDGDADRLIAVDKFGNVIDGDKIIGILALGMKNKGTLKNNKVVTTVMSNIGFEKYLKENSIELLRANVGDRYVLEKMLAEDVVIGGEQSGHIILKDYATTGDGVLSSLKLVEVIRDTGKDLHELVSSIKDAPQTLINVKVDNIKKNTWDKNEIIMSFINEANKKYKDEVRILVRKSGTEPLIRVMTEGDDKQLVHKLAEDIAHLIEKELN

SEQ ID NO: 6055 - DNA, 1350 bp, Geobacillus kaustophilus
  CDS (1)..(1350): transl_table=11
atgggcaaatattttggcactgatggtgtacgaggagtcgcaaatcgtgaattgacgccagagttggcgtttcaaatcggccgctgcggcggatacgtgctgaccaaaagcgctgagcgcccgaaagtattgatcgggcgcgacactcgcatttccggccatatgcttgaaggcgcccttgtcgccgggcttttgtcgatcggggctgaagtgatgcgccttggcgtcatttccacgccaggtgtcgcctatttgacgaaggcgcttggagcgcaggccggcatcatgatttctgcttctcacaacccggtgcaagataacggcattaaatttttcggtccggacgggttcaagctgtcggatgagcaggaagcggaaattgaggcgctgatcgacagcgcggaggatatgctgccgcggccgatcggggctgggcttgggcaagtaaacgactattttgaaggcggacaaaagtacttgcagtatttaaaacaaacgatcgatgaagaagatttttccgggatgaaaatcgccctcgactgcgcgcacggggcgacgtcatcgcttgcgacgtacttatttgccgatttggatgcggatgtcgtgacaatgggggcttcgcccaatgggctcaacattaacgaaggagtcggttccacccatccggaagcgttggcggcgtttgtcaaagaaaaaggagccgatgtcgggctcgcctttgacggcgatggcgaccgcctcatcgccgtggatgaacgcggcaacattgttgacggcgatcaaattatgtacatttgcgccaaatatttaaaagaaaccggccgcttgaaacagcaaaccgtcgtctcgactgtcatgagcaaccttgggttttacaaggcgcttgaggcgcagggaatcaaaagtgtacaaacggccgttggcgaccgctatgtcgtcgaggaaatgaagaagaacggctataatctcggcggcgagcagtccggacatatcatcttccttgactacaacacgacgggggacggaatgttgacggcgctccagcttgtcaacatcatgaaaatcaaaggcaagccgctttccgaattggcgggggaaatgaaaaaatacccgcagctgcttgtgaacgtccgggtggccgataaggaaaaagcaatggaaaacgaacaagtgaaaaaagtgatccaggaagtggaggcagagatgaacggcaatggccgcgttcttgtccgcccatcggggactgagcctcttgtgcgcattatggcggaggcccaaaccgaggaagcgtgccgcgcctacgttgagcggatcgcggatgtcgtccgccgtgaaatgggagtggaataa

SEQ ID NO: 6056 - protein, 449 aa, Geobacillus kaustophilus
MGKYFGTDGVRGVANRELTPELAFQIGRCGGYVLTKSAERPKVLIGRDTRISGHMLEGALVAGLLSIGAEVMRLGVISTPGVAYLTKALGAQAGIMISASHNPVQDNGIKFFGPDGFKLSDEQEAEIEALIDSAEDMLPRPIGAGLGQVNDYFEGGQKYLQYLKQTIDEEDFSGMKIALDCAHGATSSLATYLFADLDADVVTMGASPNGLNINEGVGSTHPEALAAFVKEKGADVGLAFDGDGDRLIAVDERGNIVDGDQIMYICAKYLKETGRLKQQTVVSTVMSNLGFYKALEAQGIKSVQTAVGDRYVVEEMKKNGYNLGGEQSGHIIFLDYNTTGDGMLTALQLVNIMKIKGKPLSELAGEMKKYPQLLVNVRVADKEKAMENEQVKKVIQEVEAEMNGNGRVLVRPSGTEPLVRIMAEAQTEEACRAYVERIADVVRREMGVE

SEQ ID NO: 6057 - DNA, 1356 bp, Geobacter metallireducens
  CDS (1)..(1356): transl_table=11
atgaagaagcttttcggtactgatggcgttcgcggcgtggcgaacgtttatcccatgacgacggaaatggccatgcagatcggccgtgccgcagcctatctgttcaagaacggcaaccggcggcaccggatcgtcattggcaaggatacccgcctttccggttacatgctggagaacgccctggtggccggtatctgttccatgggagtagacgtactcgtggtagggccactgccaaccccgggcattgccaatatcacctcgtccatgcgggctgacgcgggagtggtcatctcggcatcccacaacgcttttcaggataacggcatcaagttcttctcccgggatggtttcaagctccccgatgagatggaactcaagatcgaggagctgatcttttccaagaagatcgattccctgcgccccattgccaccgaggtggggaaggcctaccggatcgacgatgcggtggggcgctatgtggtctttctcaagaacaccttccccaaggagcttgatctcacggggatgaagatcgtcctcgactgcgccaacggtgccgcctacaaggtggcgccggcagtcctggaggagcttggggcggaggtcattccctacggcatcaagcccaacggcactaacatcaatgccggcttcggatcgcttcaccccgaggtgatcagcgaggcagtcaaggagcaccgggccgatctgggcatagcccttgacggcgacgccgaccgggtcatttttgtggacgaattcggcaacgaggtggacggcgaccacatcatggccatctgcgccacagatatgctcaaacataagaaactccgcaagaataccctcgtggcaacggttatgagcaatatggggctcgacatagccgtgaaaaaggctggcgggaaggtgatcaagacggcagtcggggaccgctacgtggtggaggagatgctgaagggaggctacaacctcggcggcgagcagtcagggcacatgatcttccttgatcacaacaccacgggggacgggatgctctccgccctccaggtcctcgccatcatgcgtcgaagcggcaagactctctccgagctggccgaggtgatgattccgcttccccaggtcctcgtcaatgtgcgggttaccgagaaaaaggatatcatgacgatccccgaggtggctgcactcatccggggggtagaagataaactgaaggacgaggggcgcatcctcatccgctattccggcactgagccgctgttgcggatcatgctggaaggtcaggacaaataccagattaccgggtgggccaaggagattgccgacctggttgagaagaagatcggagggaagtag

SEQ ID NO: 6058 - protein, 451 aa, Geobacter metallireducens
MKKLFGTDGVRGVANVYPMTTEMAMQIGRAAAYLFKNGNRRHRIVIGKDTRLSGYMLENALVAGICSMGVDVLVVGPLPTPGIANITSSMRADAGVVISASHNAFQDNGIKFFSRDGFKLPDEMELKIEELIFSKKIDSLRPIATEVGKAYRIDDAVGRYVVFLKNTFPKELDLTGMKIVLDCANGAAYKVAPAVLEELGAEVIPYGIKPNGTNINAGFGSLHPEVISEAVKEHRADLGIALDGDADRVIFVDEFGNEVDGDHIMAICATDMLKHKKLRKNTLVATVMSNMGLDIAVKKAGGKVIKTAVGDRYVVEEMLKGGYNLGGEQSGHMIFLDHNTTGDGMLSALQVLAIMRRSGKTLSELAEVMIPLPQVLVNVRVTEKKDIMTIPEVAALIRGVEDKLKDEGRILIRYSGTEPLLRIMLEGQDKYQITGWAKEIADLVEKKIGGK

SEQ ID NO: 6059 - DNA, 1356 bp, Geobacter sulfurreducens
  CDS (1)..(1356): transl_table=11
atgaagaaattattcggaacggacggtgtccgcggtgttgccaatgtctacccaatgaccacggaaatggccatgcagatcggccgggctgcagcctatctgttcaaggacggtaatcgccgtcatcgtatcgtgatcggcaaagacacgcgcctgtccggttacatgctggaaaatgccctggtggccggcatctgctccatgggggtcgacgtccttgtggtcggccctcttcccacgccgggaattgcaaatatcacctcctccatgcgggccgatgcaggggttgtcatttctgcttcacacaacccctttcaggataacggcatcaagtttttttcccgcgatgggttcaaattgcccgacgaaatggagctcaaaatcgaggatctcattttttccgggaaaatcgactcgctccgtccggtggccaccgaggtgggcaaggcctaccggatcgatgacgcagtggggcggtatgtggtgtttctgaagaacagctttcccaaggacctcgatcttgcggggatgaagatcgtcctcgactgtgccaatggtgccgcctacaaggttgcgccggccgttcttgaggagctgggcgccgaggtcatcccttatggcgtcaagcctaacggaaccaatatcaatgccggttgcggctccctctatccgcaggtcatcagcgaagcggtcaaagagcaccgggcagacctcggcattgcccttgacggtgacgccgaccgggtcatcttcgtggacgagttcggcaacgaggtggacggcgatcacatcatggccatctgcgctactcagatgttgaaacagaaaaaactgcgcaagaacacactggtagcaacggtcatgagcaatatgggcctcgatatcgcagtgaagcgggccggcggaaaagtagtcaaaactgcggttggagatcgctacgtggtggaggagatgatcaagggggggtacaatcttggcggggagcagtcggggcacatgattttcctcgaccccaacaccaccggcgacggcgtcctgtctgccctccaggtgttggccaccatgcgccgggccgacaagagtctctccgaactggcggaggtcatgattccgttgccccaggtgctggtcaacgtgcgggtcaaggagaagaaggacataacaaccattccggaagtggcgttgctcatcggagatatagagaaaaagctcggcgacgagggacgcatccttatccgctattcgggtaccgaaccgctgttgcgtattatgctcgaaggccaggacaaatatcagataaccgggtgggcaaaggaaattgccgatctggtcgagaagaagatcggagggaagtag

SEQ ID NO: 6060 - protein, 451 aa, Geobacter sulfurreducens
MKKLFGTDGVRGVANVYPMTTEMAMQIGRAAAYLFKDGNRRHRIVIGKDTRLSGYMLENALVAGICSMGVDVLVVGPLPTPGIANITSSMRADAGVVISASHNPFQDNGIKFFSRDGFKLPDEMELKIEDLIFSGKIDSLRPVATEVGKAYRIDDAVGRYVVFLKNSFPKDLDLAGMKIVLDCANGAAYKVAPAVLEELGAEVIPYGVKPNGTNINAGCGSLYPQVISEAVKEHRADLGIALDGDADRVIFVDEFGNEVDGDHIMAICATQMLKQKKLRKNTLVATVMSNMGLDIAVKRAGGKVVKTAVGDRYVVEEMIKGGYNLGGEQSGHMIFLDPNTTGDGVLSALQVLATMRRADKSLSELAEVMIPLPQVLVNVRVKEKKDITTIPEVALLIGDIEKKLGDEGRILIRYSGTEPLLRIMLEGQDKYQITGWAKEIADLVEKKIGGK

SEQ ID NO: 6061 - DNA, 1359 bp, Gluconobacter oxydans
  CDS (1)..(1359): transl_table=11
atggccaccaaaaggtctctgttcggtactgatggcatccggggaacggccaataccgcgcccatgacggtcgagatcgcacagagactggggcaggcggccggtctgtatttcatgcgcagccagaaccgccggcatagcgtcgtgctcggcaaggatacgcgcctttcaggctacatgctggaatgtgccctggtggcgggcttcctgtcggccgggatggacgtcattctggtcggaccgctgcccacgcctgccattgccatgctgacgcgctccctgcgggcggatctgggggtgatggtctctgcatcgcacaacccctttaccgacaacggcatcaaactgttcggaccggacggtttcaagctttctgacgaggtggaaggcgagatcgaggatctgatgtcacaggatctgtccgcgcggctggcgtcaccggcgcagatcggccgagcgtcccgtctgacggatgcggccgggcgctatatcgagaatgcgaaggcctcttttccgcgtggcctgcgtctggatggcctgaagattgtcatcgactgcgccaatggctcggcctatcgcgtggcacccacggccctgtgggagttgggtgcggaagtcatcaagatcggctgttcgcctgatggtctgaacatcaatgacggcgtggggtcaacgcatcctgaaacgctgtgcgcagccgtcagggagcatggtgcggatttcggtattgcgctggatggtgatgcggaccgtgttctgattgcggatgagaacggcaatcttgtcgacggagaccagatcatcggtctgatcgcagccttctggaagcagcatgaccggttgcgaggcaatacggtggtgacgaccgtcatgtccaatatgggtctggaaaaggccctggcggagaatggtctcgaacttcagcgcacggcggtcggtgatcgctatgtcgtggaacggatgcgggaaatcggggccaatctgggcggcgagcagtccggtcacatggtcctgtcggactatgccaccacgggcgatggtctgattgcggctttgcaggtcctggcggtgtccgtcgagaccaagcggcctgccagcgagatctgccgtttcttcacgccttatccgcagcttctgaaaaatgtccgctattcagggaccagtccgatgagcagcccggatctcgctgcggccaaggcctgggcggatgagcggctggccggaagtggccgtcttgtcctgcgggcaagcgggactgaaccgctgatccgtgtcatggccgaggcgcaggatgaggcgctggtgcatgaggttgtggaccatgtctgtgatgtcatccgcgcgatcgcgcacgcctga

SEQ ID NO: 6062 - protein, 452 aa, Gluconobacter oxydans
MATKRSLFGTDGIRGTANTAPMTVEIAQRLGQAAGLYFMRSQNRRHSVVLGKDTRLSGYMLECALVAGFLSAGMDVILVGPLPTPAIAMLTRSLRADLGVMVSASHNPFTDNGIKLFGPDGFKLSDEVEGEIEDLMSQDLSARLASPAQIGRASRLTDAAGRYIENAKASFPRGLRLDGLKIVIDCANGSAYRVAPTALWELGAEVIKIGCSPDGLNINDGVGSTHPETLCAAVREHGADFGIALDGDADRVLIADENGNLVDGDQIIGLIAAFWKQHDRLRGNTVVTTVMSNMGLEKALAENGLELQRTAVGDRYVVERMREIGANLGGEQSGHMVLSDYATTGDGLIAALQVLAVSVETKRPASEICRFFTPYPQLLKNVRYSGTSPMSSPDLAAAKAWADERLAGSGRLVLRASGTEPLIRVMAEAQDEALVHEVVDHVCDVIRAIAHA

SEQ ID NO: 6063 - DNA, 1335 bp, Haemophilus ducreyi
  CDS (1)..(1335): transl_table=11
atggcagaacgtaaatattttggcactgatggcgtgcgtggaaaagtaggtcaatttccgattacgcctgatttcgcattaaagctaggttgggcagcgggtaaaattttagcaacacaaggaaccaagcaagtattaatagggaaagatactcgtatttcaggctatatgttagagtctgctttagaggcgggcttagctgctgcgggtctttctgctgcgtttgttgggccaatgccgactccagcagtagcatatctgacgcgaacttttcgagcggaagctggcattgttatctctgcatcgcataatccatattatgataatggcataaaattcttttctgccaatggtgaaaaattaccagacgaagtcgaagaagctattgaggcgttgttggatcaaccgatggactatgtcgaatccgatcaattaggtaaagccattcggattaatgatgctgctggtcgttatatcgaattctgcaaaggcactttccctgctgatgctagtttaaaaggctataaaatagtagtcgattgtgcacacggtgcaacttatcatattgcgccgaatgttatgcgcgagctaggggcagaagtaattgaaatcggcacccatccaaatggtttgaatatcaatgataaatgtggtgctacagatatcagcgcgttacaacaagctgttttaacctcaaaggctgatcttggtgtcgcctatgatggtgatggtgatcggattattatggtcgatcatttaggcaataaagtcgatggcgatcaaattctatttatcattgctcgtgaggcattacgttccggtaaattgaaaggcggtgtggtcggcacattaatgagtaatatgggattagagatagcattgaagcatttagccattccatttacgcgcgctaatgtaggtgatcgttacgtactagaacaattaaaagaaaaaaattggaagctcggcggggaaaattccggacatatcattgtcttagacaaaaatactacgggggacggtatcattgcttcattagaagtattagctgcaatggaagcacataaaatgagcttaaatgatttaacacacgcagtgccattatttccacaagtattattaaatgtccgttttgatggtggtaacaatccattagaaaacgcagccgtgaaagctcttgctaaagatattgaaacgcgtttagttggcaaaggtcgtattctgctacgtaaatccggtacagaaccgctaattcgtgtaatggtggaatgtgaagatgccgttttagcacaacaatatgcggaagaaattgtctctgcgatacaaaaccattaa

SEQ ID NO: 6064 - protein, 444 aa, Haemophilus ducreyi
MAERKYFGTDGVRGKVGQFPITPDFALKLGWAAGKILATQGTKQVLIGKDTRISGYMLESALEAGLAAAGLSAAFVGPMPTPAVAYLTRTFRAEAGIVISASHNPYYDNGIKFFSANGEKLPDEVEEAIEALLDQPMDYVESDQLGKAIRINDAAGRYIEFCKGTFPADASLKGYKIVVDCAHGATYHIAPNVMRELGAEVIEIGTHPNGLNINDKCGATDISALQQAVLTSKADLGVAYDGDGDRIIMVDHLGNKVDGDQILFIIAREALRSGKLKGGVVGTLMSNMGLEIALKHLAIPFTRANVGDRYVLEQLKEKNWKLGGENSGHIIVLDKNTTGDGIIASLEVLAAMEAHKMSLNDLTHAVPLFPQVLLNVRFDGGNNPLENAAVKALAKDIETRLVGKGRILLRKSGTEPLIRVMVECEDAVLAQQYAEEIVSAIQNH

SEQ ID NO: 6065 - DNA, 1338 bp, Haemophilus influenzae
  CDS (1)..(1338): transl_table=11
atggcaaatcgtaaatattttggaacagatggtgtacgtggaaaagtaggtagttatccaattacaccagatttcgcattaaaattaggctgggctgcgggaaaagtattggcttctcaaggttctaaaatggttttaatcggtaaagacacccgaatttctggatatatgttggaatcagcccttgaagcaggtttggctgctgcgggtttatctgctgcatttactggccctatgcctacacctgctattgcttatttgaccagaacttttcgtgctgaagcgggtatcgtgatctcagcctctcataatccttattatgataatggcattaaattcttttcagcaaaaggcactaaattgcctgatgaaattgaagaagccattgaagcgatgttagagcaaccgatggattgtgtggaatctgccgaattaggtaaagcaagccgtattaatgacgcagcaggacgctacattgagttttgtaaaggtacatttccagcacacttaggcttggaaggttataagatcgtggtagattgtgcaaatggggcgacttatcatattgcacctaacgtattgagagagcttggtgcggaagtcattgaaattggtacagatccaaatggtttgaatattaatgaaaaatgtggtgcaactgatgtgacagcattgcaagctaaagtagttgaaacgaaagctgatgttggtttggcttatgatggcgatggtgaccgcattatgatggtcgatcatttaggaaataaagtcgatggcgaccaaattctctttattattgcacgtgaagcattgcgctcaggtcaattaaaaggcggtgtcgttggcaccttaatgagtaatatgagcttagagattgcgttgaaaatgcttggtgttcccttcttacgtgcaaatgtgggagaccgttatgtattggaaaaaatgcttgaaaatgattggacgcttgggggggagaattctggacatattatcattgcggataagaatacaactggcgatggcattgttgcgtcattggctgtattggcggcgatggcacagcataaattatcattaaatgaattagcaagtgcggttaaattattccctcaagtgttaatcaatgtacgttttgcgggtggggaaaatccacttgaaagtgatgctgtaaaatctgttgccgcagaggttgaaaaacgtttagaaggtaaaggtcgtattttattgcgtaaatcgggtacggaaccacttattcgtgttatggtggaatgccaagatgctgaacttgcacaacaatgtgcagaagaaattgcagaagccgtgaaaaaaattaattaa

SEQ ID NO: 6066 - protein, 445 aa, Haemophilus influenzae
MANRKYFGTDGVRGKVGSYPITPDFALKLGWAAGKVLASQGSKMVLIGKDTRISGYMLESALEAGLAAAGLSAAFTGPMPTPAIAYLTRTFRAEAGIVISASHNPYYDNGIKFFSAKGTKLPDEIEEAIEAMLEQPMDCVESAELGKASRINDAAGRYIEFCKGTFPAHLGLEGYKIVVDCANGATYHIAPNVLRELGAEVIEIGTDPNGLNINEKCGATDVTALQAKVVETKADVGLAYDGDGDRIMMVDHLGNKVDGDQILFIIAREALRSGQLKGGVVGTLMSNMSLEIALKMLGVPFLRANVGDRYVLEKMLENDWTLGGENSGHIIIADKNTTGDGIVASLAVLAAMAQHKLSLNELASAVKLFPQVLINVRFAGGENPLESDAVKSVAAEVEKRLEGKGRILLRKSGTEPLIRVMVECQDAELAQQCAEEIAEAVKKIN

SEQ ID NO: 6067 - DNA, 1338 bp, Haemophilus influenzae
  CDS (1)..(1338): transl_table=11
atggcaaatcgtaaatattttggaacagatggtgtacgtggaaaagtaggtgcttacccaattacaccagatttcgcattaaaattaggttgggctgcgggaaaagtgttggcttctcaaggttcgaaaatggttttaattggtaaagacacccgaatttctggatacatgttggaatcagcccttgaagcaggtttggctgctgcggggttatctgctgcatttaccggccctatgccgacacctgcaattgcttatttaaccagaactttccgagctgaagcaggtatcgtgatctcagcctctcataatccttattatgataatgggattaaattcttttcagcaaaaggcactaaattacctgatgaaattgaagaagctattgaagcaatgttagagcaaccgatggattgtgtggaatctgctgaattaggtaaagccagccgtattaatgatgcagcaggacgctacattgagttttgtaaaggtacattccccgctcatttaggcttggaaggttataagatcgtggtagattgtgcaaatggtgcaacttaccatattgcccctaatgtactaagagaacttggtgcggaagttattgaaattggtacggatccaaatggtttaaacattaatgaaaaatgtggcgcaactgatgtgactgcattgcaagctaaagttgttgaaacgaaagctgatgttggtttggcttatgatggcgatggtgaccgcattatgatggtggatcatttaggaaataaagtcgatggcgaccaaattctctttattattgcgcgtgaagcattgcgctcaggtcaattaaaaggcggtgtcgttggcaccttaatgagtaatatgagcttagagattgcgttgaaaatgcttggtgttcccttcttacgtgcaaacgtgggagaccgttatgtattggaaaaaatggttgaaaatgattggacgcttgggggggagaattctggacatattatcattgcggataagaatacaacgggtgatggcattgttgcgtcattggctgtattggcggcgatggcacagcataaattatcattaaatgaattagcaagtgcggttaaattattccctcaagtgttaatcaatgtacgttttgcgggtggggaaaatccacttgaaagtgatgctgtaaaatctgttgccgcagaggttgaaaaacgtttagaaggtaaaggtcgtattttattgcgtaaatcgggtacggaaccacttattcgcgttatggtggaatgccaagatgctgaacttgcacaacaatgtgcagaagaaattgcagaagccgtgaaaaaaattaattaa

SEQ ID NO: 6068 - protein, 445 aa, Haemophilus influenzae
MANRKYFGTDGVRGKVGAYPITPDFALKLGWAAGKVLASQGSKMVLIGKDTRISGYMLESALEAGLAAAGLSAAFTGPMPTPAIAYLTRTFRAEAGIVISASHNPYYDNGIKFFSAKGTKLPDEIEEAIEAMLEQPMDCVESAELGKASRINDAAGRYIEFCKGTFPAHLGLEGYKIVVDCANGATYHIAPNVLRELGAEVIEIGTDPNGLNINEKCGATDVTALQAKVVETKADVGLAYDGDGDRIMMVDHLGNKVDGDQILFIIAREALRSGQLKGGVVGTLMSNMSLEIALKMLGVPFLRANVGDRYVLEKMVENDWTLGGENSGHIIIADKNTTGDGIVASLAVLAAMAQHKLSLNELASAVKLFPQVLINVRFAGGENPLESDAVKSVAAEVEKRLEGKGRILLRKSGTEPLIRVMVECQDAELAQQCAEEIAEAVKKIN

SEQ ID NO: 6069 - DNA, 1335 bp, Haemophilus somnus
  CDS (1)..(1335): transl_table=11
atggcggaacgtaaatattttggaactgatggtgtgcgtggcaaagtaggaagttatcctattactcccgattttgtgcttaaattaggttgggcggcaggtaaagtgctagctacacagggaactggtaaagtcctaattggtaaagatacacgtatttccggatatatgttggaatctgcattagaagccgggttggcagctgcaggactatctgccgcatttaccggaccaatgccaacaccggcaattgcttatttaacacgtacttttcgttcggaggcgggaattgttatttctgcttcacataatcctttttatgacaatggaattaagtttttttctgcccaaggtacaaaattacctgatgatgtggaagaagcaatagaggctatgttggaacagcctatggattgtgttgaatcagctaaattggggcgtgcaagccgtattaatgatgcggcaggtcgttatattgagttttgtaaaagtacttttccggcacatttaagtttagataagtataaaatcgtggtggactgtgcaaatggtgcaacttaccatattgcaccgaatgtcatgcgtgaacttggtgcagaagttattgaaatcggtacgcaacctgatggtatgaatatcaatgaaaactgcggtgcaacagatatcaaagcattacaaaataaagtattggaaacaaaagctgatatcggtttagcctatgatggcgatggtgatcgcttaattatggttgatcattttggtaataaagttgatggcgatcagatcttgtttattattgctcgtgaggcgttacgttcaggtaacttaaaaggtggcgtggtgggcacgttaatgagcaatatgagcttagagctcgctttaaagcaattgggaattccatttgttcgtgcaaatgtaggtgaccgctatgtgttagaaaaaatgcaagaatataattggattttgggtggtgaaaattcaggtcatattattattgcggataaaaatactaccggagacggtgtgatcgcttccttggcggtattagctgcaatggtgcaacataaattgtctttaaacgaattagcaagtgcggtgaaattatttccacaagtgttaattaatgtacgttttgcaggtggtgcaaatccattggaaagtgatgcagtaaaagcagttgcaacagaggtcgaaaaacaacttgcaggcaagggcagaattttattacgcaaatccggaacggagccattaattagagtgatggtggaatgtgaggatgctgaactggcacagctcagtgcagaaaaaattgctgaggcagttagatctaattag

SEQ ID NO: 6070 - protein, 444 aa, Haemophilus somnus
MAERKYFGTDGVRGKVGSYPITPDFVLKLGWAAGKVLATQGTGKVLIGKDTRISGYMLESALEAGLAAAGLSAAFTGPMPTPAIAYLTRTFRSEAGIVISASHNPFYDNGIKFFSAQGTKLPDDVEEAIEAMLEQPMDCVESAKLGRASRINDAAGRYIEFCKSTFPAHLSLDKYKIVVDCANGATYHIAPNVMRELGAEVIEIGTQPDGMNINENCGATDIKALQNKVLETKADIGLAYDGDGDRLIMVDHFGNKVDGDQILFIIAREALRSGNLKGGVVGTLMSNMSLELALKQLGIPFVRANVGDRYVLEKMQEYNWILGGENSGHIIIADKNTTGDGVIASLAVLAAMVQHKLSLNELASAVKLFPQVLINVRFAGGANPLESDAVKAVATEVEKQLAGKGRILLRKSGTEPLIRVMVECEDAELAQLSAEKIAEAVRSN

SEQ ID NO: 6071 - DNA, 1335 bp, Haemophilus somnus
  CDS (1)..(1335): transl_table=11
atggcggaacgtaaatattttggaactgatggtgtgcgtggcaaagtaggaagttatcctattactcccgattttgtgctgaaattaggatgggcagcaggtaaagtgctagctacacagggaactggtaaagtcctaattggtaaagatacacgtatttccggatatatgttggaatctgcattagaagcggggttggcagctgcaggattatctgccgcatttaccggaccaatgccaacaccggcaattgcttatttaacacgtacttttcgttcggaggcgggaattgttatttctgcttcacataatcctttttatgacaatggaattaagtttttttctgcacaaggtacaaaattacctgatgatgtggaagaagcaatagaggctatgttggaacagcctatggattgtgttgaatcagctaaattggggcgtgcaagccgtattaatgatgcggcaggtcgttatattgagttttgtaaaagtacttttccggcacatttaagtttagataagtataaaatcgtggtggactgtgcaaatggtgcaacttaccatattgcaccgaatgtcatgcgtgaacttggtgcagaagttattgaaattggtacgcaacccgatggtatgaatatcaatgaaaactgcggtgcaacagatatcaaagcattacaaaatcaagtattggaaacaaaagctgatatcggtttagcctatgatggcgatggtgatcgcttaattatggttgatcattttggtaataaagttgatggcgatcagatcttgtttattattgctcgtgaggcgttacgttcaggtaacttaaaaggtggcgtggtgggcacgttaatgagcaatatgagcttagagctcgctttaaagcaattgggaattccatttgttcgtgcaaatgtaggtgaccgctatgtgttagaaaaaatgcaagaatataattggattttgggtggtgaaaattcaggtcatattattattgcggataaaaatactaccggagacggtgtgatcgcttccttggcggtattagctgcaatggtgcaacataaattgtctttaaacgaattagcaagtgcggtgaaattatttccacaagtgttaattaatgtacgttttgcaggtggtgcaaatccattggaaagtgatgcagtaaaagcagttgcaacagaggtcgaaaaacaacttgcaggcaagggcagaattttattacgcaaatccggaacggagccattaattagagtgatggtggaatgtgaggatgctgaactggcacagctcagtgcagaaaaaattgctgaggcagttagatctaattag

SEQ ID NO: 6072 - protein, 444 aa, Haemophilus somnus
MAERKYFGTDGVRGKVGSYPITPDFVLKLGWAAGKVLATQGTGKVLIGKDTRISGYMLESALEAGLAAAGLSAAFTGPMPTPAIAYLTRTFRSEAGIVISASHNPFYDNGIKFFSAQGTKLPDDVEEAIEAMLEQPMDCVESAKLGRASRINDAAGRYIEFCKSTFPAHLSLDKYKIVVDCANGATYHIAPNVMRELGAEVIEIGTQPDGMNINENCGATDIKALQNQVLETKADIGLAYDGDGDRLIMVDHFGNKVDGDQILFIIAREALRSGNLKGGVVGTLMSNMSLELALKQLGIPFVRANVGDRYVLEKMQEYNWILGGENSGHIIIADKNTTGDGVIASLAVLAAMVQHKLSLNELASAVKLFPQVLINVRFAGGANPLESDAVKAVATEVEKQLAGKGRILLRKSGTEPLIRVMVECEDAELAQLSAEKIAEAVRSN

SEQ ID NO: 6073 - DNA, 1362 bp, Helicobacter hepaticus
  CDS (1)..(1362): transl_table=11
atgaagacaaaagatacaaaggcaaaactatttggcactgatggtgtccgaggacgtgcgggggaagtgattactccctcaagtgtgatagctttaggaacaagtgcggggatacactttcgccaacattcattgacaaataagattctcgtaggcaaggatacacgtcgtagcggttatatgatagaaaacgctcttgtttctgctctcacttctgtgggctatgatgtgatacaaattggtcctatgcctactcccgccgttgcttttttgacagaggatatgcgatgcgatgcgggaattatgataagcgcaagccataatccctatgatgataatggtataaaattctttaatcattatggttataaacttgctcaagaagaagaagaaagtatagaatcttattattacaatcccacctcgctccaaagcgcactcaaaagtgggctagaaatcggtagttcaaagcgtattgatgatgtggtgggacgttatattgtgcatattaaaaattcttttccaaagaatctaactttacgaggattgcgtatagtgtgtgattgtgctaatggtgcggcatatcgtgttgctcctattgtgttgagcgaattaggagctgatgtgatagctattaatgatgagcctaatggatacaatatcaacaagcagtgcggagctatgcaccctgaaggcttggctcaagaagtgatgacatatcgtgctgatgtgggctttgctcttgatggcgatgcggatagattagtggtggtggataataaaggaaatattgtcaatggtgataaactcatcggtgcacttgctttgtatcaaaagcaaattggcaaacttgaaaataatgctattgtggcaactttgatgagtaatcttgcacttgaagagttccttaagtctcatcaaatagggcttcatcgttgcaatgttggagataaatatgtatgggataaaatgcgtgagcataagcttaattttggaggggagagcagcggacatattatttttagtgattatgcaaaaactggcgatggcttggtgagtgcattgcaagttttagcacttttaatccaaagtgggaaaagttctcaagatgcgcttaatccctttgagatttatccgagcgagcttgtgaatcttaaagtttctcaaaaaaagccacttgaaaaaattaatggattgcaagaaaaattagattctataagtgcatctgggaatcgctaccttgtgcgctactctggcacagaaaataaacttagaatcttggtggaaggtaaagattacaagcttgtgagtgagcaagttaaaatgcttgttgatttatgccaaaagcagctcaatgtgtaa

SEQ ID NO: 6074 - protein, 453 aa, Helicobacter hepaticus
MKTKDTKAKLFGTDGVRGRAGEVITPSSVIALGTSAGIHFRQHSLTNKILVGKDTRRSGYMIENALVSALTSVGYDVIQIGPMPTPAVAFLTEDMRCDAGIMISASHNPYDDNGIKFFNHYGYKLAQEEEESIESYYYNPTSLQSALKSGLEIGSSKRIDDVVGRYIVHIKNSFPKNLTLRGLRIVCDCANGAAYRVAPIVLSELGADVIAINDEPNGYNINKQCGAMHPEGLAQEVMTYRADVGFALDGDADRLVVVDNKGNIVNGDKLIGALALYQKQIGKLENNAIVATLMSNLALEEFLKSHQIGLHRCNVGDKYVWDKMREHKLNFGGESSGHIIFSDYAKTGDGLVSALQVLALLIQSGKSSQDALNPFEIYPSELVNLKVSQKKPLEKINGLQEKLDSISASGNRYLVRYSGTENKLRILVEGKDYKLVSEQVKMLVDLCQKQLNV

SEQ ID NO: 6075 - DNA, 1338 bp, Helicobacter pylori J99
  CDS (1)..(1338): transl_table=11
atgaaaatttttgggactgatggcgtgaggggtaaagcaggggtgaaactcacccccatgtttgtgatgcgtttaggcattgctgccggattgtattttaaaaaacattctcaaacgaataaaattctaatcggtaaagacaccagaaagagcggctatatggtagaaaacgctttagtgagcgctctcacttccataggctataatgtgatccaaatagggcctatgcctacccctgcgatcgcttttttaaccgaagacatgcgctgtgatgcgggcattatgataagcgcgagccacaacccttttgaagacaatggcatcaagtttttcaattcctatggttataaactcaaagaagaagaagaaagagcgattgaagaaatctttcatgatgaagaattactgcattctagctataaagtgggcgagagcgtcggtagcgctaaaaggatagacgatgtgatagggcgctatatcgcgcatttgaagcactctttccccaaacatttgaatttacaaaaattaaggatcgtgctagatacggctaatggcgcggcttataaggtggctccggtcgtttttagcgagcttggggctgatgttttagtgatcaatgatgagcctaatgggtgtaacattaatgagcaatgcggggctttacaccctaaccaattgagccaggaagtgaaaaaataccgtgcggatctaggctttgcttttgatggcgatgccgataggctagtggtggtggataatttagggaatatcgtgcatggggataagcttttaggggtgttaggggtttatcaaaaatctaaaaacgccctttcttctcaagcggttgtcgctacgagcatgagcaatttagcccttaaagaatacctgaaatcccaagatttagaattgaagcattgcgcgattggggataagtttgtgagcgaatgcatgcgattgaataaagccaattttgggggcgagcaaagcgggcatatcatttttagcgattacgctaaaacgggcgatggtttggtgtgcgctttgcaagtgagcgcgttagtgttagaaagcaagcttgtaagctctattgcgttaaacccctttgaactatacccccaaagcctagtgaatttgaatatccaaaaaaagccccctttagaaagcctgaaaggttatagcgctcttttaaaagaattagaccaactagagatccgccatttgatccgttatagcggcactgaaaacaaattacgaatccttttagaagctaaagacgaaaaacttttagaatccaaaatgcaagaattaaaagaattttttgaagggcagttgtgctaa

SEQ ID NO: 6076 - protein, 445 aa, Helicobacter pylori J99
MKIFGTDGVRGKAGVKLTPMFVMRLGIAAGLYFKKHSQTNKILIGKDTRKSGYMVENALVSALTSIGYNVIQIGPMPTPAIAFLTEDMRCDAGIMISASHNPFEDNGIKFFNSYGYKLKEEEERAIEEIFHDEELLHSSYKVGESVGSAKRIDDVIGRYIAHLKHSFPKHLNLQKLRIVLDTANGAAYKVAPVVFSELGADVLVINDEPNGCNINEQCGALHPNQLSQEVKKYRADLGFAFDGDADRLVVVDNLGNIVHGDKLLGVLGVYQKSKNALSSQAVVATSMSNLALKEYLKSQDLELKHCAIGDKFVSECMRLNKANFGGEQSGHIIFSDYAKTGDGLVCALQVSALVLESKLVSSIALNPFELYPQSLVNLNIQKKPPLESLKGYSALLKELDQLEIRHLIRYSGTENKLRILLEAKDEKLLESKMQELKEFFEGQLC

SEQ ID NO: 6077 - DNA, 1338 bp, Helicobacter pylori
  CDS (1)..(1338): transl_table=11
atgaaaatttttgggactgatggcgtgaggggtaaagcaggggtgaaactcacccccatgtttgtgatgcgtttaggcattgctgccggattgtattttaaaaaacattctcaaacgaataaaattctaatcggtaaagacaccagaaaaagcggctatatggtagaaaacgctttagtgagcgctctaacttccataggctataatgtgattcaaatagggcctatgcccacccctgcgattgcgtttttaactgaagacatgcgctgtgatgcgggtattatgataagcgcgagccacaacccttttgaagataatggcattaagtttttcaattcttatggctataagcttaaagaagaagaagaaaaagcgattgaagaaatctttcatgatgaagaattactgcattctagctataaagtgggtgagagcgtcggtagcgctaaaaggatagacgatgtcatagggcgctatattgcacatttaaaacactctttccccaaacatttgaatttacagagtttaaggatcgtgctagatacggctaatggcgcggcttataaggtggctccggtcgtttttagcgagcttggggctgatgtgttagtgattaatgatgagcctaacgggtgtaacattaatgatcaatgcggggctttacaccccaaccaattaagccaggaagtgaaaaaataccgcgcagatttaggctttgcttttgatggcgatgctgacaggctagtggtggtggataatttagggaatatcgtgcatggggataagcttttaggggtgttaggggtttatcaaaaatctaaaaacgccctttcttctcaagcggttgtcgccacaaacatgagcaatttagcccttaaagaatatttaaaatcccaagatttggaattgaagcattgcgcgattggggataagtttgtgagcgaatgcatgcaattgaataaagccaattttggaggcgagcaaagcgggcatatcatttttagcgattacgctaaaacaggcgatggtttggtgtgcgctttgcaagtgagcgcgttagtgttagaaagcaagcaggtaagctctgttgcgttaaacccctttgaattatacccccaaagcctagtgaatttgaatgtccaaaaaaagccccctttagaaagcctgaaaggttatagcgctcttttaaaagaattagacaagctagaaatccgccatttgatccgttatagcggcactgaaaacaaattgcgaatccttttagaagctaaagatgaaaagcttttagaatccaaaatgcaagaattaaaagagttttttgaagggcatttgtgctaa

SEQ ID NO: 6078 - protein, 445 aa, Helicobacter pylori
MKIFGTDGVRGKAGVKLTPMFVMRLGIAAGLYFKKHSQTNKILIGKDTRKSGYMVENALVSALTSIGYNVIQIGPMPTPAIAFLTEDMRCDAGIMISASHNPFEDNGIKFFNSYGYKLKEEEEKAIEEIFHDEELLHSSYKVGESVGSAKRIDDVIGRYIAHLKHSFPKHLNLQSLRIVLDTANGAAYKVAPVVFSELGADVLVINDEPNGCNINDQCGALHPNQLSQEVKKYRADLGFAFDGDADRLVVVDNLGNIVHGDKLLGVLGVYQKSKNALSSQAVVATNMSNLALKEYLKSQDLELKHCAIGDKFVSECMQLNKANFGGEQSGHIIFSDYAKTGDGLVCALQVSALVLESKQVSSVALNPFELYPQSLVNLNVQKKPPLESLKGYSALLKELDKLEIRHLIRYSGTENKLRILLEAKDEKLLESKMQELKEFFEGHLC

SEQ ID NO: 6079 - DNA, 1347 bp, Herminiimonas arsenicoxydans
  CDS (1)..(1347): transl_table=11
atgacaagaaaatatttcggtaccgatggggtacgcggcaaagtaggtgtttctccgatcactccggacttcgtgatgcgcctgggctatgccgccggcagcgtactgaccaaatttgaaactaccaaaacaccaggcagccggccgacggtattgataggcaaggacacgcgcatttccggttatatgctggaggcggcgctggaagcgggtttctccgctgccggagtggacgtcatgctggccggacctgtaccgacgccggctgtggcatacctgacgcgcgcattgcgcctgtctgccggtgtcgtcatctctgcctcgcacaatccctacgacgataacggtatcaagtttttttccgcttccggcaataaattagccgatgccactgagctggaaattgaggctgcactggatgtgcctatgtcatgtgtggcatcggaaaagctgggtcgtgtcaaacgtctggacgatgcgcgcgggcgttatatcgaattctgcaaaagcactttcccgaatgagctggatttgcgcggtacgaaaatcgtcgtcgattgcgcgcatggtgcggcctaccatatcgcgcccgatgtgtttcacgagctgggcgcagaagtcgtggcaatcggcaatcagcctagcggcttcaatatcaacgataaggtgggcgccacggcgccggccgctctggtcgaagcagtacgcgccaaccaggcagacatcggaattgcactcgatggcgacgccgatcgtttgatcgtggtcgatgcatccggccgtatttttactggcgatgagatgctctacatcatggtcaaggatcgcatgagtgtgcaagctgttgcaggtgcggtcggcacgttgatgacgaatatggcgctggaagtggcgttcaggaaaatgggtatcggcttcgtccgtgccaatgtcggcgaccgctatgtgctggaagccctgcaggaacgcggctggttgctgggcggggaaggctctggtcatatgctgtttctggacaagcacacgacaggcgacggtatcatttctgcgctgcaaattctgtctgcattgaaacgcagcggcaagaccctggcgcaattgacggcggatatcgcaatgtttccgcaaacgttgatcaatgtaaaggtaaggcccggtttcgactggaagaagaatgctggtttgctggctgaaaaagaacaggttgaagcagagttgggcgatgaaggtcgcgtcctgattcgcgcttccggaaccgagccattgatccgtgtcatggtcgaagcaaagaatggcgaaatggccgataaaatggcgcgccgaatcgccgccacattaacggtataa

SEQ ID NO: 6080 - protein, 448 aa, Herminiimonas arsenicoxydans
MTRKYFGTDGVRGKVGVSPITPDFVMRLGYAAGSVLTKFETTKTPGSRPTVLIGKDTRISGYMLEAALEAGFSAAGVDVMLAGPVPTPAVAYLTRALRLSAGVVISASHNPYDDNGIKFFSASGNKLADATELEIEAALDVPMSCVASEKLGRVKRLDDARGRYIEFCKSTFPNELDLRGTKIVVDCAHGAAYHIAPDVFHELGAEVVAIGNQPSGFNINDKVGATAPAALVEAVRANQADIGIALDGDADRLIVVDASGRIFTGDEMLYIMVKDRMSVQAVAGAVGTLMTNMALEVAFRKMGIGFVRANVGDRYVLEALQERGWLLGGEGSGHMLFLDKHTTGDGIISALQILSALKRSGKTLAQLTADIAMFPQTLINVKVRPGFDWKKNAGLLAEKEQVEAELGDEGRVLIRASGTEPLIRVMVEAKNGEMADKMARRIAATLTV

SEQ ID NO: 6081 - DNA, 1350 bp, Hyphomonas neptunium
  CDS (1)..(1350): transl_table=11
atggcgcgccaatattttggaacggacggcattcgcggacgggtgaatacaagtccgatgacggcagaaacagcgctgcgcctctccatagcagccgcccgcaccttcgcgcccgaaggaggaagggaggtcgtgatcggccgcgacacccgccgctcgggagacatgatcgaagcagcacttgtcgcgggtttcacatcgatgggaattacccctgtgctgctcggcgtcgtgccgacccccgcagttgccctgatggcgcgggaaacgggtgccgcgctcggggttatggtctcggcaagtcacaacaaatttgaggacaatggcctcaagctgttcagtcccgagggcatcaagttcgacgatgacaccgaagaagcgctcgaaatggctatgggtacagcgctgaaaggcgagtacgccgcgcccgccgagatcacgcttccacgcacgatggccggcacgtcaaatcgatatgtccgccgctgcctcgacacactcgctggcggacaagatttctcgaaactgaaggtcgttctggactgcgcacatggcgcaggatttgagaccggaccggccgccctgactgaactcggcgcccagctgaccgttattggcgccgcgccagacgggatcaatatcaatgccgggtttggctctactgcaaccggcgcgctcaaggcggccgttctggaaaccggcgctcatatcggaattgctctggacggtgatgcagaccgcctgatcgtaatagacgaaaccggtaccgaagcggacggcgaccaggtcatgggcctcattgcgggcgaaatgcaccgcaccggccgcctcaagggtggcggcatggtggccacggtaatgtccaacatggggctgtcagaatatctgaagacggaaggactaactctggcacgcacgaaggtgggtgaccggtatgtaggcgaacatatgcgcgcacacggtttcaacctcggtggcgaacaatccggacacatcatactttcagatgtttccactacaggagacggccttctggcaggattgcaaatcctgtcagtgctcgccgcgcgcggcggtaaggcatccgatatgttgcgggttttcacgcccgcgccacaggagctgattaacatacgctattcgggcgcgaaccctctcgaatctgatagggtcaagacagcgctggccgaagcagagggcctgctcggcgaccgtgggcggatggtggtgagaaagtccggcacagaacctttgatccgcgttatggctgaagcactggacgaagacctcatgctaaaagccctgcaccatgcagcaaacgcagtaactgcagcggctggaaacagctga

SEQ ID NO: 6082 - protein, 449 aa, Hyphomonas neptunium
MARQYFGTDGIRGRVNTSPMTAETALRLSIAAARTFAPEGGREVVIGRDTRRSGDMIEAALVAGFTSMGITPVLLGVVPTPAVALMARETGAALGVMVSASHNKFEDNGLKLFSPEGIKFDDDTEEALEMAMGTALKGEYAAPAEITLPRTMAGTSNRYVRRCLDTLAGGQDFSKLKVVLDCAHGAGFETGPAALTELGAQLTVIGAAPDGININAGFGSTATGALKAAVLETGAHIGIALDGDADRLIVIDETGTEADGDQVMGLIAGEMHRTGRLKGGGMVATVMSNMGLSEYLKTEGLTLARTKVGDRYVGEHMRAHGFNLGGEQSGHIILSDVSTTGDGLLAGLQILSVLAARGGKASDMLRVFTPAPQELINIRYSGANPLESDRVKTALAEAEGLLGDRGRMVVRKSGTEPLIRVMAEALDEDLMLKALHHAANAVTAAAGNS

SEQ ID NO: 6083 - DNA, 1341 bp, Idiomarina loihiensis
  CDS (1)..(1341): transl_table=11
ttgagtgagcgtaaatatttcggcactgatggcgtgcgcggacgtgtcgggcaattcccgataacccctgaatttgccgtaaagcttggctgggccgctgggcgtgtactagccgctaagggtaccagtcgcgtattagtgggcaaagacacccgggtttctggttatatgcttgagtcagcactggaggctggtttagccgctgctggtgttggcgtggacttcttaggtcctatgcccactcccggaattgcttatcttacacgcacgttcagagctgctgccggaatcgtgattagcgcctctcataacccatattatgataatggtattaagttttttgctgataacggacacaagcttcctgacgcggttgagctggaaattgaacgtttgttagacgagcctatggactgcgttatttccgaagagttagggcgggcaaaacgcattaatgatgccgcaggacgttatattgagttttgtaaaagcgtattccccaacgaaatgacgctggaagggcttcacatcgtggttgactgcgcccatggcgctacttaccacattgcgcctaatgtgcttcgggaacttggtgctgaagtgaccgaaataggcacgcagcccaatggactgaatattaataaagagtgtggtgcaacgcacttaacggcattgcagaataaagtgctggaaaccaaagccgaccttggcatagcgcttgacggtgatggcgatcgtatcatgatggtgactgaaaacggacgccccattgatggcgacgaaattctttatatgctcgctgttactgcgcagaatcagggacagcttcagggcggggttgttggtactttgatgaccaactttgctttggagaaggagctggataaacggcgtattccattcgttcgggcgaaagtcggcgaccgctatgttattgaggaactggttaagcgtgactggtatctggggggagagaactccggccatgttataaaccgtcagcatcacactactggggacggcattatagctggcctgcaggtgttggcagctatgtatcaggaacaaaagtctctggagaaactgagctgcgactttcataagctgccgcaagtacttattaatgtccgctttgagagcgataaacagccgctggaatcagaaaatgtgaaaagcgttgttcgtgaagttgagagcgctttagcaggcactggtcgggtcttattacgtaagtctggcactgaacctttaattcgcgtaatggtcgagggtgagaacgaagctaaggtaaaagcctttgctcagcaaattgctaacgaggtcgaagcggctacaaattaa

SEQ ID NO: 6084 - protein, 446 aa, Idiomarina loihiensis
MSERKYFGTDGVRGRVGQFPITPEFAVKLGWAAGRVLAAKGTSRVLVGKDTRVSGYMLESALEAGLAAAGVGVDFLGPMPTPGIAYLTRTFRAAAGIVISASHNPYYDNGIKFFADNGHKLPDAVELEIERLLDEPMDCVISEELGRAKRINDAAGRYIEFCKSVFPNEMTLEGLHIVVDCAHGATYHIAPNVLRELGAEVTEIGTQPNGLNINKECGATHLTALQNKVLETKADLGIALDGDGDRIMMVTENGRPIDGDEILYMLAVTAQNQGQLQGGVVGTLMTNFALEKELDKRRIPFVRAKVGDRYVIEELVKRDWYLGGENSGHVINRQHHTTGDGIIAGLQVLAAMYQEQKSLEKLSCDFHKLPQVLINVRFESDKQPLESENVKSVVREVESALAGTGRVLLRKSGTEPLIRVMVEGENEAKVKAFAQQIANEVEAATN

SEQ ID NO: 6085 - DNA, 1365 bp, Kineococcus radiotolerans
  CDS (1)..(1365): transl_table=11
gtggcgcggctcttcgggaccgacggtgtgcggggactggcgaacgtcgacctcaccgccgacatggcgctggggctggcggtggcggcggcctcggtgctggtcgagccgggcgggaacgcccacccgcgggcgctggtcgcccgcgacccccgcgcctcgggggagttcctgtccgcggccgtcgtggccgggctggccagcgcgggcgtcgacgtcctcgacatcggcgtcgtgccgaccccggcgctggcccacctggtggacacctccggcgccgacttcggcgtcatgctgtccgcctcgcacaaccccatgcccgacaacgggctgaagatcttcgcccggggcggcacgaagctgcccgacgacgtcgaggacgtcgtggagcgcgcctaccgcgagggcgggggccgccggcccaccggcgccgccgtgggccgcgtccacgggggacccgacgtggagcaggacgcccaggacacctacgtcgcgcacctgctgtccacgctgcccgggggcccgggctcgctgaaggggctgcacgtcgtcgtcgactgcgccaacggcgcggccagcgcggtctccccgcgggtgctggccgaggccggcgcccgggtgacgacgatcttcgccgccccggacgggctcaacatcaacgacggctgcggctcgacgcacctgggcccggtgacggccgcggtcctggcccacggcgccgacatcggcctggcccacgacggcgacgccgaccgctgcctggccgtggacgcccgcggcaacgccgtcgacggcgaccagatcatggccgtcctcaccctcgccctgcgcgaccgcgggcagctcaccgacgacaccctcgtcgccactgtcatgagcaacctcgggctgcggctggccatgcagcgcgagggcgtgacgatggtcgagacgggggtcggggaccgctacgtcctggaggccctcaacgccggcgggtggagcatcggcggggagcagagcggccacgtcgtcctgcccgcgcacgccacgacgggcgacggcgtcctcaccggcctgcacctgctggcccggatggccgagaccggccgcagcctcgaggacctcacgggggtcgtgcagcggctgccgcaggtcctggtcaacgtccgcggggtcgacaagtcccgcgccggcagcgacgcggaactgctcggggccgtcgccgacgccgagcgcgagctcggcgagaccggccgggtcctgctgcgccccagcgggaccgagccgctggtgcgggtcatggtcgaggccgcgcacaccgaccacgcgcagggcgtcgccgaccggctggccgacgtggtgcgcaagcgtctggccctctga

SEQ ID NO: 6086 - protein, 454 aa, Kineococcus radiotolerans
MARLFGTDGVRGLANVDLTADMALGLAVAAASVLVEPGGNAHPRALVARDPRASGEFLSAAVVAGLASAGVDVLDIGVVPTPALAHLVDTSGADFGVMLSASHNPMPDNGLKIFARGGTKLPDDVEDVVERAYREGGGRRPTGAAVGRVHGGPDVEQDAQDTYVAHLLSTLPGGPGSLKGLHVVVDCANGAASAVSPRVLAEAGARVTTIFAAPDGLNINDGCGSTHLGPVTAAVLAHGADIGLAHDGDADRCLAVDARGNAVDGDQIMAVLTLALRDRGQLTDDTLVATVMSNLGLRLAMQREGVTMVETGVGDRYVLEALNAGGWSIGGEQSGHVVLPAHATTGDGVLTGLHLLARMAETGRSLEDLTGVVQRLPQVLVNVRGVDKSRAGSDAELLGAVADAERELGETGRVLLRPSGTEPLVRVMVEAAHTDHAQGVADRLADVVRKRLAL
